United States Patent Application Publication US 2025/0320254 A1 - sequence listing, part 2

SEQ ID NO: 3250 - protein, 255 aa, Homo sapiens
MASSDLEQLCSHVNEKIGNIKKTLSLRNCGQEPTLKTVLNKIGDEIIVINELLNKLELEIQYQEQTNNSLKELCESLEEDYKDIEHLKENVPSHLPQVTVTQSCVKGSDLDPEEPIKVEEPEPVKKPPKEQRSIKEMPFITCDEFNGVPSYMKSRLTYNQINDVIKEINKAVISKYKILHQPKKSMNSVTRNLYHRFIDEETKDTKGRYFIVEADIKEFTTLKADKKFHVLLNILRHCRRLSEVRGGGLTRYVIT

SEQ ID NO: 3251 - protein, 1527 aa, Homo sapiens
MDALCGSGELGSKFWDSNLSVHTENPDLTPCFQNSLLAWVPCIYLWVALPCYLLYLRHHCRGYIILSHLSKLKMVLGVLLWCVSWADLFYSFHGLVHGRAPAPVFFVTPLVVGVTMLLATLLIQYERLQGVQSSGVLIIFWFLCVVCAIVPFRSKILLAKAEGEISDPFRFTTFYIHFALVLSALILACFREKPPFFSAKNVDPNPYPETSAGFLSRLFFWWFTKMAIYGYRHPLEEKDLWSLKEEDRSQMVVQQLLEAWRKQEKQTARHKASAAPGKNASGEDEVLLGARPRPRKPSFLKALLATFGSSFLISACFKLIQDLLSFINPQLLSILIRFISNPMAPSWWGFLVAGLMFLCSMMQSLILQHYYHYIFVTGVKFRTGIMGVIYRKALVITNSVKRASTVGEIVNLMSVDAQRFMDLAPFLNLLWSAPLQIILAIYFLWQNLGPSVLAGVAFMVLLIPLNGAVAVKMRAFQVKQMKLKDSRIKLMSEILNGIKVLKLYAWEPSFLKQVEGIRQGELQLLRTAAYLHTTTTFTWMCSPFLVTLITLWVYVYVDPNNVLDAEKAFVSVSLFNILRLPLNMLPQLISNLTQASVSLKRIQQFLSQEELDPQSVERKTISPGYAITIHSGTFTWAQDLPPTLHSLDIQVPKGALVAVVGPVGCGKSSLVSALLGEMEKLEGKVHMKGSVAYVPQQAWIQNCTLQENVLFGKALNPKRYQQTLEACALLADLEMLPGGDQTEIGEKGINLSGGQRQRVSLARAVYSDADIFLLDDPLSAVDSHVAKHIFDHVIGPEGVLAGKTRVLVTHGISFLPQTDFIIVLADGQVSEMGPYPALLQRNGSFANFLCNYAPDEDQGHLEDSWTALEGAEDKEALLIEDTLSNHTDLTDNDPVTYVVQKQFMRQLSALSSDGEGQGRPVPRRHLGPSEKVQVTEAKADGALTQEEKAAIGTVELSVFWDYAKAVGLCTTLAICLLYVGQSAAAIGANVWLSAWTNDAMADSRQNNTSLRLGVYAALGILQGFLVMLAAMAMAAGGIQAARVLHQALLHNKIRSPQSFFDTTPSGRILNCFSKDIYVVDEVLAPVILMLLNSFFNAISTLVVIMASTPLFTVVILPLAVLYTLVQRFYAATSRQLKRLESVSRSPIYSHFSETVTGASVIRAYNRSRDFEIISDTKVDANQRSCYPYIISNRWLSIGVEFVGNCVVLFAALFAVIGRSSLNPGLVGLSVSYSLQVTFALNWMIRMMSDLESNIVAVERVKEYSKTETEAPWVVEGSRPPEGWPPRGEVEFRNYSVRYRPGLDLVLRDLSLHVHGGEKVGIVGRTGAGKSSMTLCLFRILEAAKGEIRIDGLNVADIGLHDLRSQLTIIPQDPILFSGTLRMNLDPFGSYSEEDIWWALELSHLHTFVSSQPAGLDFQCSEGGENLSVGQRQLVCLARALLRKSRILVLDEATAAIDLETDNLIQATIRTQFDTCTVLTIAHRLNTIMDYTRVLVLDKGVVAEFDSPANLIAARGIFYGMARDAGLA

SEQ ID NO: 3252 - protein, 368 aa, Homo sapiens
MNALLEQKEQQERLREAAALGDIREVQKLVESGVDVNSQNEVNGWTCLHWACKRNHGQVVSYLLKSGADKEILTTKGEMPVQLTSRREIRKIMGVEEEDDDDDDDDNLPQLKKESELPFVPNYLANPAFPFIYTPTAEDSAQMQNGGPSTPPASPPADGSPPLLPPGEPPLLGTFPRDHTSLALVQNGDVSAPSAILRTPESTKPGPVCQPPVSQSRSLFSSVPSKPPMSLEPQNGTYAGPAPAFQPFFFTGAFPFNMQELVLKVRIQNPSLRENDFIEIELDRQELTYQELLRVCCCELGVNPDQVEKIRKLPNTLLRKDKDVARLQDFQELELVLMISENNFLFRNAASTLTERPCYNRRASKLTY

SEQ ID NO: 3253 - protein, 328 aa, Homo sapiens
MEIVWEVLFLLQANFIVCISAQQNSPKIHEGWWAYKEVVQGSFVPVPSFWGLVNSAWNLCSVGKRQSPVNIETSHMIFDPFLTPLRINTGGRKVSGTMYNTGRHVSLRLDKEHLVNISGGPMTYSHRLEEIRLHFGSEDSQGSEHLLNGQAFSGEVQLIHYNHELYTNVTEAAKSPNGLVVVSIFIKVSDSSNPFLNRMLNRDTITRITYKNDAYLLQGLNIEELYPETSSFITYDGSMTIPPCYETASWIIMNKPVYITRMQMHSLRLLSQNQPSQIFLSMSDNFRPVQPLNNRCIRTNINFSLQGKDCPNNRAQKLQYRVNEWLLK

SEQ ID NO: 3254 - protein, 172 aa, Homo sapiens
MRRQPAKVAALLLGLLLECTEAKKHCWYFEGLYPTYYICRSYEDCCGSRCCVRALSIQRLWYFWFLLMMGVLFCCGAGFFIRRRMYPPPLIEEPAFNVSYTRQPPNPGPGAQQPGPPYYTDPGGPGMNPVGNSMAMAFQVPPNSPQGSVACPPPPAYCNTPPPPYEQVVKAK

SEQ ID NO: 3255 - protein, 130 aa, Homo sapiens
MSVVRSSVHARWIVGKVIGTKMQKTAKVRVTRLVLDPYLLKYFNKRKTYFAHDALQQCTVGDIVLLRALPVPRAKHVKHELAEIVFKVGKVIDPVTGKPCAGTTYLESPLSSETTQLSKNLEELNISSAQ

SEQ ID NO: 3256 - protein, 259 aa, Homo sapiens
MAALMRSKDSSCCLLLLAAVLMVESSQIGSSRAKLNSIKSSLGGETPGQAANRSAGMYQGLAFGGSKKGKNLGQAYPCSSDKECEVGRYCHSPHQGSSACMVCRRKKKRCHRDGMCCPSTRCNNGICIPVTESILTPHIPALDGTRHRDRNHGHYSNHDLGWQNLGRPHTKMSHIKGHEGDPCLRSSDCIEGFCCARHFWTKICKPVLHQGEVCTKQRKKGSHGLEIFQRCDCAKGLSCKVWKDATYSSKARLHVCQKI

SEQ ID NO: 3257 - protein, 480 aa, Homo sapiens
MLNFGASLQQTAEERMEMISERPKESMYSWNKTAEKSDFEAVEALMSMSCSWKSDFKKYVENRPVTPVSDLSEEENLLPGTPDFHTIPAFCLTPPYSPSDFEPSQVSNLMAPAPSTVHFKSLSDTAKPHIAAPFKEEEKSPVSAPKLPKAQATSVIRHTADAQLCNHQTCPMKAASILNYQNNSFRRRTHLNVEAARKNIPCAAVSPNRSKCERNTVADVDEKASAALYDFSVPSSETVICRSQPAPVSPQQKSVLVSPPAVSAGGVPPMPVICQMVPLPANNPVVTTVVPSTPPSQPPAVCPPVVFMGTQVPKGAVMFVVPQPVVQSSKPPVVSPNGTRLSPIAPAPGFSPSAAKVTPQIDSSRIRSHICSHPGCGKTYFKSSHLKAHTRTHTGEKPFSCSWKGCERRFARSDELSRHRRTHTGEKKFACPMCDRRFMRSDHLTKHARRHLSAKKLPNWQMEVSKLNDIALPPTPAPTQ

SEQ ID NO: 3258 - protein, 257 aa, Homo sapiens
MAADGVDERSPLLSASHSGNVTPTAPPYLQESSPRAELPPPYTAIASPDASGIPVINCRVCQSLINLDGKLHQHVVKCTVCNEATPIKNPPTGKKYVRCPCNCLLICKDTSRRIGCPRPNCRRIINLGPVMLISEEQPAQPALPIQPEGTRVVCGHCGNTFLWMELRFNTLAKCPHCKKISSVGSALPRRRCCAYITIGMICIFIGVGLTVGTPDFARRFRATYVSWAIAYLLGLICLIRACYWGAIRVSYPEHSFA

SEQ ID NO: 3259 - protein, 323 aa, Homo sapiens
MEPRVRVEGWKVPTSRCRFLLARVLGYLVVMEAVLTEELDEEEQLLRRHRKEKKELQAKIQGMKNAVPKNDKKRRKQLTEDVAKLEKEMEQKHREELEQLKLTTKENKIDSVAVNISNLVLENQPPRISKAQKRREKKAALEKEREERIAEAEIENLTGARHMESEKLAQILAARQLEIKQIPSDGHCMYKAIEDQLKEKDCALTVVALRSQTAEYMQSHVEDFLPFLTNPNTGDMYTPEEFQKYCEDIVNTAAWGGQLELRALSHILQTPIEIIQADSPPIIVGEEYSKKPLILVYMRHAYGLGEHYNSVTRLVNIVTENCS

SEQ ID NO: 3260 - protein, 1009 aa, Homo sapiens
MGQLCWLPLLAPLLLLRPPGVQSAGPIRAFVVPHSHMDVGWVYTVQESMRAYAANVYTSVVEELARGQQRRFIAVEQEFFRLWWDGVASDQQKYQVRQLLEEGRLEFVIGGQVMHDEAVTHLDDQILQLTEGHGFLYETFGIRPQFSWHVDPFGASATTPTLFALAGFNAHLGSRIDYDLKAAMQEARGLQFVWRGSPSLSERQEIFTHIMDQYSYCTPSHIPFSNRSGFYWNGVAVFPKPPQDGVYPNMSEPVTPANINLYAEALVANVKQRAAWFRTPHVLWPWGCDKQFFNASVQFANMDPLLDHINSHAAELGVSVQYATLGDYFRALHALNVTWRVRDHHDFLPYSTEPFQAWTGFYTSRSSLKGLARRASALLYAGESMFTRYLWPAPRGHLDPTWALQQLQQLRWAVSEVQHHDAITGTESPKVRDMYATHLASGMLGMRKLMASIVLDELQPQAPMAASSDAGPAGHFASVYNPLAWTVTTIVTLTVGFPGVRVTDEAGHPVPSQIQNSTETPSAYDLLILTTIPGLSYRHYNIRPTAGAQEGTQEPAATVASTLQFGRRLRRRTSHAGRYLVPVANDCYIVLLDQDTNLMHSIWERQSNRTVRVTQEFLEYHVNGDVKQGPISDNYLFTPGKAAVPAWEAVEMEIVAGQLVTEIRQYFYRNMTAQNYTYAIRSRLTHVPQGHDGELLCHRIEQEYQAGPLELNREAVLRTSTNLNSQQVIYSDNNGYQMQRRPYVSYVNNSIARNYYPMVQSAFMEDGKSRLVLLSERAHGISSQGNGQVEVMLHRRLWNNFDWDLGYNLTLNDTSVVHPVLWLLLGSWSLTTALRQRSALALQHRPVVLFGDLAGTAPKLPGPQQQEAVTLPPNLHLQILSIPGWRYSSNHTEHSQNLRKGHRGEAQADLRRVLLRLYHLYEVGEDPVLSQPVTVNLEAVLQALGSVVAVEERSLTGTWDLSMLHRWSWRTGPGRHRGDTTSPSRPPGGPIITVHPKEIRTFFIHFQQQ

SEQ ID NO: 3261 - protein, 471 aa, Homo sapiens
MAREMTILGSAVLTLLLAGYLAQQYLPLPTPKVIGIDLGTTYCSVGVFFPGTGKVKVIPDENGHISIPSMVSFTDNDVYVGYESVELADSNPQNTIYDAKRFIGKIFTAEELEAEIGRYPFKVLNKNGMVEFSVTSNETITVSPEYVGSRLLLKLKEMAEAYLGMPVANAVISVPAEFDLKQRNSTIEAANLAGLKILRVINEPTAAAMAYGLHKADVFHVLVIDLGGGTLDVSLLNKQGGMFLTRAMSGNNKLGGQDFNQRLLQYLYKQIYQTYGFVPSRKEEIHRLRQAVEMVKLNLTLHQSAQLSVLLTVEEQDRKEPHSSDTELPKDKLSSADDHRVNSGFGRGLSDKKSGESQVLFETEISRKLFDTLNEDLFQKILVPIQQVLKEGHLEKTEIDEVVLVGGSTRIPRIRQVIQEFFGKDPNTSVDPDLAVVTGVAIQAGIDGGSWPLQVSALEIPNKHLQKTNFN

SEQ ID NO: 3262 - protein, 1055 aa, Homo sapiens
MTVEQNVLQQSAAQKHQQTFLNQLREITGINDTQILQQALKDSNGNLELAVAFLTAKNAKTPQQEETTYYQTALPGNDRYISVGSQADTNVIDLTGDDKDDLQRAIALSLAESNRAFRETGITDEEQAISRVLEASIAENKACLKRTPTEVWRDSRNPYDRKRQDKAPVGLKNVGNTCWFSAVIQSLFNLLEFRRLVLNYKPPSNAQDLPRNQKEHRNLPFMRELRYLFALLVGTKRKYVDPSRAVEILKDAFKSNDSQQQDVSEFTHKLLDWLEDAFQMKAEEETDEEKPKNPMVELFYGRFLAVGVLEGKKFENTEMFGQYPLQVNGFKDLHECLEAAMIEGEIESLHSENSGKSGQEHWFTELPPVLTFELSRFEFNQALGRPEKIHNKLEFPQVLYLDRYMHRNREITRIKREEIKRLKDYLTVLQQRLERYLSYGSGPKRFPLVDVLQYALEFASSKPVCTSPVDDIDASSPPSGSIPSQTLPSTTEQQGALSSELPSTSPSSVAAISSRSVIHKPFTQSRIPPDLPMHPAPRHITEEELSVLESCLHRWRTEIENDTRDLQESISRIHRTIELMYSDKSMIQVPYRLHAVLVHEGQANAGHYWAYIFDHRESRWMKYNDIAVTKSSWEELVRDSFGGYRNASAYCLMYINDKAQFLIQEEFNKETGQPLVGIETLPPDLRDFVEEDNQRFEKELEEWDAQLAQKALQEKLLASQKLRESETSVTTAQAAGDPEYLEQPSRSDFSKHLKEETIQIITKASHEHEDKSPETVLQSAIKLEYARLVKLAQEDTPPETDYRLHHVVVYFIQNQAPKKIIEKTLLEQFGDRNLSFDERCHNIMKVAQAKLEMIKPEEVNLEEYEEWHQDYRKFRETTMYLIIGLENFQRESYIDSLLFLICAYQNNKELLSKGLYRGHDEELISHYRRECLLKLNEQAAELFESGEDREVNNGLIIMNEFIVPFLPLLLVDEMEEKDILAVEDMRNRWCSYLGQEMEPHLQEKLTDFLPKLLDCSMEIKSFHEPPKLPSYSTHELCERFARIMLSLSRTPADGR

SEQ ID NO: 3263 - protein, 1087 aa, Homo sapiens
MTVEQNVLQQSAAQKHQQTFLNQLREITGINDTQILQQALKDSNGNLELAVAFLTAKNAKTPQQEETTYYQTALPGNDRYISVGSQADTNVIDLTGDDKDDLQRAIALSLAESNRAFRETGITDEEQAISRVLEASIAENKACLKRTPTEVWRDSRNPYDRKRQDKAPVGLKNVGNTCWFSAVIQSLFNLLEFRRLVLNYKPPSNAQDLPRNQKEHRNLPFMRELRYLFALLVGTKRKYVDPSRAVEILKDAFKSNDSQQQDVSEFTHKLLDWLEDAFQMKAEEETDEEKPKNPMVELFYGRFLAVGVLEGKKFENTEMFGQYPLQVNGFKDLHECLEAAMIEGEIESLHSENSGKSGQEHWFTELPPVLTFELSRFEFNQALGRPEKIHNKLEFPQVLYLDRYMHRNREITRIKREEIKRLKDYLTVLQQRLERYLSYGSGPKRFPLVDVLQYALEFASSKPVCTSPVDDIDASSPPSGSIPSQTLPSTTEQQGALSSELPSTSPSSVAAISSRSVIHKPFTQSRIPPDLPMHPAPRHITEEELSVLESCLHRWRTEIENDTRDLQESISRIHRTIELMYSDKSMIQVPYRLHAVLVHEGQANAGHYWAYIFDHRESRWMKYNDIAVTKSSWEELVRDSFGGYRNASAYCLMYINDKAQFLIQEEFNKETGQPLVGIETLPPDLRDFVEEDNQRFEKELEEWDAQLAQKALQEKLLASQKLRESETSVTTAQAAGDPEYLEQPSRSDFSKHLKEETIQIITKASHEHEDKSPETVLQSIMMTPNMQGIIMAIGKSRSVYDRCGPEAGFFKAIKLEYARLVKLAQEDTPPETDYRLHHVVVYFIQNQAPKKIIEKTLLEQFGDRNLSFDERCHNIMKVAQAKLEMIKPEEVNLEEYEEWHQDYRKFRETTMYLIIGLENFQRESYIDSLLFLICAYQNNKELLSKGLYRGHDEELISHYRRECLLKLNEQAAELFESGEDREVNNGLIIMNEFIVPFLPLLLVDEMEEKDILAVEDMRNRWCSYLGQEMEPHLQEKLTDFLPKLLDCSMEIKSFHEPPKLPSYSTHELCERFARIMLSLSRTPADGR

SEQ ID NO: 3264 - protein, 154 aa, Homo sapiens
MSATRAKKVKMATKSCPECDQQVPVACKSCPCGYIFISRKLLNAKHSEKSPPSTENKHEAKRRRTERVRREKINSTVNKDLENRKRSRSNSHSDHIRRGRGRPKSASAKKHEEEREKQEKEIDIYANLSDEKAFVFSVALAEINRKIINQRLIL

SEQ ID NO: 3265 - protein, 193 aa, Homo sapiens
MAAIRKKLVIVGDGACGKTCLLIVFSKDQFPEVYVPTVFENYIADIEVDGKQVELALWDTAGQEDYDRLRPLSYPDTDVILMCFSIDSPDSLENIPEKWTPEVKHFCPNVPIILVGNKKDLRQDEHTRRELAKMKQEPVRSEEGRDMANRISAFGYLECSAKTKEGVREVFEMATRAGLQVRKNKRRRGCPIL

SEQ ID NO: 3266 - protein, 852 aa, Homo sapiens
MSSVSPIQIPSRLPLLLTHEGVLLPGSTMRTSVDSARNLQLVRSRLLKGTSLQSTILGVIPNTPDPASDAQDLPPLHRIGTAALAVQVVGSNWPKPHYTLLITGLCRFQIVQVLKEKPYPIAEVEQLDRLEEFPNTCKMREELGELSEQFYKYAVQLVEMLDMSVPAVAKLRRLLDSLPREALPDILTSIIRTSNKEKLQILDAVSLEERFKMTIPLLVRQIEGLKLLQKTRKPKQDDDKRVIAIRPIRRITHISGTLEDEDEDEDNDDIVMLEKKIRTSSMPEQAHKVCVKEIKRLKKMPQSMPEYALTRNYLELMVELPWNKSTTDRLDIRAARILLDNDHYAMEKLKKRVLEYLAVRQLKNNLKGPILCFVGPPGVGKTSVGRSVAKTLGREFHRIALGGVCDQSDIRGHRRTYVGSMPGRIINGLKTVGVNNPVFLLDEVDKLGKSLQGDPAAALLEVLDPEQNHNFTDHYLNVAFDLSQVLFIATANTTATIPAALLDRMEIIQVPGYTQEEKIEIAHRHLIPKQLEQHGLTPQQIQIPQVTTLDIITRYTREAGVRSLDRKLGAICRAVAVKVAEGQHKEAKLDRSDVTEREGCREHILEDEKPESISDTTDLALPPEMPILIDFHALKDILGPPMYEMEVSQRLSQPGVAIGLAWTPLGGEIMFVEASRMDGEGQLTLTGQLGDVMKESAHLAISWLRSNAKKYQLTNAFGSFDLLDNTDIHLHFPAGAVTKDGPSAGVTIVTCLASLFSGRLVRSDVAMTGEITLRGLVLPVGGIKDKVLAAHRAGLKQVIIPRRNEKDLEGIPGNVRQDLSFVTASCLDEVLNAAFDGGFTVKTRPGLLNSKL

SEQ ID NO: 3267 - protein, 293 aa, Homo sapiens
MATFSGPAGPILSLNPQEDVEFQKEVAQVRKRITQRKKQEQLTPGVVYVRHLPNLLDETQIFSYFSQFGTVTRFRLSRSKRTGNSKGYAFVEFESEDVAKIVAETMNNYLFGERLLECHFMPPEKVHKELFKDWNIPFKQPSYPSVKRYNRNRTLTQKLRMEERFKKKERLLRKKLAKKGIDYDFPSLILQKTESISKTNRQTSTKGQVLRKKKKKVSGTLDTPEKTVDSQGPTPVCTPTFLERRKSQVAELNDDDKDDEIVFKQPISCVKEEIQETQTPTHSRKKRRRSSNQ

SEQ ID NO: 3268 - protein, 511 aa, Homo sapiens
MVDSTEYEVASQPEVETSPLGDGASPGPEQVKLKKEISLLNGVCLIVGNMIGSGIFVSPKGVLIYSASFGLSLVIWAVGGLFSVFGALCYAELGTTIKKSGASYAYILEAFGGFLAFIRLWTSLLIIEPTSQAIIAITFANYMVQPLFPSCFAPYAASRLLAAACICLLTFINCAYVKWGTLVQDIFTYAKVLALIAVIVAGIVRLGQGASTHFENSFEGSSFAVGDIALALYSALFSYSGWDTLNYVTEEIKNPERNLPLSIGISMPIVTIIYILTNVAYYTVLDMRDILASDAVAVTFADQIFGIFNWIIPLSVALSCFGGLNASIVAASRLFFVGSREGHLPDAICMIHVERFTPVPSLLFNGIMALIYLCVEDIFQLINYYSFSYWFFVGLSIVGQLYLRWKEPDRPRPLKLSVFFPIVFCLCTIFLVAVPLYSDTINSLIGIAIALSGLPFYFLIIRVPEHKRPLYLRRIVGSATRYLQVLCMSVAAEMDLEDGGEMPKQRDPKSN

SEQ ID NO: 3269 - protein, 1508 aa, Homo sapiens
MGQEPRTLPPSPNWYCARCSDAVPGGLFGFAARTSVFLVRVGPGAGESPGTPPFRVIGELVGHTERVSGFTFSHHPGQYNLCATSSDDGTVKIWDVETKTVVTEHALHQHTISTLHWSPRVKDLIVSGDEKGVVFCYWFNRNDSQHLFIEPRTIFCLTCSPHHEDLVAIGYKDGIVVIIDISKKGEVIHRLRGHDDEIHSIAWCPLPGEDCLSINQEETSEEAEITNGNAVAQAPVTKGCYLATGSKDQTIRIWSCSRGRGVMILKLPFLKRRGGGIDPTVKERLWLTLHWPSNQPTQLVSSCFGGELLQWDLTQSWRRKYTLFSASSEGQNHSRIVFNLCPLQTEDDKQLLLSTSMDRDVKCWDIATLECSWTLPSLGGFAYSLAFSSVDIGSLAIGVGDGMIRVWNTLSIKNNYDVKNFWQGVKSKVTALCWHPTKEGCLAFGTDDGKVGLYDTYSNKPPQISSTYHKKTVYTLAWGPPVPPMSLGGEGDRPSLALYSCGGEGIVLQHNPWKLSGEAFDINKLIRDTNSIKYKLPVHTEISWKADGKIMALGNEDGSIEIFQIPNLKLICTIQQHHKLVNTISWHHEHGSQPELSYLMASGSNNAVIYVHNLKTVIESSPESPVTITEPYRTLSGHTAKITSVAWSPHHDGRLVSASYDGTAQVWDALREEPLCNFRGHRGRLLCVAWSPLDPDCIYSGADDFCVHKWLTSMQDHSRPPQGKKSIELEKKRLSQPKAKPKKKKKPTLRTPVKLESIDGNEEESMKENSGPVENGVSDQEGEEQAREPELPCGLAPAVSREPVICTPVSSGFEKSKVTINNKVILLKKEPPKEKPETLIKKRKARSLLPLSTSLDHRSKEELHQDCLVLATAKHSRELNEDVSADVEERFHLGLFTDRATLYRMIDIEGKGHLENGHPELFHQLMLWKGDLKGVLQTAAERGELTDNLVAMAPAAGYHVWLWAVEAFAKQLCFQDQYVKAASHLLSIHKVYEAVELLKSNHFYREAIAIAKARLRPEDPVLKDLYLSWGTVLERDGHYAVAAKCYLGATCAYDAAKVLAKKGDAASLRTAAELAAIVGEDELSASLALRCAQELLLANNWVGAQEALQLHESLQGQRLVFCLLELLSRHLEEKQLSEGKSSSSYHTWNTGTEGPFVERVTAVWKSIFSLDTPEQYQEAFQKLQNIKYPSATNNTPAKQLLLHICHDLTLAVLSQQMASWDEAVQALLRAVVRSYDSGSFTIMQEVYSAFLPDGCDHLRDKLGDHQSPATPAFKSLEAFFLYGRLYEFWWSLSRPCPNSSVWVRAGHRTLSVEPSQQLDTASTEETDPETSQPEPNRPSELDLRLTEEGERMLSTFKELFSEKHASLQNSQRTVAEVQETLAEMIRQHQKSQLCKSTANGPDKNEPEVEAEQPLCSSQSQCKEEKNEPLSLPELTKRLTEANQRMAKFPESIKAWPFPDVLECCLVLLLIRSHFPGCLAQEMQQQAQELLQKYGNTKTYRRHCQTFCM

SEQ ID NO: 3270 - protein, 292 aa, Homo sapiens
MPAALVENSQVICEVWASNLEEEMRKIREIVLSYSYIAMDTEFPGVVVRPIGEFRSSIDYQYQLLRCNVDLLKIIQLGLTFTNEKGEYPSGINTWQFNFKFNLTEDMYSQDSIDLLANSGLQFQKHEEEGIDTLHFAELLMTSGVVLCDNVKWLSFHSGYDFGYMVKLLTDSRLPEEEHEFFHILNLFFPSIYDVKYLMKSCKNLKGGLQEVADQLDLQRIGRQHQAGSDSLLTGMAFFRMKELFFEDSIDDAKYCGRLYGLGTGVAQKQNEDVDSAQEKMSILAIINNMQQ

SEQ ID NO: 3271 - protein, 906 aa, Homo sapiens
MQHIFAFFCTGFLGAVVGANFPNNIQIGGLFPNQQSQEHAAFRFALSQLTEPPKLLPQIDIVNISDSFEMTYRFCSQFSKGVYAIFGFYERRTVNMLTSFCGALHVCFITPSFPVDTSNQFVLQLRPELQDALISIIDHYKWQKFVYIYDADRGLSVLQKVLDTAAEKNWQVTAVNILTTTEEGYRMLFQDLEKKKERLVVVDCESERLNAILGQIIKLEKNGIGYHYILANLGFMDIDLNKFKESGANVTGFQLVNYTDTIPAKIMQQWKNSDARDHTRVDWKRPKYTSALTYDGVKVMAEAFQSLRRQRIDISRRGNAGDCLANPAVPWGQGIDIQRALQQVRFEGLTGNVQFNEKGRRTNYTLHVIEMKHDGIRKIGYWNEDDKFVPAATDAQAGGDNSSVQNRTYIVTTILEDPYVMLKKNANQFEGNDRYEGYCVELAAEIAKHVGYSYRLEIVSDGKYGARDPDTKAWNGMVGELVYGRADVAVAPLTITLVREEVIDFSKPFMSLGISIMIKKPQKSKPGVFSFLDPLAYEIWMCIVFAYIGVSVVLFLVSRFSPYEWHSEEFEEGRDQTTSDQSNEFGIFNSLWFSLGAFMQQGCDISPRSLSGRIVGGVWWFFTLIIISSYTANLAAFLTVERMVSPIESAEDLAKQTEIAYGTLEAGSTKEFFRRSKIAVFEKMWTYMKSAEPSVFVRTTEEGMIRVRKSKGKYAYLLESTMNEYIEQRKPCDTMKVGGNLDSKGYGIATPKGSALRNPVNLAVLKLNEQGLLDKLKNKWWYDKGECGSGGGDSKDKTSALSLSNVAGVFYILIGGLGLAMLVALIEFCYKSRSESKRMKGFCLIPQQSINEAIRTSTLPRNSGAGASSGGSGENGRVVSHDFPKSMQSIPCMSHSSGMPLGATGL

SEQ ID NO: 3272 - protein, 129 aa, Homo sapiens
MADGGGGGGTGAVGGGGTSQASAGAATGATGASGGGGPINPASLPPGDPQLIALIVEQLKSRGLFDSFRRDCLADVDTKPAYQNLRQKVDNFVSTHLDKQEWNPTMNKNQLRNGLRQSVVQIRQTPFES

SEQ ID NO: 3273 - protein, 316 aa, Homo sapiens
MASRLLLNNGAKMPILGLGTWKSPPGQVTEAVKVAIDVGYRHIDCAHVYQNENEVGVAIQEKLREQVVKREELFIVSKLWCTYHEKGLVKGACQKTLSDLKLDYLDLYLIHWPTGFKPGKEFFPLDESGNVVPSDTNILDTWAAMEELVDEGLVKAIGISNFNHLQVEMILNKPGLKYKPAVNQIECHPYLTQEKLIQYCQSKGIVVTAYSPLGSPDRPWAKPEDPSLLEDPRIKAIAAKHNKTTAQVLIRFPMQRNLVVIPKSVTPERIAENFKVFDFELSSQDMTTLLSYNRNWRVCALLSCTSHKDYPFHEEF

SEQ ID NO: 3274 - protein, 2012 aa, Homo sapiens
MATPLAVNSAASLWGPYKDIWHKVGNALWRRQPEAVHLLDKILKKHKPDFISLFKNPPKNVQQHEKVQKASTEGVAIQGQQGTRLLPEQLIKEAFILSDLFDIGELAAVELLLAGEHQQPHFPGLTRGLVAVLLYWDGKRCIANSLKALIQSRRGKTWTLELSPELASMTTRFTDELMEQGLTYKVLTLVSQIDVNNEFEKLQRERGLGSEKHRKEVSDLIKECRQSLAESLFAWACQSPLGKEDTLLLIGHLERVTVEANGSLDAVNLALLMALLYCFDISFIEQSTEERDDMIHQLPLLTEKQYIATIHSRLQDSQLWKLPGLQATVRLAWALALRGISQLPDVTALAEFTEADEAMAELAIADNVFLFLMESVVVSEYFYQEEFYIRRVHNLITDFLALMPMKVKQLRNRADEDARMIHMSMQMGNEPPISLRRDLEHLMLLIGELYKKNPFHLELALEYWCPTEPLQTPTIMGSYLGVAHQRPPQRQVVLSKFVRQMGDLLPPTIYIPYLKMLQGLANGPQCAHYCFSLLKVNGSSHVENIQGAGGSPVSWEHFFHSLMLYHEHLRKDLPSADSVQYRHLPSRGITQKEQDGLIAFLQLTSTIITWSENARLALCEHPQWTPVVVILGLLQCSIPPVLKAELLKTLAAFGKSPEIAASLWQSLEYTQILQTVRIPSQRQAIGIEVELNEIESRCEEYPLTRAFCQLISTLVESSFPSNLGAGLRPPGFDPYLQFLRDSVFLRFRTRAYRRAAEKWEVAEVVLEVFYKLLRDYEPQLEDFVDQFVELQGEEIIAYKPPGFSLMYHLLNESPMLELALSLLEEGVKQLDTYAPFPGKKHLEKAVQHCLALLNLTLQKENLFMDLLRESQLALIVCPLEQLLQGINPRTKKADNVVNIARYLYHGNTNPELAFESAKILCCISCNSNIQIKLVGDFTHDQSISQKLMAGFVECLDCEDAEEFVRLEEGSELEKKLVAIRHETRIHILNLLITSLECNPPNLALYLLGFELKKPVSTTNLQDPGVLGCPRTCLHAILNILEKGTEGRTGPVAVRESPQLAELCYQVIYQLCACSDTSGPTMRYLRTSQDFLFSQLQYLPFSNKEYEISMLNQMSWLMKTASIELRVTSLNRQRSHTQRLLHLLLDDMPVKPYSDGEGGIEDENRSVSGFLHFDTATKVRRKILNILDSIDFSQEIPEPLQLDFFDRAQIEQVIANCEHKNLRGQTVCNVKLLHRVLVAEVNALQGMAAIGQRPLLMEEISTVLQYVVGRNKLLQCLHAKRHALESWRQLVEIILTACPQDLIQAEDRQLIIRDILQDVHDKILDDEAAQELMPVVAGAVFTLTAHLSQAVLTEQKETSVLGPAEAHYAFMLDSCFTSPPPEENPLVGFASIGDSSLYIILKKLLDFILKTGGGFQRVRTHLYGSLLYYLQIAQRPDEPDTLEAAKKTMWERLTAPEDVFSKLQRENIAIIESYGAALMEVVCRDACDGHEIGRMLALALLDRIVSVDKQQQWLLYLSNSGYLKVLVDSLVEDDRTLQSLLTPQPPLLKALYTYESKMAFLTRVAKIQQGALELLRSGVIVRLAQCQVYDMRPETDPQSMFGMRDPPMFIPTPVDRYRQILLPALQLCQVILTSSMAQHLQAAGQVLQFLISHSDTIQAILRCQDVSAGSLQELALLTGIISKAALPGILSELDVDVNEGSLMELQGHIGRFQRQCLGLLSRFGGSDRLRQFKFQDDNVEGDKVSKKDEIELAMQQICANVMEYCQSLMLQSSPTFQHAVCLFTPSLSETVNRDGPRQDTQAPVVPYWRLPGLGIIIYLLKQSANDFFSYYDSHRQSVSKLQNVEQLPPDEIKELCQSVMPAGVDKISTAQKYVLARRRLVKVINNRAKLLSLCSFIIETCLFILWRHLEYYLLHCMPTDSQDSLFASRTLFKSRRLQDSFASETNLDFRSGLAIVSQHDLDQLQADAINAFGESLQKKLLDIEGLYSKVRSRYSFIQALVRRIRGLLRISRN

SEQ ID NO: 3275 - protein, 490 aa, Homo sapiens
MDPAVALVLCLSCLFLLSLWRQSSGRGRLPSGPTPLPIIGNILQLDVKDMSKSLTNFSKVYGPVFTVYFGLKPIVVLHGYEAVKEALIDHGEEFSGRGSFPVAEKVNKGLGILFSNGKRWKEIRRFCLMTLRNFGMGKRSIEDRVQEEARCLVEELRKTNASPCDPTFILGCAPCNVICSVIFHDRFDYKDQRFLNLMEKFNENLRILSSPWIQVCNNFPALIDYLPGSHNKIAENFAYIKSYVLERIKEHQESLDMNSARDFIDCFLIKMEQEKHNQQSEFTVESLIATVTDMFGAGTETTSTTLRYGLLLLLKYPEVTAKVQEEIECVVGRNRSPCMQDRSHMPYTDAVVHEIQRYIDLLPTNLPHAVTCDVKFKNYLIPKGTTIITSLTSVLHNDKEFPNPEMFDPGHFLDKSGNFKKSDYFMPFSAGKRMCMGEGLARMELFLFLTTILQNFNLKSQVDPKDIDITPIANAFGRVPPLYQLCFIPV

SEQ ID NO: 3276 - protein, 853 aa, Homo sapiens
MFLPHMNHLTLEQTFFSQVLPKTVKLFDDMMYELTSQARGLSSQNLEIQTTLRNILQTMVQLLGALTGCVQHICATQESIILENIQSLPSSVLHIIKSTFVHCKNSESVYSGCLHLVSDLLQALFKEAYSLQKQLMELLDMVCMDPLVDDNDDILNMVIVIHSLLDICSVISSMDHAFHANTWKFIIKQSLKHQSIIKSQLKHKDIITSLCEDILFSFHSCLQLAEQMTQSDAQDNADYRLFQKTLKLCRFFANSLLHYAKEFLPFLSDSCCTLHQLYLQIHSKFPPSLYATRISKAHQEEIAGAFLVTLDPLISQLLTFQPFMQVVLDSKLDLPCELQFPQCLLLVVVMDKLPSQPKEVQTLWCTDSQVSETTTRISLLKAVFYSFEQCSGELSLPVHLQGLKSKGKAEVAVTLYQHVCVHLCTFITSFHPSLFAELDAALLNAVLSANMITSLLAMDAWCFLARYGTAELCAHHVTIVAHLIKSCPGECYQLINLSILLKRLFFFMAPPHQLEFIQKFSPKEAENLPLWQHISFQALPPELREQTVHEVTTVGTAECRKWLSRSRTLGELESLNTVLSALLAVCNSAGEALDTGKQTAIIEVVSQLWAFLNIKQVADQPYVQQTFSLLLPLLGFFIQTLDPKLILQAVTLQTSLLKLELPDYVRLAMLDFVSSLGKLFIPEAIQDRILPNLSCMFALLLADRSWLLEQHTLEAFTQFAEGTNHEEIVPQCLSSEETKNKVVSFLEKTGFVDETEAAKVERVKQEKGIFWEPFANVTVEEAKRSSLQPYAKRARQEFPWEEEYRSALHTIAGALEATESLLQKGPAPAWLSMEMEALQERMDKLKRYIHTLG

SEQ ID NO: 3277 - protein, 646 aa, Homo sapiens
MRPRKAFLLLLLLGLVQLLAVAGAEGPDEDSSNRENAIEDEEEEEEEDDDEEEDDLEVKEENGVLVLNDANFDNFVADKDTVLLEFYAPWCGHCKQFAPEYEKIANILKDKDPPIPVAKIDATSASVLASRFDVSGYPTIKILKKGQAVDYEGSRTQEEIVAKVREVSQPDWTPPPEVTLVLTKENFDEVVNDADIILVEFYAPWCGHCKKLAPEYEKAAKELSKRSPPIPLAKVDATAETDLAKRFDVSGYPTLKIFRKGRPYDYNGPREKYGIVDYMIEQSGPPSKEILTLKQVQEFLKDGDDVIIIGVFKGESDPAYQQYQDAANNLREDYKFHHTFSTEIAKFLKVSQGQLVVMQPEKFQSKYEPRSHMMDVQQGSTQDSAIKDFVLKYALPLVGHRKVSNDAKRYTRRPLVVVYYSVDFSFDYRAATQFWRSKVLEVAKDFPEYTFAIADEEDYAGEVKDLGLSESGEDVNAAILDESGKKFAMEPEEFDSDTLREFVTAFKKGKLKPVIKSQPVPKNNKGPVKVVVGKTFDSIVMDPKKDVLIEFYAPWCGHCKQLEPVYNSLAKKYKGQKGLVIAKMDATANDVPSDRYKVEGFPTIYFAPSGDKKNPVKFEGGDRDLEHLSKFIEEHATKLSRTKEEL

SEQ ID NO: 3278 - protein, 1153 aa, Homo sapiens
MSQEPTTYSLFLFLFLSHGVSSYTVPNSRQDLHPLLQNMAEEIIDGSYLNALLDLIQFQSSHVWTDDLSHRVLAYLNSRNVAFTIPSLQAAVENHLEQRLHQPQKLLEDLRKTDAQQFRTAMKCLLEDKKDGLDLKDIIIDLGEIRERALQSPGVNRSLFLITLERCFQMLNSLECVEILGKVLRGSSGSFLQPDITERLPRDLREDAFKNLSAVFKDLYDKTSAHSQRALYSWMTGILQTSSNATDDSASWVSAEHLWVLGRYMVHLSFEEITKISPIEIGLFISYDNATKQLDMVYDITPELAQAFLERISSSNFNMRNTSTIHRQAHELWALEPFPKMLGLLVCFYNDLELLDATVAQVLLYQMIKCSHLRGFQAGVQKLKAELLDIAMENQTLNETLGSLSDAVVGLTYSQLESLSPEAVHGAISTLNQVSGWAKSQVIILSAKYLAHEKVLSFYNVSQMGALLAGVSTQAFCSMKRKDISQVLRSAVSQYVSDLSPAQQQGILSKMVQAEDTAPGIVEIQGAFFKEVSLFDLRRQPGFNSTVLKDKELGRSQALFLYELLLKTTRRPEELLSAGQLVKGVTCSHIDAMSTDFFLAHFQDFQNNFALLSPYQVNCLAWKYWEVSRLSMPPFLLAALPARYLASVPASQCVPFLISLGKSWLDSLVLDSHKKTSVLRKVQQCLDDSIADEYTVDIMGNLLCHLPAAIIDRGISPRAWATALHGLRDCPDLNPEQKAAVRLKLLGQYGLPQHWTAETTKDLGPFLVLFSGDELSSIATKFPEILLQAASKMARTLPTKEFLWAVFQSVRNSSDKIPSYDPMPGCHGVVAPSSDDIFKLAEANACWALEDLRCMEEDTFIRTVELLGAVQGFSRPQLMTLKEKAIQVWDMPSYWREHHIVSLGRIALALNESELEQLDLSSIDTVASLSWQTEWTPGQAESILQGYLDDSGYSIQDLKSFHLVGLGATLCAINITEIPLIKISEFRVVVARIGTLLCSTHVLAEFKRKAEVVFGDPTEWTSSVLQELGTIAAGLTKAELRMLDKDLMPYFQPSAIKCLPDEIFKELSAEQIASLGPENAAAVTHAQRRRLSPLQLQSLQQALDGAKTHSWQDAPASAGPTRTSSSRSPAGALQSWGLWLGCPLLVLMAKLLW

SEQ ID NO: 3279 - protein, 522 aa, Homo sapiens
MKSQGQHWYSSSDKNCKVSFREKLLIIDSNLGVQDVENLKFLCIGLVPNKKLEKSSSASDVFEHLLAEDLLSEEDPFFLAELLYIIRQKKLLQHLNCTKEEVERLLPTRQRVSLFRNLLYELSEGIDSENLKDMIFLLKDSLPKTEMTSLSFLAFLEKQGKIDEDNLTCLEDLCKTVVPKLLRNIEKYKREKAIQIVTPPVDKEAESYQGEEELVSQTDVKTFLEALPQESWQNKHAGSNGNRATNGAPSLVSRGMQGASANTLNSETSTKRAAVYRMNRNHRGLCVIVNNHSFTSLKDRQGTHKDAEILSHVFQWLGFTVHIHNNVTKVEMEMVLQKQKCNPAHADGDCFVFCILTHGRFGAVYSSDEALIPIREIMSHFTALQCPRLAEKPKLFFIQACQGEEIQPSVSIEADALNPEQAPTSLQDSIPAEADFLLGLATVPGYVSFRHVEEGSWYIQSLCNHLKKLVPRHEDILSILTAVNDDVSRRVDKQGTKKQMPQPAFTLRKKLVFPVPLDALSL

SEQ ID NO: 3280 - protein, 574 aa, Homo sapiens
MRDPGAAAPLSSLGLCALVLALLGALSAGAGAQPYHGEKGISVPDHGFCQPISIPLCTDIAYNQTILPNLLGHTNQEDAGLEVHQFYPLVKVQCSPELRFFLCSMYAPVCTVLDQAIPPCRSLCERARQGCEALMNKFGFQWPERLRCENFPVHGAGEICVGQNTSDGSGGPGGGPTAYPTAPYLPDLPFTALPPGASDGRGRPAFPFSCPRQLKVPPYLGYRFLGERDCGAPCEPGRANGLMYFKEEERRFARLWVGVWSVLCCASTLFTVLTYLVDMRRFSYPERPIIFLSGCYFMVAVAHVAGFLLEDRAVCVERFSDDGYRTVAQGTKKEGCTILFMVLYFFGMASSIWWVILSLTWFLAAGMKWGHEAIEANSQYFHLAAWAVPAVKTITILAMGQVDGDLLSGVCYVGLSSVDALRGFVLAPLFVYLFIGTSFLLAGFVSLFRIRTIMKHDGTKTEKLEKLMVRIGVFSVLYTVPATIVLACYFYEQAFREHWERTWLLQTCKSYAVPCPPGHFPPMSPDFTVFMIKYLMTMIVGITTGFWIWSGKTLQSWRRFYHRLSHSSKGETAV

SEQ ID NO: 3281 - protein, 409 aa, Homo sapiens
MEEGGSTGSAGSDSSTSGSGGAQQRELERMAEVLVTGEQLRLRLHEEKVIKDRRHHLKTYPNCFVAKELIDWLIEHKEASDRETAIKLMQKLADRGIIHHVCDEHKEFKDVKLFYRFRKDDGTFPLDNEVKAFMRGQRLYEKLMSPENTLLQPREEEGVKYERTFMASEFLDWLVQEGEATTRKEAEQLCHRLMEHGIIQHVSNKHPFVDSNLLYQFRMNFRRRRRLMELLNEKSPSSQETHDSPFCLRKQSHDNRKSTSFMSVSPSKEIKIVSAVRRSSMSSCGSSGYFSSSPTLSSSPPVLCNPKSVLKRPVTSEELLTPGAPYARKTFTIVGDAVGWGFVVRGSKPCHIQAVDPSGPAAAAGMKVCQFVVSVNGLNVLHVDYRTVSNLILTGPRTIVMEVMEELEC

SEQ ID NO: 3282 - protein, 739 aa, Homo sapiens
MSSESKEQHNVSPRDSAEGNDSYPSGIHLELQRESSTDFKQFETNDQCRPYHRILIERQEKSDTNFKEFVIKKLQKNCQCSPAKAKNMILGFLPVLQWLPKYDLKKNILGDVMSGLIVGILLVPQSIAYSLLAGQEPVYGLYTSFFASIIYFLLGTSRHISVGIFGVLCLMIGETVDRELQKAGYDNAHSAPSLGMVSNGSTLLNHTSDRICDKSCYAIMVGSTVTFIAGVYQVAMGFFQVGFVSVYLSDALLSGFVTGASFTILTSQAKYLLGLNLPRTNGVGSLITTWIHVFRNIHKTNLCDLITSLLCLLVLLPTKELNEHFKSKLKAPIPIELVVVVAATLASHFGKLHENYNSSIAGHIPTGFMPPKVPEWNLIPSVAVDAIAISIIGFAITVSLSEMFAKKHGYTVKANQEMYAIGFCNIIPSFFHCFTTSAALAKTLVKESTGCHTQLSGVVTALVLLLVLLVIAPLFYSLQKSVLGVITIVNLRGALRKFRDLPKMWSISRMDTVIWFVTMLSSALLSTEIGLLVGVCFSIFCVILRTQKPKSSLLGLVEESEVFESVSAYKNLQIKPGIKIFRFVAPLYYINKECFKSALYKQTVNPILIKVAWKKAAKRKIKEKVVTLGGIQDEMSVQLSHDPLELHTIVIDCSAIQFLDTAGIHTLKEVRRDYEAIGIQVLLAQCNPTVRDSLTNGEYCKKEEENLLFYSVYEAMAFAEVSKNQKGVCVPNGLSLSSD

SEQ ID NO: 3283 - protein, 972 aa, Homo sapiens
MGPGVLLLLLVATAWHGQGIPVIEPSVPELVVKPGATVTLRCVGNGSVEWDGPPSPHWTLYSDGSSSILSTNNATFQNTGTYRCTEPGDPLGGSAAIHLYVKDPARPWNVLAQEVVVFEDQDALLPCLLTDPVLEAGVSLVRVRGRPLMRHTNYSFSPWHGFTIHRAKFIQSQDYQCSALMGGRKVMSISIRLKVQKVIPGPPALTLVPAELVRIRGEAAQIVCSASSVDVNFDVFLQHNNTKLAIPQQSDFHNNRYQKVLTLNLDQVDFQHAGNYSCVASNVQGKHSTSMFFRVVESAYLNLSSEQNLIQEVTVGEGLNLKVMVEAYPGLQGFNWTYLGPFSDHQPEPKLANATTKDTYRHTFTLSLPRLKPSEAGRYSFLARNPGGWRALTFELTLRYPPEVSVIWTFINGSGTLLCAASGYPQPNVTWLQCSGHTDRCDEAQVLQVWDDPYPEVLSQEPFHKVTVQSLLTVETLEHNQTYECRAHNSVGSGSWAFIPISAGAHTHPPDEFLFTPVVVACMSIMALLLLLLLLLLYKYKQKPKYQVRWKIIESYEGNSYTFIDPTQLPYNEKWEFPRNNLQFGKTLGAGAFGKVVEATAFGLGKEDAVLKVAVKMLKSTAHADEKEALMSELKIMSHLGQHENIVNLLGACTHGGPVLVITEYCCYGDLLNFLRRKAEAMLGPSLSPGQDPEGGVDYKNIHLEKKYVRRDSGFSSQGVDTYVEMRPVSTSSNDSFSEQDLDKEDGRPLELRDLLHFSSQVAQGMAFLASKNCIHRDVAARNVLLTNGHVAKIGDFGLARDIMNDSNYIVKGNARLPVKWMAPESIFDCVYTVQSDVWSYGILLWEIFSLGLNPYPGILVNSKFYKLVKDGYQMAQPAFAPKNIYSIMQACWALEPTHRPTFQQICSFLQEQAQEDRRERDYTNLPSSSRSGGSGSSSSELEEESSSEHLTCCEQGDIAQPLLQPNNYQFC

SEQ ID NO: 3284 - protein, 233 aa, Homo sapiens
MGEPQQVSALPPPPMQYIKEYTDENIQEGLAPKPPPPIKDSYMMFGNQFQCDDLIIRPLESQGIERLHPMQFDHKKELRKLNMSILINFLDLLDILIRSPGSIKREEKLEDLKLLFVHVHHLINEYRPHQARETLRVMMEVQKRQRLETAERFQKHLERVIEMIQNCLASLPDDLPHSEAGMRVKTEPMDADDSNNCTGQNEHQRENSGHRRDQIIEKDAALCVLIDEMNERP

SEQ ID NO: 3285 - protein, 849 aa, Homo sapiens
MAAAAPAAAAASSEAPAASATAEPEAGDQDSREVRVLQSLRGKICEAKNLLPYLGPHKMRDCFCTINLDQEEVYRTQVVEKSLSPFFSEEFYFEIPRTFQYLSFYVYDKNVLQRDLRIGKVAIKKEDLCNHSGKETWFSLQPVDSNSEVQGKVHLELKLNELITENGTVCQQLVVHIKACHGLPLINGQSCDPYATVSLVGPSRNDQKKTKVKKKTSNPQFNEIFYFEVTRSSSYTRKSQFQVEEEDIEKLEIRIDLWNNGNLVQDVFLGEIKVPVNVLRTDSSHQAWYLLQPRDNGNKSSKTDDLGSLRLNICYTEDYVLPSEYYGPLKTLLLKSPDVQPISASAAYILSEICRDKNDAVLPLVRLLLHHDKLVPFATAVAELDLKDTQDANTIFRGNSLATRCLDEMMKIVGGHYLKVTLKPILDEICDSSKSCEIDPIKLKEGDNVENNKENLRYYVDKLFNTIVKSSMSCPTVMCDIFYSLRQMATQRFPNDPHVQYSAVSSFVFLRFFAVAVVSPHTFHLRPHHPDAQTIRTLTLISKTIQTLGSWGSLSKSKSSFKETFMCEFFKMFQEEGYIIAVKKFLDEISSTETKESSGTSEPVHLKEGEMYKRAQGRTRIGKKNFKKRWFCLTSRELTYHKQPGKDAIYTIPVKNILAVEKLEESSFNKKNMFQVIHTEKPLYVQANNCVEANEWIDVLCRVSRCNQNRLSFYHPSVYLNGNWLCCQETGENTLGCKPCTAGVPADIQIDIDEDRETERIYSLFTLSLLKLQKMEEACGTIAVYQGPQKEPDDYSNFVIEDSVTTFKTIQQIKSIIEKLDEPHEKYRKKRSSSAKYGSKENPIVGKAS

SEQ ID NO: 3286 - protein, 279 aa, Homo sapiens
MTKNEKKSLNQSLAEWKLFIYNPTTGEFLGRTAKSWGLILLFYLVFYGFLAALFSFTMWVMLQTLNDEVPKYRDQIPSPGLMVFPKPVTALEYTFSRSDPTSYAGYIEDLKKFLKPYTLEEQKNLTVCPDGALFEQKGPVYVACQFPISLLQACSGMNDPDFGYSQGNPCILVKMNRIIGLKPEGVPRIDCVSKNEDIPNVAVYPHNGMIDLKYFPYYGKKLHVGYLQPLVAVQVSFAPNNTGKEVTVECKIDGSANLKSQDDRDKFLGRVMFKITARA

SEQ ID NO: 3287 - protein, 246 aa, Homo sapiens
MAAAAIPALLLCLPLLFLLFGWSRARRDDPHSLCYDITVIPKFRPGPRWCAVQGQVDEKTFLHYDCGNKTVTPVSPLGKKLNVTMAWKAQNPVLREVVDILTEQLLDIQLENYTPKEPLTLQARMSCEQKAEGHSSGSWQFSIDGQTFLLFDSEKRMWTTVHPGARKMKEKWENDKDVAMSFHYISMGDCIGWLEDFLMGMDSTLEPSAGAPLAMSSGTTQLRATATTLILCCLLIILPCFILPGI

SEQ ID NO: 3288 - protein, 1197 aa, Homo sapiens
MHIKSIILEGFKSYAQRTEVNGFDPLFNAITGLNGSGKSNILDSICFLLGISNLSQVRASNLQDLVYKNGQAGITKASVSITFDNSDKKQSPLGFEVHDEITVTRQVVIGGRNKYLINGVNANNTRVQDLFCSVGLNVNNPHFLIMQGRITKVLNMKPPEILSMIEEAAGTRMYEYKKIAAQKTIEKKEAKLKEIKTILEEEITPTIQKLKEERSSYLEYQKVMREIEHLSRLYIAYQFLLAEDTKVRSAEELKEMQDKVIKLQEELSENDKKIKALNHEIEELEKRKDKETGGILRSLEDALAEAQRVNTKSQSAFDLKKKNLACEESKRKELEKNMVEDSKTLAAKEKEVKKITDGLHALQEASNKDAEALAAAQQHFNAVSAGLSSNEDGAEATLAGQMMACKNDISKAQTEAKQAQMKLKHAQQELKNKQAEVKKMDSGYRKDQEALEAVKRLKEKLEAEMKKLNYEENKEESLLEKRRQLSRDIGRLKETYEALLARFPNLRFAYKDPEKNWNRNCVKGLVASLISVKDTSATTALELVAGERLYNVVVDTEVTGKKLLERGELKRRYTIIPLNKISARCIAPETLRVAQNLVGPDNVHVALSLVEYKPELQKAMEFVFGTTFVCDNMDNAKKVAFDKRIMTRTVTLGGDVFDPHGTLSGGARSQAASILTKFQELKDVQDELRIKENELRALEEELAGLKNTAEKYRQLKQQWEMKTEEADLLQTKLQQSSYHKQQEELDALKKTIEESEETLKNTKEIQRKAEEKYEVLENKMKNAEAERERELKDAQKKLDCAKTKADASSKKMKEKQQEVEAITLELEELKREHTSYKQQLEAVNEAIKSYESQIEVMAAEVAKNKESVNKAQEEVTKQKEVITAQDTVIKAKYAEVAKHKEQNNDSQLKIKELDHNISKHKREAEDGAAKVSKMLKDYDWINAERHLFGQPNSAYDFKTNNPKEAGQRLQKLQEMKEKLGRNVNMRAMNVLTEAEERYNDLMKKKRIVENDKSKILTTIEDLDQKKNQALNIAWQKVNKDFGSIFSTLLPGANAMLAPPEGQTVLDGLEFKVALGNTWKENLTELSGGQRSLVALSLILSMLLFKPAPIYILDEVDAALDLSHTQNIGQMLRTHFTHSQFIVVSLKEGMFNNANVLFKTKFVDGVSTVARFTQCQNGKISKEAKSKAKPPKGAHVEV

SEQ ID NO: 3289 - protein, 197 aa, Homo sapiens
MAAVKDSCGKGEMATGNGRRLHLGIPEAVFVEDVDSFMKQPGNETADTVLKKLDEQYQKYKFMELNLAQKKRRLKGQIPEIKQTLEILKYMQKKKESTNSMETRFLLADNLYCKASVPPTDKVCLWLGANVMLEYDIDEAQALLEKNLSTATKNLDSLEEDLDFLRDQFTTTEVNMARVYNWDVKRRNKDDSTKNKA

SEQ ID NO: 3290 - protein, 220 aa, Homo sapiens
MAILFAVVARGTTILAKHAWCGGNFLEVTEQILAKIPSENNKLTYSHGNYLFHYICQDRIVYLCITDDDFERSRAFNFLNEIKKRFQTTYGSRAQTALPYAMNSEFSSVLAAQLKHHSENKGLDKVMETQAQVDELKGIMVRNIDLVAQRGERLELLIDKTENLVDSSVTFKTTSRNLARAMCMKNLKLTIIIIIVSIVFIYIIVSPLCGGFTWPSCVKK

SEQ ID NO: 3291 - protein, 1045 aa, Homo sapiens
MNLQAQPKAQNKRKRCLFGGQEPAPKEQPPPLQPPQQSIRVKEEQYLGHEGPGGAVSTSQPVELPPPSSLALLNSVVYGPERTSAAMLSQQVASVKWPNSVMAPGRGPERGGGGGVSDSSWQQQPGQPPPHSTWNCHSLSLYSATKGSPHPGVGVPTYYNHPEALKREKAGGPQLDRYVRPMMPQKVQLEVGRPQAPLNSFHAAKKPPNQSLPLQPFQLAFGHQVNRQVFRQGPPPPNPVAAFPPQKQQQQQQPQQQQQQQQAALPQMPLFENFYSMPQQPSQQPQDFGLQPAGPLGQSHLAHHSMAPYPFPPNPDMNPELRKALLQDSAPQPALPQVQIPFPRRSRRLSKEGILPPSALDGAGTQPGQEATGNLFLHHWPLQQPPPGSLGQPHPEALGFPLELRESQLLPDGERLAPNGREREAPAMGSEEGMRAVSTGDCGQVLRGGVIQSTRRRRRASQEANLLTLAQKAVELASLQNAKDGSGSEEKRKSVLASTTKCGVEFSEPSLATKRAREDSGMVPLIIPVSVPVRTVDPTEAAQAGGLDEDGKGPEQNPAEHKPSVIVTRRRSTRIPGTDAQAQAEDMNVKLEGEPSVRKPKQRPRPEPLIIPTKAGTFIAPPVYSNITPYQSHLRSPVRLADHPSERSFELPPYTPPPILSPVREGSGLYFNAIISTSTIPAPPPITPKSAHRTLLRTNSAEVTPPVLSVMGEATPVSIEPRINVGSRFQAEIPLMRDRALAAADPHKADLVWQPWEDLESSREKQRQVEDLLTAACSSIFPGAGTNQELALHCLHESRGDILETLNKLLLKKPLRPHNHPLATYHYTGSDQWKMAERKLFNKGIAIYKKDFFLVQKLIQTKTVAQCVEFYYTYKKQVKIGRNGTLTFGDVDTSDEKSAQEEVEVDIKTSQKFPRVPLPRRESPSEERLEPKREVKEPRKEGEEEVPEIQEKEEQEEGRERSRRAAAVKATQTLQANESASDILILRSHESNAPGSAGGQASEKPREGTGKSRRALPFSEKKKKTETFSKTQNQENTFPCKKCGR

SEQ ID NO: 3292 - protein, 647 aa, Homo sapiens
MTVGRPEGAPGGAEGSRQIFPPESFADTEAGEELSGDGLVLPRASKLDEFLSPEEEIDSTSDSTGSIYQNLQELKQKGRWCLLESLFQSDPESDENLSEDEEDLESFFQDKDRGMVQVQCPQALRCGSTRRCSSLNNLPSNIPRPQTQPPSGSRPPSQHRSVSSWASSITVPRPFRMTLREARKKAEWLGSPASFEQERQRAQRQGEEEAECHRQFRAQPVPAHVYLPLYQEIMERSEARRQAGIQKRKELLLSSLKPFSFLEKEEQLKEAARQRDLAATAEAKISKQKATRRIPKSILEPALGDKLQEAELFRKIRIQMRALDMLQMASSPIASSSNRANPQPRTATRTQQEKLGFLHTNFRFQPRVNPVVPDYEGLYKAFQRRAAKRRETQEATRNKPFLLRTANLRHPQRPCDAATTGRRQDSPQPPATPLPRSRSLSGLASLSANTLPVHITDATRKRESAVRSALEKKNKADESIQWLEIHKKKSQAMSKSVTLRAKAMDPHKSLEEVFKAKLKENRNNDRKRAKEYKKELEEMKQRIQTRPYLFEQVAKDLAKKEAEQWYLDTLKQAGLEEDFVRNKGQGTRAVQEKETKIKDFPRFQETTKLSIRDPEQGLEGSLEQPASPRKVLEELSHQSPENLVSLA

SEQ ID NO: 3293 - protein, 359 aa, Homo sapiens
MTLESIMACCLSEEAKEARRINDEIERQLRRDKRDARRELKLLLLGTGESGKSTFIKQMRIIHGSGYSDEDKRGFTKLVYQNIFTAMQAMIRAMDTLKIPYKYEHNKAHAQLVREVDVEKVSAFENPYVDAIKSLWNDPGIQECYDRRREYQLSDSTKYYLNDLDRVADPAYLPTQQDVLRVRVPTTGIIEYPFDLQSVIFRMVDVGGQRSERRKWIHCFENVTSIMFLVALSEYDQVLVESDNENRMEESKALFRTIITYPWFQNSSVILFLNKKDLLEEKIMYSHLVDYFPEYDGPQRDAQAAREFILKMFVDLNPDSDKIIYSHFTCATDTENIRFVFAAVKDTILQLNLKEYNLV

SEQ ID NO: 3294 - protein, 379 aa, Homo sapiens
MARRSAFPAAALWLWSILLCLLALRAEAGPPQEESLYLWIDAHQARVLIGFEEDILIVSEGKMAPFTHDFRKAQQRMPAIPVNIHSMNFTWQAAGQAEYFYEFLSLRSLDKGIMADPTVNVPLLGTVPHKASVVQVGFPCLGKQDGVAAFEVDVIVMNSEGNTILQTPQNAIFFKTCQQAECPGGCRNGGFCNERRICECPDGFHGPHCEKALCTPRCMNGGLCVTPGFCICPPGFYGVNCDKANCSTTCFNGGTCFYPGKCICPPGLEGEQCEISKCPQPCRNGGKCIGKSKCKCSKGYQGDLCSKPVCEPGCGAHGTCHEPNKCQCQEGWHGRHCNKRYEASLIHALRPAGAQLRQHTPSLKKAEERRDPPESNYIW

SEQ ID NO: 3295 - protein, 607 aa, Homo sapiens
MILLTFSTGRRLDFVHHSGVFFLQTLLWILCATVCGTEQYFNVEVWLQKYGYLPPTDPRMSVLRSAETMQSALAAMQQFYGINMTGKVDRNTIDWMKKPRCGVPDQTRGSSKFHIRRKRYALTGQKWQHKHITYSIKNVTPKVGDPETRKAIRRAFDVWQNVTPLTFEEVPYSELENGKRDVDITIIFASGFHGDSSPFDGEGGFLAHAYFPGPGIGGDTHFDSDEPWTLGNPNHDGNDLFLVAVHELGHALGLEHSNDPTAIMAPFYQYMETDNFKLPNDDLQGIQKIYGPPDKIPPPTRPLPTVPPHRSIPPADPRKNDRPKPPRPPTGRPSYPGAKPNICDGNFNTLAILRREMFVFKDQWFWRVRNNRVMDGYPMQITYFWRGLPPSIDAVYENSDGNFVFFKGNKYWVFKDTTLQPGYPHDLITLGSGIPPHGIDSAIWWEDVGKTYFFKGDRYWRYSEEMKTMDPGYPKPITVWKGIPESPQGAFVHKENGFTYFYKGKEYWKFNNQILKVEPGYPRSILKDFMGCDGPTDRVKEGHSPPDDVDIVIKLDNTASTVKAIAIVIPCILALCLLVLVYTVFQFKRKGTPRHILYCKRSMQEWV

SEQ ID NO: 3296 - protein, 1178 aa, Homo sapiens
MANGGGGGGGSSGGGGGGGGSSLRMSSNIHANHLSLDASSSSSSSSSSSSSSSSSSSSSSVHEPKMDALIIPVTMEVPCDSRGQRMWWAFLASSMVTFFGGLFIILLWRTLKYLWTVCCHCGGKTKEAQKINNGSSQADGTLKPVDEKEEAVAAEVGWMTSVKDWAGVMISAQTLTGRVLVVLVFALSIGALVIYFIDSSNPIESCQNFYKDFTLQIDMAFNVFFLLYFGLRFIAANDKLWFWLEVNSVVDFFTVPPVFVSVYLNRSWLGLRFLRALRLIQFSEILQFLNILKTSNSIKLVNLLSIFISTWLTAAGFIHLVENSGDPWENFQNNQALTYWECVYLLMVTMSTVGYGDVYAKTTLGRLFMVFFILGGLAMFASYVPEIIELIGNRKKYGGSYSAVSGRKHIVVCGHITLESVSNFLKDFLHKDRDDVNVEIVFLHNISPNLELEALFKRHFTQVEFYQGSVLNPHDLARVKIESADACLILANKYCADPDAEDASNIMRVISIKNYHPKIRIITQMLQYHNKAHLLNIPSWNWKEGDDAICLAELKLGFIAQSCLAQGLSTMLANLFSMRSFIKIEEDTWQKYYLEGVSNEMYTEYLSSAFVGLSFPTVCELCFVKLKLLMIAIEYKSANRESRILINPGNHLKIQEGTLGFFIASDAKEVKRAFFYCKACHDDITDPKRIKKCGCKRLEDEQPSTLSPKKKQRNGGMRNSPNTSPKLMRHDPLLIPGNDQIDNMDSNVKKYDSTGMFHWCAPKEIEKVILTRSEAAMTVLSGHVVVCIFGDVSSALIGLRNLVMPLRASNFHYHELKHIVFVGSIEYLKREWETLHNFPKVSILPGTPLSRADLRAVNINLCDMCVILSANQNNIDDTSLQDKECILASLNIKSMQFDDSIGVLQANSQGFTPPGMDRSSPDNSPVHGMLRQPSITTGVNIPIITELVNDTNVQFLDQDDDDDPDTELYLTQPFACGTAFAVSVLDSLMSATYFNDNILTLIRTLVTGGATPELEALIAEENALRGGYSTPQTLANRDRCRVAQLALLDGPFADLGDGGCYGDLFCKALKTYNMLCFGIYRLRDAHLSTPSQCTKRYVITNPPYEFELVPTDLIFCLMQFDHNAGQSRASLSHSSHSSQSSSKKSSSVHSIPSTANRQNRPKSRESRDKQKYVQEERL

SEQ ID NO: 3297 - protein, 260 aa, Homo sapiens [sequence omitted]

SEQ ID NO: 3298 - protein, 1205 aa, Homo sapiens
MVLLSLWLIAAALVEVRTSADGQAGNEEMVQIDLPIKRYREYELVTPVSTNLEGRYLSHTLSASHKKRSARDVSSNPEQLFFNITAFGKDFHLRLKPNTQLVAPGAVVEWHETSLVPGNITDPINNHQPGSATYRIRRTEPLQTNCAYVGDIVDIPGTSVAISNCDGLAGMIKSDNEEYFIEPLERGKQMEEEKGRIHVVYKRSAVEQAPIDMSKDFHYRESDLEGLDDLGTVYGNIHQQLNETMRRRRHAGENDYNIEVLLGVDDSVVRFHGKEHVQNYLLTLMNIVNEIYHDESLGVHINVVLVRMIMLGYAKSISLIERGNPSRSLENVCRWASQQQRSDLNHSEHHDHAIFLTRQDFGPAGMQGYAPVTGMCHPVRSCTLNHEDGFSSAFVVAHETGHVLGMEHDGQGNRCGDETAMGSVMAPLVQAAFHRYHWSRCSGQELKRYIHSYDCLLDDPFDHDWPKLPELPGINYSMDEQCRFDFGVGYKMCTAFRTFDPCKQLWCSHPDNPYFCKTKKGPPLDGTECAAGKWCYKGHCMWKNANQQKQDGNWGSWTKFGSCSRTCGTGVRFRTRQCNNPMPINGGQDCPGVNFEYQLCNTEECQKHFEDFRAQQCQQRNSHFEYQNTKHHWLPYEHPDPKKRCHLYCQSKETGDVAYMKQLVHDGTHCSYKDPYSICVRGECVKVGCDKEIGSNKVEDKCGVCGGDNSHCRTVKGTFTRTPRKLGYLKMFDIPPGARHVLIQEDEASPHILAIKNQATGHYILNGKGEEAKSRTFIDLGVEWDYNIEDDIESLHTDGPLHDPVIVLIIPQENDTRSSLTYKYIIHEDSVPTINSNNVIQEELDTFEWALKSWSQCSKPCGGGFQYTKYGCRRKSDNKMVHRSFCEANKKPKPIRRMCNIQECTHPLWVAEEWEHCTKTCGSSGYQLRTVRCLQPLLDGTNRSVHSKYCMGDRPESRRPCNRVPCPAQWKTGPWSECSVTCGEGTEVRQVLCRAGDHCDGEKPESVRACQLPPCNDEPCLGDKSIFCQMEVLARYCSIPGYNKLCCESCSKRSSTLPPPYLLEAAETHDDVISNPSDLPRSLVMPTSLVPYHSETPAKKMSLSSISSVGGPNAYAAFRPNSKPDGANLRQRSAQQAGSKTVRLVTVPSSPPTKRVHLSSASQMAAASFFAASDSIGASSQARTSKKDGKIIDNRRPTRSSTLER

SEQ ID NO: 3299 - protein, 207 aa, Homo sapiens
MAEDLDELLDEVESKFCTPDLLRRGMVEQPKGCGGGTHSSDRNQAKAKETLRSTETFKKEDDLDSLINEILEEPNLDKKPSKLKSKSSGNTSVRASIEGLGKSCSPVYLGGSSIPCGIGTNISWRACDHLRCIACDFLVVSYDDYMWDKSCDYLFFRNNMPEFHKLKAKLIKKKGTRAYACQCSWRTIEEVTDLQTDHQLRWVCGKH

SEQ ID NO: 3300 - protein, 266 aa, Homo sapiens
MWWFQQGLSFLPSALVIWTSAAFIFSYITAVTLHHIDPALPYISDTGTVAPEKCLFGAMLNIAAVLCIATIYVRYKQVHALSPEENVIIKLNKAGLVLGILSCLGLSIVANFQKTTLFAAHVSGAVLTFGMGSLYMFVQTILSYQMQPKIHGKQVFWIRLLLVIWCGVSALSMLTCSSVLHSGNFGTDLEQKLHWNPEDKGYVLHMITTAAEWSMSFSFFGFFLTYIRDFQKISLRVEANLHGLTLYDTAPCPINNERTRLLSRDI

SEQ ID NO: 3301 - protein, 288 aa, Homo sapiens [sequence omitted]

SEQ ID NO: 3302 - protein, 359 aa, Homo sapiens
MRTADREARPGLPSLLLLLLAGAGLSAASPPAAPRFNVSLDSVPELRWLPVLRHYDLDLVRAAMAQVIGDRVPKWVHVLIGKVVLELERFLPQPFTGEIRGMCDFMNLSLADCLLVNLAYESSVFCTSIVAQDSRGHIYHGRNLDYPFGNVLRKLTVDVQFLKNGQIAFTGTTFIGYVGLWTGQSPHKFTVSGDERDKGWWWENAIAALFRRHIPVSWLIRATLSESENFEAAVGKLAKTPLIADVYYIVGGTSPREGVVITRNRDGPADIWPLDPLNGAWFRVETNYDHWKPAPKEDDRRTSAIKALNATGQANLSLEALFQILSVVPVYNNFTIYTTVMSAGSPDKYMTRIRNPSRK

SEQ ID NO: 3303 - protein, 1691 aa, Homo sapiens
MASWTSPWWVLIGMVFMHSPLPQTTAEKSPGAYFLPEFALSPQGSFLEDTTGEQFLTYRYDDQTSRNTRSDEDKDGNWDAWGDWSDCSRTCGGGASYSLRRCLTGRNCEGQNIRYKTCSNHDCPPDAEDFRAQQCSAYNDVQYQGHYYEWLPRYNDPAAPCALKCHAQGQNLVVELAPKVLDGTRCNTDSLDMCISGICQAVGCDRQLGSNAKEDNCGVCAGDGSTCRLVRGQSKSHVSPEKREENVIAVPLGSRSVRITVKGPAHLFIESKTLQGSKGEHSFNSPGVFLVENTTVEFQRGSERQTFKIPGPLMADFIFKTRYTAAKDSVVQFFFYQPISHQWRQTDFFPCTVTCGGGYQLNSAECVDIRLKRVVPDHYCHYYPENVKPKPKLKECSMDPCPSSDGFKEIMPYDHFQPLPRWEHNPWTACSVSCGGGIQRRSFVCVEESMHGEILQVEEWKCMYAPKPKVMQTCNLFDCPKWIAMEWSQCTVTCGRGLRYRVVLCINHRGEHVGGCNPQLKLHIKEECVIPIPCYKPKEKSPVEAKLPWLKQAQELEETRIATEEPTFIPEPWSACSTTCGPGVQVREVKCRVLLTFTQTETELPEEECEGPKLPTERPCLLEACDESPASRELDIPLPEDSETTYDWEYAGFTPCTATCVGGHQEAIAVCLHIQTQQTVNDSLCDMVHRPPAMSQACNTEPCPPRWHVGSWGPCSATCGVGIQTRDVYCLHPGETPAPPEECRDEKPHALQACNQFDCPPGWHIEEWQQCSRTCGGGTQNRRVTCRQLLTDGSFLNLSDELCQGPKASSHKSCARTDCPPHLAVGDWSKCSVSCGVGIQRRKQVCQRLAAKGRRIPLSEMMCRDLPGLPLVRSCQMPECSKIKSEMKTKLGEQGPQILSVQRVYIQTREEKRINLTIGSRAYLLPNTSVIIKCPVRRFQKSLIQWEKDGRCLQNSKRLGITKSGSLKIHGLAAPDIGVYRCIAGSAQETVVLKLIGTDNRLIARPALREPMREYPGMDHSEANSLGVTWHKMRQMWNNKNDLYLDDDHISNQPFLRALLGHCSNSAGSTNSWELKNKQFEAAVKQGAYSMDTAQFDELIRNMSQLMETGEVSDDLASQLIYQLVAELAKAQPTHMQWRGIQEETPPAAQLRGETGSVSQSSHAKNSGKLTFKPKGPVLMRQSQPPSISFNKTINSRIGNTVYITKRTEVINILCDLITPSEATYTWTKDGTLLQPSVKIILDGTGKIQIQNPTRKEQGIYECSVANHLGSDVESSSVLYAEAPVILSVERNITKPEHNHLSVVVGGIVEAALGANVTIRCPVKGVPQPNITWLKRGGSLSGNVSLLFNGSLLLQNVSLENEGTYVCIATNALGKAVATSVLHLLERRWPESRIVFLQGHKKYILQATNTRTNSNDPTGEPPPQEPFWEPGNWSHCSATCGHLGARIQRPQCVMANGQEVSEALCDHLQKPLAGFEPCNIRDCPARWFTSVWSQCSVSCGEGYHSRQVTCKRTKANGTVQVVSPRACAPKDRPLGRKPCFGHPCVQWEPGNRCPGRCMGRAVRMQQRHTACQHNSSDSNCDDRKRPTLRRNCTSGACDVCWHTGPWKPCTAACGRGFQSRKVDCIHTRSCKPVAKRHCVQKKKPISWRHCLGPSCDRDCTDTTHYCMFVKHLNLCSLDRYKQRCCQSCQEG

SEQ ID NO: 3304 - protein, 109 aa, Homo sapiens
MKFISTSLLLMLLVSSLSPVQGVLEVYYTSLRCRCVQESSVFIPRRFIDRIQILPRGNGCPRKEIIVWKKNKSIVCVDPQAEWIQRMMEVLRKRSSSTLPVPVFKRKIP

SEQ ID NO: 3305 - protein, 809 aa, Homo sapiens
MEDEQPDSLEGWVPVREGLFAEPERHRLRFLVAWNGAEGKFAVTCHDRTAQQRRLREGARLGPEPEPKPEAAVSPSSWAGLLSAAGLRGAHRQLAALWPPLERCFPRLPPELDVGGGGAWGLGLGLWALLWPTRAGPGEAALQELCGQLERYLGAAADGCGGATVRDALFPAEGGAADCESPREFRERALRARWVEADARLRQVIQGHGKANTMVALMNVYQEEDEAYQELVTVATMFFQYLLQPFRAMREVATLCKLDILKSLDEDDLGPRRVVALEKEAEEWTRRAEEAVVSIQDITVNYFKETVKALAGMQKEMEQDAKRFGQAAWATAIPRLEKLQLMLARETLQLMRAKELCLNHKRAEIQGKMEDLPEQEKNTNVVDELEIQFYEIQLELYEVKFEILKNEEILLTTQLDSLKRLIKEKQDEVVYYDPCENPEELKVIDCVVGLQDDKNLEVKELRRQCQQLESKRGRICAKRASLRSRKDQCKENHRFRLQQAEESIRYSRQHHSIQMKRDKIKEEEQKKKEWINQERQKTLQRLRSFKDKRLAQSVRNTSGSEPVAPNLPSDLSQQMCLPASHAVSVIHPSSRKTRGVPLSEAGNVKSPKCQNCHGNIPVQVFVPVGDQTHSKSSEELSLPPPPPPPPPPPPPPPPPPPPLRALSSSSQAATHQNLGFRAPVKDDQPRPLVCESPAERPRDSLESFSCPGSMDEVLASLRHGRAPLRKVEVPAVRPPHASINEHILAAIRQGVKLKKVHPDLGPNPSSKPTSNRRTSDLERSIKAALQRIKRVSADSEEDSDEQDPGQWDG

SEQ ID NO: 3306 - protein, 548 aa, Homo sapiens
MALHVPKAPGFAQMLKEGAKHFSGLEEAVYRNIQACKELAQTTRTAYGPNGMNKMVINHLEKLFVTNDAATILRELEVQHPAAKMIVMASHMQEQEVGDGTNFVLVFAGALLELAEELLRIGLSVSEVIEGYEIACRKAHEILPNLVCCSAKNLRDIDEVSSLLRTSIMSKQYGNEVFLAKLIAQACVSIFPDSGHFNVDNIRVCKILGSGISSSSVLHGMVFKKETEGDVTSVKDAKIAVYSCPFDGMITETKGTVLIKTAEELMNFSKGEENLMDAQVKAIADTGANVVVTGGKVADMALHYANKYNIMLVRLNSKWDLRRLCKTVGATALPRLTPPVLEEMGHCDSVYLSEVGDTQVVVFKHEKEDGAISTIVLRGSTDNLMDDIERAVDDGVNTFKVLTRDKRLVPGGGATEIELAKQITSYGETCPGLEQYAIKKFAEAFEAIPRALAENSGVKANEVISKLYAVHQEGNKNVGLDIEAEVPAVKDMLEAGILDTYLGKYWAIKLATNAAVTVLRVDQIIMAKPAGGPKPPSGKKDWDDDQND

SEQ ID NO: 3307 - protein, 736 aa, Homo sapiens
MSLSENSVFAYESSVHSTNVLLSLNDQRKKDVLCDVTIFVEGQRFRAHRSVLAACSSYFHSRIVGQADGELNITLPEEVTVKGFEPLIQFAYTAKLILSKENVDEVCKCVEFLSVHNIEESCFQFLKFKFLDSTADQQECPRKKCFSSHCQKTDLKLSLLDQRDLETDEVEEFLENKNVQTPQCKLRRYQGNAKASPPLQDSASQTYESMCLEKDAALALPSLCPKYRKFQKAFGTDRVRTGESSVKDIHASVQPNERSENECLGGVPECRDLQVMLKCDESKLAMEPEETKKDPASQCPTEKSEVTPFPHNSSIDPHGLYSLSLLHTYDQYGDLNFAGMQNTTVLTEKPLSGTDVQEKTFGESQDLPLKSDLGTREDSSVASSDRSSVEREVAEHLAKGFWSDICSTDTPCQMQLSPAVAKDGSEQISQKRSECPWLGIRISESPEPGQRTFTTLSSVNCPFISTLSTEGCSSNLEIGNDDYVSEPQQEPCPYACVISLGDDSETDTEGDSESCSAREQECEVKLPFNAQRIISLSRNDFQSLLKMHKLTPEQLDCIHDIRRRSKNRIAAQRCRKRKLDCIQNLESEIEKLQSEKESLLKERDHILSTLGETKQNLTGLCQKVCKEAALSQEQIQILAKYSAADCPLSFLISEKDKSTPDGELALPSIFSLSDRPPAVLPPCARGNSEPGYARGQESQQMSTATSEQAGPAEQCRQSGGISDFCQQMTDKCTTDE

SEQ ID NO: 3308 - protein, 1147 aa, Homo sapiens
MDAVNAFNQELFSLMDMKPPISRAKMILITKAAIKAIKLYKHVVQIVEKFIKKCKPEYKVPGLYVIDSIVRQSRHQFGTDKDVFGPRFSKNITATFQYLYLCPSEDKSKIVRVLNLWQKNGVFKIEIIQPLLDMAAGTSNAAPVAENVTNNEGSPPPPVKVSSEPPTQATPNSVPAVPQLPSSDAFAAVAQLFQTTQGQQLQQILQTFQQPPKPQSPALDNAVMAQVQAITAQLKTTPTQPSEQKAAFPPPEQKTAFDKKLLDRFDYDDEPEAVEESKKEDTTAVTTTAPAAAVPPAPTATVPAAAAPAAASPPPPQAPFGFPGDGMQQPAYTQHQNMDQFQPRMMGIQQDPMHHQVPLPPNGQMPGFGLLPTPPFPPMAQPVIPPTPPVQQPFQASFQAQNEPLTQKPHQQEMEVEQPCIQEVKRHMSDNRKSRSRSASRSPKRRRSRSGSRSRRSRHRRSRSRSRDRRRHSPRSRSQERRDREKERERRQKGLPQVKPETASVCSTTLWVGQLDKRTTQQDVASLLEEFGPIESINMIPPRGCAYIVMVHRQDAYRALQKLSRGNYKVNQKSIKIAWALNKGIKADYKQYWDVELGVTYIPWDKVKPEELESFCEGGMLDSDTLNPDWKGIPKKPENEVAQNGGAETSHTEPVSPIPKPLPVPVPPIPVPAPITVPPPQVPPHQPGPPVVGALQPPAFTPPLGIPPPGFGPGVPPPPPPPPFLRPGFNPMHLPPGFLPPGPPPPITPPVSIPPPHTPPISIPNSTIAGINEDTTKDLSIGNPIPTVVSGARGNAESGDSVKMYGSAVPPAAPTNLPTPPVTQPVSLLGTQGVAPGPVIGLQAPSTGLLGARPGLIPLQRPPGMPPPHLQRFPLMPPRPMPPHMMHRGPPPGPGGFAMPPPHGMKGPFPPHGPFVRPGGMPGLGGPGPGPGGPEDRDGRQQPPQQPQQQPQPQAPQQPQQQQQQQPPPSQQPPPTQQQPQQFRNDNRQQFNSGRDQERFGRRSFGNRVENDRERYGNRNDDRDNSNRDRREWGRRSPDRDRHRDLEERNRRSSGHRDRERDSRDRESRREKEEARGKEKPEVTDRAGGNKTVEPPISQVGNVDTASELEKGVSEAAVLKPSEELPAEATSSVEPEKDSGSAAEAPR

SEQ ID NO: 3309 - protein, 58 aa, Homo sapiens
MLQSIIKNIWIPMKPYYTKVYQEIWIGMGLMGFIVYKIRAADKRSKALKASAPAPGHH

SEQ ID NO: 3310 - protein, 1237 aa, Homo sapiens
MDSGAGGRRCPEAALLILGPPRMEHLRHSPGPGGQRLLLPSMLLALLLLLAPSPGHATRVVYKVPEEQPPNTLIGSLAADYGFPDVGHLYKLEVGAPYLRVDGKTGDIFTTETSIDREGLRECQNQLPGDPCILEFEVSITDLVQNGSPRLLEGQIEVQDINDNTPNFASPVITLAIPENTNIGSLFPIPLASDRDAGPNGVASYELQAGPEAQELFGLQVAEDQEEKQPQLIVMGNLDRERWDSYDLTIKVQDGGSPPRASSALLRVTVLDTNDNAPKFERPSYEAELSENSPIGHSVIQVKANDSDQGANAEIEYTFHQAPEVVRRLLRLDRNTGLITVQGPVDREDLSTLRFSVLAKDRGTNPKSARAQVVVTVKDMNDNAPTIEIRGIGLVTHQDGMANISEDVAEETAVALVQVSDRDEGENAAVTCVVAGDVPFQLRQASETGSDSKKKYFLQTTTPLDYEKVKDYTIEIVAVDSGNPPLSSTNSLKVQVVDVNDNAPVFTQSVTEVAFPENNKPGEVIAEITASDADSGSNAELVYSLEPEPAAKGLFTISPETGEIQVKTSLDREQRESYELKVVAADRGSPSLQGTATVLVNVLDCNDNDPKFMLSGYNFSVMENMPALSPVGMVTVIDGDKGENAQVQLSVEQDNGDFVIQNGTGTILSSLSFDREQQSTYTFQLKAVDGGVPPRSAYVGVTINVLDENDNAPYITAPSNTSHKLLTPQTRLGETVSQVAAEDFDSGVNAELIYSIAGGNPYGLFQIGSHSGAITLEKEIERRHHGLHRLVVKVSDRGKPPRYGTALVHLYVNETLANRTLLETLLGHSLDTPLDIDIAGDPEYERSKQRGNILFGVVAGVVAVALLIALAVLVRYCRQREAKSGYQAGKKETKDLYAPKPSGKASKGNKSKGKKSKSPKPVKPVEDEDEAGLQKSLKFNLMSDAPGDSPRIHLPLNYPPGSPDLGRHYRSNSPLPSIQLQPQSPSASKKHQVVQDLPPANTFVGTGDTTSTGSEQYSDYSYRTNPPKYPSKQLPHRRVTFSATSQAQELQDPSQHSYYDSGLEESETPSSKSSSGPRLGPLALPEDHYERTTPDGSIGEMEHPENDLRPLPDVAMTGTCTRECSEFGHSDTCWMPGQSSPSRRTKSSALKLSTFVPYQDRGGQEPAGAGSPSPPEDRNTKTAPVRLLPSYSAFSHSSHDSCKDSATLEEIPLTQTSDFPPAATPASAQTAKREIYL

SEQ ID NO: 3311 - protein, 455 aa, Homo sapiens
MDTPRVLLSAVFLISFLWDLPGFQQASISSSSSSAELGSTKGMRSRKEGKMQRAPRDSDAGREGQEPQPRPQDEPRAQQPRAQEPPGRGPRVVPHEYMLSIYRTYSIAEKLGINASFFQSSKSANTITSFVDRGLDDLSHTPLRRQKYLFDVSMLSDKEELVGAELRLFRQAPSAPWGPPAGPLHVQLFPCLSPLLLDARTLDPQGAPPAGWEVFDVWQGLRHQPWKQLCLELRAAWGELDAGEAEARARGPQQPPPPDLRSLGFGRRVRPPQERALLVVFTRSQRKNLFAEMREQLGSAEAAGPGAGAEGSWPPPSGAPDARPWLPSPGRRRRRTAFASRHGKRHGKKSRLRCSKKPLHVNFKELGWDDWIIAPLEYEAYHCEGVCDFPLRSHLEPTNHAIIQTLMNSMDPGSTPPSCCVPTKLTPISILYIDAGNNVVYKQYEDMVVESCGCR

SEQ ID NO: 3312 - protein, 111 aa, Homo sapiens
MAGKQAVSASGKWLDGIRKWYYNAAGFNKLGLMRDDTIYEDEDVKEAIRRLPENLYNDRMFRIKRALDLNLKHQILPKEQWTKYEEENFYLEPYLKEVIRERKEREEWAKK

SEQ ID NO: 3313 - protein, 417 aa, Homo sapiens
MALSAQQIPRWFNSVKLRSLINAAQLTKRFTRPARTLLHGFSAQPQISSDNCFLQWGFKTYRTSSLWNSSQSTSSSSQENNSAQSSLLPSMNEQSQKTQNISSFDSELFLEELDELPPLSPMQPISEEEAIQIIADPPLPPASFTLRDYVDHSETLQKLVLLGVDLSKIEKHPEAANLLLRLDFEKDIKQMLLFLKDVGIEDNQLGAFLTKNHAIFSEDLENLKTRVAYLHSKNFSKADVAQMVRKAPFLLNFSVERLDNRLGFFQKELELSVKKTRDLVVRLPRLLTGSLEPVKENMKVYRLELGFKHNEIQHMITRIPKMLTANKMKLTETFDFVHNVMSIPHHIIVKFPQVFNTRLFKVKERHLFLTYLGRAQYDPAKPNYISLDKLVSIPDEIFCEEIAKASVQDFEKFLKTL

SEQ ID NO: 3314 - protein, 115 aa, Homo sapiens [sequence omitted]

SEQ ID NO: 3315 - protein, 477 aa, Homo sapiens
MTGQSLWDVSEANVEDGEIRINVGGFKRRLRSHTLLRFPETRLGRLLLCHSREAILELCDDYDDVQREFYFDRNPELFPYVLHFYHTGKLHVMAELCVFSFSQEIEYWGINEFFIDSCCSYSYHGRKVEPEQEKWDEQSDQESTTSSFDEILAFYNDASKFDGQPLGNFRRQLWLALDNPGYSVLSRVFSILSILVVMGSIITMCLNSLPDFQIPDSQGNPGEDPRFEIVEHFGIAWFTFELVARFAVAPDFLKFFKNALNLIDLMSIVPFYITLVVNLVVESTPTLANLGRVAQVLRLMRIFRILKLARHSTGLRSLGATLKYSYKEVGLLLLYLSVGISIFSVVAYTIEKEENEGLATIPACWWWATVSMTTVGYGDVVPGTTAGKLTASACILAGILVVVLPITLIFNKFSHFYRRQKQLESAMRSCDFGDGMKEVPSVNLRDYYAHKVKSLMASLTNMSRSSPSELSLNDSLR

SEQ ID NO: 3316 - protein, 1445 aa, Homo sapiens
MQGPPLLTAAHLLCVCTAALAVAPGPRFLVTAPGIIRPGGNVTIGVELLEHCPSQVTVKAELLKTASNLTVSVLEAEGVFEKGSFKTLTLPSLPLNSADEIYELRVTGRTQDEILFSNSTRLSFETKRISVFIQTDKALYKPKQEVKFRIVTLFSDFKPYKTSLNILIKDPKSNLIQQWLSQQSDLGVISKTFQLSSHPILGDWSIQVQVNDQTYYQSFQVSEYVLPKFEVTLQTPLYCSMNSKHLNGTITAKYTYGKPVKGDVTLTFLPLSFWGKKKNITKTFKINGSANFSFNDEEMKNVMDSSNGLSEYLDLSSPGPVEILTTVTESVTGISRNVSTNVFFKQHDYIIEFFDYTTVLKPSLNFTATVKVTRADGNQLTLEERRNNVVITVTQRNYTEYWSGSNSGNQKMEAVQKINYTVPQSGTFKIEFPILEDSSELQLKAYFLGSKSSMAVHSLFKSPSKTYIQLKTRDENIKVGSPFELVVSGNKRLKELSYMVVSRGQLVAVGKQNSTMFSLTPENSWTPKACVIVYYIEDDGEIISDVLKIPVQLVFKNKIKLYWSKVKAEPSEKVSLRISVTQPDSIVGIVAVDKSVNLMNASNDITMENVVHELELYNTGYYLGMFMNSFAVFQECGLWVLTDANLTKDYIDGVYDNAEYAERFMEENEGHIVDIHDFSLGSSPHVRKHFPETWIWLDTNMGYRIYQEFEVTVPDSITSWVATGFVISEDLGLGLTTTPVELQAFQPFFIFLNLPYSVIRGEEFALEITIFNYLKDATEVKVIIEKSDKFDILMTSNEINATGHQQTLLVPSEDGATVLFPIRPTHLGEIPITVTALSPTASDAVTQMILVKAEGIEKSYSQSILLDLTDNRLQSTLKTLSFSFPPNTVTGSERVQITAIGDVLGPSINGLASLIRMPYGCGEQNMINFAPNIYILDYLTKKKQLTDNLKEKALSFMRQGYQRELLYQREDGSFSAFGNYDPSGSTWLSAFVLRCFLEADPYIDIDQNVLHRTYTWLKGHQKSNGEFWDPGRVIHSELQGGNKSPVTLTAYIVTSLLGYRKYQPNIDVQESIHFLESEFSRGISDNYTLALITYALSSVGSPKAKEALNMLTWRAEQEGGMQFWVSSESKLSDSWQPRSLDIEVAAYALLSHFLQFQTSEGIPIMRWLSRQRNSLGGFASTQDTTVALKALSEFAALMNTERTNIQVTVTGPSSPSPVKFLIDTHNRLLLQTAELAVVQPTAVNISANGFGFAICQLNVVYNVKASGSSRRRRSIQNQEAFDLDVAVKENKDDLNHVDLNVCTSFSGPGRSGMALMEVNLLSGFMVPSEAISLSETVKKVEYDHGKLNLYLDSVNETQFCVNIPAVRNFKVSNTQDASVSIVDYYEPRRQAVRSYNSEVKLSSCDLCSDVQGCRPCEDGASGSHHHSSVIFIFCFKLLYFMELWL

SEQ ID NO: 3317 - protein, 347 aa, Homo sapiens
MHAHCLPFLLHAWWALLQAGAATVATALLRTRGQPSSPSPLAYMLSLYRDPLPRADIIRSLQAEDVAVDGQNWTFAFDFSFLSQQEDLAWAELRLQLSSPVDLPTEGSLAIEIFHQPKPDTEQASDSCLERFQMDLFTVTLSQVTFSLGSMVLEVTRPLSKWLKHPGALEKQMSRVAGECWPRPPTPPATNVLLMLYSNLSQEQRQLGGSTLLWEAESSWRAQEGQLSWEWGKRHRRHHLPDRSQLCRKVKFQVDFNLIGWGSWIIYPKQYNAYRCEGECPNPVGEEFHPTNHAYIQSLLKRYQPHRVPSTCCAPVKTKPLSMLYVDNGRVLLDHHKDMIVEECGCL

SEQ ID NO: 3318 - protein, 225 aa, Homo sapiens
MQCLLLLPFLLLGTVSALHLENDAPHLESLETQADLGQDLDSSKEQERDLALTEEVIQAEGEEVKASACQDNFEDEEAMESDPAALDKDFQCPREEDIVEVQGSPRCKICRYLLVRTPKTFAEAQNVCSRCYGGNLVSIHDFNFNYRIQCCTSTVNQAQVWIGGNLRGWFLWKRFCWTDGSHWNFAYWSPGQPGNGQGSCVALCTKGGYWRRAQCDKQLPFVCSF

SEQ ID NO: 3319 - protein, 153 aa, Homo sapiens
MMASMRVVKELEDLQKKPPPYLRNLSSDDANVLVWHALLLPDQPPYHLKAFNLRISFPPEYPFKPPMIKFTTKIYHPNVDENGQICLPIISSENWKPCTKTCQVLEALNVLVNRPNIREPLRMDLADLLTQNPELFRKNAEEFTLRFGVDRPS

SEQ ID NO: 3320 - protein, 227 aa, Homo sapiens
MGDAGSERSKAPSLPPRCPCGFWGSSKTMNLCSKCFADFQKKQPDDDSAPSTSNSQSDLFSEETTSDNNNTSITTPTLSPSQQPLPTELNVTSPSKEECGPCTDTAHVSLITPTKRSCGTDSQSENEASPVKRPRLLENTERSEETSRSKQKSRRRCFQCQTKLELVQQELGSCRCGYVFCMLHRLPEQHDCTFDHMGRGREEAIMKMVKLDRKVGRSCQRIGEGCS

SEQ ID NO: 3321 - protein, 2073 aa, Homo sapiens
MVKLANPLYTEWILEAIQKIKKQKQRPSEERICHAVSTSHGLDKKTVSEQLELSVQDGSVLKVTNKGLASYKDPDNPGRFSSVKPGTFPKSAKGSRGSCNDLRNVDWNKLLRRAIEGLEEPNGSSLKNIEKYLRSQSDLTSTTNNPAFQQRLRLGAKRAVNNGRLLKDGPQYRVNYGSLDGKGAPQYPSAFPSSLPPVSLLPHEKDQPRADPIPICSFCLGTKESNREKKPEELLSCADCGSSGHPSCLKFCPELTTNVKALRWQCIECKTCSACRVQGRNADNMLFCDSCDRGFHMECCDPPLSRMPKGMWICQVCRPKKKGRKLLHEKAAQIKRRYAKPIGRPKNKLKQRLLSVTSDEGSMNAFTGRGSPGRGQKTKVCTTPSSGHAASGKDSSSRLAVTDPTRPGATTKITTTSTYISASTLKVNKKTKGLIDGLTKFFTPSPDGRRSRGEIIDFSKHYRPRKKVSQKQSCTSHVLATGTTQKLKPPPSSLPPPTPISGQSPSSQKSSTATSSPSPQSSSSQCSVPSLSSLTTNSQLKALFDGLSHIYTTQGQSRKKGHPSYAPPKRMRRKTELSSTAKSKAHFFGKRDIRSRFISHSSSSSWGMARGSIFKAIAHFKRTTFLKKHRMLGRLKYKVTPQMGTPSPGKGSLTDGRIKPDQDDDTEIKINIKQESADVNVIGNKDVVTEEDLDVFKQAQELSWEKIECESGVEDCGRYPSVIEFGKYEIQTWYSSPYPQEYARLPKLYLCEFCLKYMKSKNILLRHSKKCGWFHPPANEIYRRKDLSVFEVDGNMSKIYCQNLCLLAKLFLDHKTLYYDVEPFLFYVLTKNDEKGCHLVGYFSKEKLCQQKYNVSCIMIMPQHQRQGFGRFLIDFSYLLSRREGQAGSPEKPLSDLGRLSYLAYWKSVILEYLYHHHERHISIKAISRATGMCPHDIATTLQHLHMIDKRDGRFVIIRREKLILSHMEKLKTCSRANELDPDSLRWTPILISNAAVSEEEREAEKEAERLMEQASCWEKEEQEILSTRANSRQSPAKVQSKNKYLHSPESRPVTGERGQLLELSKESSEEEEEEEDEEEEEEEEEEEEDEEEEEEEEEEEEEENIQSSPPRLTKPQSVAIKRKRPFVLKKKRGRKRRRINSSVTTETISETTEVLNEPFDNSDEERPMPQLEPTCEIEVEEDGRKPVLRKAFQHQPGKKRQTEEEEGKDNHCFKNADPCRNNMNDDSSNLKEGSKDNPEPLKCKQVWPKGTKRGLSKWRQNKERKTGFKLNLYTPPETPMEPDEQVTVEEQKETSEGKTSPSPIRIEEEVKETGEALLPQEENRREETCAPVSPNTSPGEKPEDDLIKPEEEEEEEEEEEEEEEEEEGEEEEGGGNVEKDPDGAKSQEKEEPEISTEKEDSARLDDHEEEEEEDEEPSHNEDHDADDEDDSHMESAEVEKEELPRESFKEVLENQETFLDLNVQPGHSNPEVLMDCGVDLTASCNSEPKELAGDPEAVPESDEEPPPGEQAQKQDQKNSKEVDTEFKEGNPATMEIDSETVQAVQSLTQESSEQDDTFQDCAETQEACRSLQNYTRADQSPQIATTLDDCQQSDHSSPVSSVHSHPGQSVRSVNSPSVPALENSYAQISPDQSAISVPSLQNMETSPMMDVPSVSDHSQQVVDSGFSDLGSIESTTENYENPSSYDSTMGGSICGNGSSQNSCSYSNLTSSSLTQSSCAVTQQMSNISGSCSMLQQTSISSPPTCSVKSPQGCVVERPPSSSQQLAQCSMAANFTPPMQLAEIPETSNANIGLYERMGQSDFGAGHYPQPSATFSLAKLQQLTNTLIDHSLPYSHSAAVTSYANSASLSTPLSNTGLVQLSQSPHSVPGGPQAQATMTPPPNLTPPPMNLPPPLLQRNMAASNIGISHSQRLQTQIASKGHISMRTKSASLSPAAATHQSQIYGRSQTVAMQGPARTLTMQRGMNMSVNLMPAPAYNVNSVNMNMNTLNAMNGYSMSQPMMNSGYHSNHGYMNQTPQYPMQMQMGMMGTQPYAQQPMQTPPHGNMMYTAPGHHGYMNTGMSKQSLNGSYMRR

SEQ ID NO: 3322 - protein, 613 aa, Homo sapiens
MFRCGGLAAGALKQKLVPLVRTVCVRSPRQRNRLPGNLFQRWHVPLELQMTRQMASSGASGGKIDNSVLVLIVGLSTVGAGAYAYKTMKEDEKRYNERISGLGLTPEQKQKKAALSASEGEEVPQDKAPSHVPFLLIGGGTAAFAAARSIRARDPGARVLIVSEDPELPYMRPPLSKELWFSDDPNVTKTLRFKQWNGKERSIYFQPPSFYVSAQDLPHIENGGVAVLTGKKVVQLDVRDNMVKLNDGSQITYEKCLIATGGTPRSLSAIDRAGAEVKSRTTLFRKIGDFRSLEKISREVKSITIIGGGFLGSELACALGRKARALGTEVIQLFPEKGNMGKILPEYLSNWTMEKVRREGVKVMPNAIVQSVGVSSGKLLIKLKDGRKVETDHIVAAVGLEPNVELAKTGGLEIDSDFGGFRVNAELQARSNIWVAGDAACFYDIKLGRRRVEHHDHAVVSGRLAGENMTGAAKPYWHQSMFWSDLGPDVGYEAIGLVDSSLPTVGVFAKATAQDNPKSATEQSGTGIRSESETESEASEITIPPSTPAVPQAPVQGEDYGKGVIFYLRDKVVVGIVLWNIFNRMPIARKIIKDGEQHEDLNEVAKLFNIHED

SEQ ID NO: 3323 - protein, 1066 aa, Homo sapiens
MQSTDLGNKESGKIWHRKPSPATRDGIIVNIIHNTSDYHPKVLRFLNVAFDGTGDCLIAGDHQGNIYVFDLHGNRFNLVQRTAQACTALAFNLRRKSEFLVALADYSIKCFDTVTKELVSWMRGHESSVFSISVHASGKYAITTSSDTAQLWDLDTFQRKRKLNIRQSVGIQKVFFLPLSNTILSCFKDNSIFAWECDTLFCKYQLPAPPESSSILYKVFAVTRDGRILAAGGKSNHLHLWCLEARQLFRIIQMPTKVRAIRHLEFLPDSFDAGSNQVLGVLSQDGIMRFINMQTCKLLFEIGSLDEGISSSAISPHGRYIASIMENGSLNIYSVQALTQEINKPPPPLVKVIEDLPKNKLSSSDLKMKVTSGRVQQPAKSRESKMQTRILKQDLTGDFESKKNELPDGLNKKRLQILLKGYGEYPTKYRMFIWRSLLQLPENHTAFSTLIDKGTHVAFLNLQKKYPIKSRKLLRVLQRTLSALAHWSVIFSDTPYLPLLAFPFVKLFQNNQLICFEVIATLIINWCQHWFEYFPNPPINILSMIENVLAFHDKELLQHFIDHDITSQLYAWPLLETVFSEVLTREEWLKLFDNIFSNHPSFLLMTVVAYNICSRTPLLSCNLKDDFEFFFHHRNNLDINVVIRQVYHLMETTPTDIHPDSMLNVFVALTKGQYPVFNQYPKFIVDYQTQERERIRNDELDYLRERQTVEDMQAKVDQQRVEDEAWYQKQELLRKAEETRREMLLQEEEKMIQQRQRLAAVKRELKVKEMHLQDAARRRFLKLQQDQQEMELRRLDDEIGRKVYMRDREIAATARDLEMRQLELESQKRLYEKNLTENQEALAKEMRADADAYRRKVDLEEHMFHKLIEAGETQSQKTQKVIKENLAKAEQACLNTDWQIQSLHKQKCDDLQRNKCYQEVAKLLRENRRKEIEIINAMVEEEAKKWKEAEGKEFRLRSAKKASALSDASRKWFLKQEINAAVEHAENPCHKEEPRFQNEQDSSCLPRTSQLNDSSEMDPSTQISLNRRAVEWDTTGQNLIKKVRNLRQRLTARARHRCQTPHLLAA

SEQ ID NO: 3324 - protein, 1390 aa, Homo sapiens
MVVLRSSLELHNHSAASATGSLDLSSDFLSLEHIGRRRLRSAGAAQKKPAATTAKAGDGSSVKEVETYHRTRALRSLRKDAQNSSDSSFEKNVEITEQLANGRHFTRQLARQQADKKKEEHREDKVIPVTRSLRARNIVQSTEHLHEDNGDVEVRRSCRIRSRYSGVNQSMLFDKLITNTAEAVLQKMDDMKKMRRQRMRELEDLGVFNETEESNLNMYTRGKQKDIQRTDEETTDNQEGSVESSEEGEDQEHEDDGEDEDDEDDDDDDDDDDDDDDEDDEDEEDGEEENQKRYYLRQRKATVYYQAPLEKPRHQRKPNIFYSGPASPARPRYRLSSAGPRSPYCKRMNRRRHAIHSSDSTSSSSSEDEQHFERRRKRSRNRAINRCLPLNFRKDELKGIYKDRMKIGASLADVDPMQLDSSVRFDSVGGLSNHIAALKEMVVFPLLYPEVFEKFKIQPPRGCLFYGPPGTGKTLVARALANECSQGDKRVAFFMRKGADCLSKWVGESERQLRLLFDQAYQMRPSIIFFDEIDGLAPVRSSRQDQIHSSIVSTLLALMDGLDSRGEIVVIGATNRLDSIDPALRRPGRFDREFLFSLPDKEARKEILKIHTRDWNPKPLDTFLEELAENCVGYCGADIKSICAEAALCALRRRYPQIYTTSEKLQLDLSSINISAKDFEVAMQKMIPASQRAVTSPGQALSTVVKPLLQNTVDKILEALQRVFPHAEFRTNKTLDSDISCPLLESDLAYSDDDVPSVYENGLSQKSSHKAKDNFNFLHLNRNACYQPMSFRPRILIVGEPGFGQGSHLAPAVIHALEKFTVYTLDIPVLFGVSTTSPEETCAQVIREAKRTAPSIVYVPHIHVWWEIVGPTLKATFTTLLQNIPSFAPVLLLATSDKPHSALPEEVQELFIRDYGEIFNVQLPDKEERTKFFEDLILKQAAKPPISKKKAVLQALEVLPVAPPPEPRSLTAEEVKRLEEQEEDTFRELRIFLRNVTHRLAIDKRFRVFTKPVDPDEVPDYVTVIKQPMDLSSVISKIDLHKYLTVKDYLRDIDLICSNALEYNPDRDPGDRLIRHRACALRDTAYAIIKEELDEDFEQLCEEIQESRKKRGCSSSKYAPSYYHVMPKQNSTLVGDKRSDPEQNEKLKTPSTPVACSTPAQLKRKIRKKSNWYLGTIKKRRKISQAKDDSQNAIDHKIESDTEETQDTSVDHNETGNTGESSVEENEKQQNASESKLELRNNSNTCNIENELEDSRKTTACTELRDKIACNGDASSSQIIHISDENEGKEMCVLRMTRARRSQVEQQQLITVEKALAILSQPTPSLVVDHERLKNLLKTVVKKSQNYNIFQLENLYAVISQCIYRHRKDHDKTSLIQKMEQEVENFSCSR

SEQ ID NO: 3325 - protein, 247 aa, Homo sapiens
MPGRSSSNSGSTGFISFSGVESALSSLKNFQACINSGMDTASSVALDLVESQTEVSSEYSMDKAMVEFATLDRQLNHYVKAVQSTINHVKEERPEKIPDLKLLVEKKFLALQSKNSDADFQNNEKFVQFKQQLKELKKQCGLQADREADGTEGVDEDIIVTQSQTNFTCPITKEEMKKPVKNKVCGHTYEEDAIVRMIESRQKRKKKAYCPQIGCSHTDIRKSDLIQDEALRRAIENHNKKRHRHSE

SEQ ID NO: 3326 - protein, 626 aa, Homo sapiens
MAVSGFTLGTCILLLHISYVANYPNGKVTQSCHGMIPEHGHSPQSVPVHDIYVSQMTFRPGDQIEVTLSGHPFKGFLLEARNAEDLNGPPIGSFTLIDSEVSQLLTCEDIQGSAVSHRSASKKTEIKVYWNAPSSAPNHTQFLVTVVEKYKIYWVKIPGPIISQPNAFPFTTPKATVVPLPTLPPVSHLTKPFSASDCGNKKFCIRSPLNCDPEKEASCVFLSFTRDDQSVMVEMSGPSKGYLSFALSHDQWMGDDDAYLCIHEDQTVYIQPSHLTGRSHPVMDSRDTLEDMAWRLADGVMQCSFRRNITLPGVKNRFDLNTSYYIFLADGAANDGRIYKHSQQPLITYEKYDVTDSPKNIGGSHSVLLLKVHGALMFVAWMTTVSIGVLVARFFKPVWSKAFLLGEAAWFQVHRMLMFTTTVLTCIAFVMPFIYRGGWSRHAGYHPYLGCIVMTLAVLQPLLAVFRPPLHDPRRQMFNWTHWSMGTAARIIAVAAMFLGMDLPGLNLPDSWKTYAMTGFVAWHVGTEVVLELKYWMMTEFRSFSHLLQWKQRVMLLKRQCWQFMSVGMLLFSSYFYLQSTIYEQAKTLAFAGQVIIIIKPKKLEACPDCLEHICEFSLGRLGSCL

SEQ ID NO: 3327 - protein, 150 aa, Homo sapiens
MSAKDERAREILRGFKLNWMNLRDAETGKILWQGTEDLSVPGVEHEARVPKKILKCKAVSRELNFSSTEQMEKFRLEQKVYFKGQCLEEWFFEFGFVIPNSTNTWQSLIEAAPESQMMPASVLTGNVIIETKFFDDDLLVSTSRVRLFYV

SEQ ID NO: 3328 - protein, 427 aa, Homo sapiens
MKLITILFLCSRLLLSLTQESQSEEIDCNDKDLFKAVDAALKKYNSQNQSNNQFVLYRITEATKTVGSDTFYSFKYEIKEGDCPVQSGKTWQDCEYKDAAKAATGECTATVGKRSSTKFSVATQTCQITPAEGPVVTAQYDCLGCVHPISTQSPDLEPILRHGIQYFNNNTQHSSLFMLNEVKRAQRQVVAGLNFRITYSIVQTNCSKENFLFLTPDCKSLWNGDTGECTDNAYIDIQLRIASFSQNCDIYPGKDFVQPPTKICVGCPRDIPTNSPELEETLTHTITKLNAENNATFYFKIDNVKKARVQVVAGKKYFIDFVARETTCSKESNEELTESCETKKLGQSLDCNAEVYVVPWEKKIYPTVNCQPLGMISLMKRPPGFSPFRSSRIGEIKEETTSHLRSCEYKGRPPKAGAEPASEREVS

SEQ ID NO: 3329 - protein, 116 aa, Homo sapiens
MLSCRLQCALAALSIVLALGCVTGAPSDPRLRQFLQKSLAAAAGKQELAKYFLAELLSEPNQTENDALEPEDLSQAAEQDEMRLELQRSANSNPAMAPRERKAGCKNFFWKTFTSC

SEQ ID NO: 3330 - protein, 1471 aa, Homo sapiens
MVSKRRLSKSEDKESLTEDASKTRKQPLSKKTKKSHIANEVEENDSIFVKLLKISGIILKTGESQNQLAVDQIAFQKKLFQTLRRHPSYPKIIEEFVSGLESYIEDEDSFRNCLLSCERLQDEEASMGASYSKSLIKLLLGIDILQPAIIKTLFEKLPEYFFENKNSDEINIPRLIVSQLKWLDRVVDGKDLTTKIMQLISIAPENLQHDIITSLPEILGDSQHADVGKELSDLLIENTSLTVPILDVLSSLRLDPNFLLKVRQLVMDKLSSIRLEDLPVIIKFILHSVTAMDTLEVISELREKLDLQHCVLPSRLQASQVKLKSKGRASSSGNQESSGQSCIILLFDVIKSAIRYEKTISEAWIKAIENTASVSEHKVFDLVMLFIIYSTNTQTKKYIDRVLRNKIRSGCIQEQLLQSTFSVHYLVLKDMCSSILSLAQSLLHSLDQSIISFGSLLYKYAFKFFDTYCQQEVVGALVTHICSGNEAEVDTALDVLLELVVLNPSAMMMNAVFVKGILDYLDNISPQQIRKLFYVLSTLAFSKQNEASSHIQDDMHLVIRKQLSSTVFKYKLIGIIGAVTMAGIMAADRSESPSLTQERANLSDEQCTQVTSLLQLVHSCSEQSPQASALYYDEFANLIQHEKLDPKALEWVGHTICNDFQDAFVVDSCVVPEGDFPFPVKALYGLEEYDTQDGIAINLLPLLFSQDFAKDGGPVTSQESGQKLVSPLCLAPYFRLLRLCVERQHNGNLEEIDGLLDCPIFLTDLEPGEKLESMSAKERSFMCSLIFLTLNWFREIVNAFCQETSPEMKGKVLTRLKHIVELQIILEKYLAVTPDYVPPLGNFDVETLDITPHTVTAISAKIRKKGKIERKQKTDGSKTSSSDTLSEEKNSECDPTPSHRGQLNKEFTGKEEKTSLLLHNSHAFFRELDIEVFSILHCGLVTKFILDTEMHTEATEVVQLGPPELLFLLEDLSQKLESMLTPPIARRVPFLKNKGSRNIGFSHLQQRSAQEIVHCVFQLLTPMCNHLENIHNYFQCLAAENHGVVDGPGVKVQEYHIMSSCYQRLLQIFHGLFAWSGFSQPENQNLLYSALHVLSSRLKQGEHSQPLEELLSQSVHYLQNFHQSIPSFQCALYLIRLLMVILEKSTASAQNKEKIASLARQFLCRVWPSGDKEKSNISNDQLHALLCIYLEHTESILKAIEEIAGVGVPELINSPKDASSSTFPTLTRHTFVVFFRVMMAELEKTVKKIEPGTAADSQQIHEEKLLYWNMAVRDFSILINLIKVFDSHPVLHVCLKYGRLFVEAFLKQCMPLLDFSFRKHREDVLSLLETFQLDTRLLHHLCGHSKIHQDTRLTQHVPLLKKTLELLVCRVKAMLTLNNCREAFWLGNLKNRDLQGEEIKSQNSQESTADESEDDMSSQASKSKATEVSLQNPPESGTDGCILLIVLSWWSRTLPTYVYCQMLLCPFPFPP

SEQ ID NO: 3331 - protein, 761 aa, Homo sapiens
MASERGKVKHNWSSTSEGCPRKRSCLREPCDVAPSSRPAQRSASRSGGPSSPKRLKAQKEDDVACSRRLSWGSSRRRNNSSSSFSPHFLGPGVGGAASKGCLIRNTRGFLSSGGSPLRPANASLEEMASLEEEACSLKVDSKDSSHNSTNSEFAAEAEGQNDTIEEPNKVQKRKRDRLRDQGSTMIYLKAIQGILGKSMPKRKGEAATRAKPSAAEHPSHGEGPARSEGPAKTAEGAARSVTVTAAQKEKDATPEVSMEEDKTVPERSSFYDRRVVIDPQEKPSEEPLGDRRTVIDKCSPPLEFLDDSDSHLEIQKHKDREVVMEHPSSGSDWSDVEEISTVRFSQEEPVSLKPSAVPEPSSFTTDYVMYPPHLYSSPWCDYASYWTSSPKPSSYPSTGSSSNDAAQVGKSSRSRMSDYSPNSTGSVQNTSRDMEASEEGWSQNSRSFRFSRSSEEREVKEKRTFQEEMPPRPCGGHASSSLPKSHLEPSLEEGFIDTHCHLDMLYSKLSFQGTFTKFRKIYSSSFPKEFQGCISDFCDPRTLTDCLWEELLKEDLVWGAFGCHPHFARYYSESQERNLLQALRHPKAVAFGEMGLDYSYKCTTPVPEQHKVFERQLQLAVSLKKPLVIHCREADEDLLEIMKKFVPPDYKIHRHCFTGSYPVIEPLLKYFPNMSVGFTAVLTYSSAWEAREALRQIPLERIIVETDAPYFLPRQVPKSLCQYAHPGLALHTVREIARVKDQPLSLTLAALRENTSRLYSL

SEQ ID NO: 3332 - protein, 116 aa, Homo sapiens
MPSPGTVCSLLLLGMLWLDLAMAGSSFLSPEHQRVQRKESKKPPAKLQPRALAGWLRPEDGGQAEGAEDELEVRFNAPFDVGIKLSGVQYQQHSQALGKFLQDILWEEAKEAPADK

SEQ ID NO: 3333 - protein, 1222 aa, Homo sapiens
MLVGQGAGPLGPAVVTAAVVLLLSGVGPAHGSEDIVVGCGGFVKSDVEINYSLIEIKLYTKHGTLKYQTDCAPNNGYFMIPLYDKGDFILKIEPPLGWSFEPTTVELHVDGVSDICTKGGDINFVFTGFSVNGKVLSKGQPLGPAGVQVSLRNTGTEAKIQSTVTQPGGKFAFFKVLPGDYEILATHPTWALKEASTTVRVTNSNANAASPLIVAGYNVSGSVRSDGEPMKGVKFLLFSSLVTKEDVLGCNVSPVPGFQPQDESLVYLCYTVSREDGSFSFYSLPSGGYTVIPFYRGERITFDVAPSRLDFTVEHDSLKIEPVFHVMGFSVTGRVLNGPEGDGVPEAVVTLNNQIKVKTKADGSFRLENITTGTYTIHAQKEHLYFETVTIKIAPNTPQLADIIATGFSVCGQISIIRFPDTVKQMNKYKVVLSSQDKDKSLVTVETDAHGSFCFKAKPGTYKVQVMVPEAETRAGLTLKPQTFPLTVTNRPMMDVAFVQFLASVSGKVSCLDTCGDLLVTLQSLSRQGEKRSLQLSGKVNAMTFTFDNVLPGKYKISIMHEDWCWKNKSLEVEVLEDDMSAVEFRQTGYMLRCSLSHAITLEFYQDGNGRENVGIYNLSKGVNRFCLSKPGVYKVTPRSCHRFEQAFYTYDTSSPSILTLTAIRHHVLGTITTDKMMDVTVTIKSSIDSEPALVLGPLKSVQELRREQQLAEIEARRQEREKNGNEEGEERMTKPPVQEMVDELQGPFSYDFSYWARSGEKITVTPSSKELLFYPPSMEAVVSGESCPGKLIEIHGKAGLFLEGQIHPELEGVEIVISEKGASSPLITVFTDDKGAYSVGPLHSDLEYTVTSQKEGYVLTAVEGTIGDFKAYALAGVSFEIKAEDDQPLPGVLLSLSGGLFRSNLLTQDNGILTFSNLSPGQYYFKPMMKEFRFEPSSQMIEVQEGQNLKITITGYRTAYSCYGTVSSLNGEPEQGVAMEAVGQNDCSIYGEDTVTDEEGKFRLRGLLPGCVYHVQLKAEGNDHIERALPHHRVIEVGNNDIDDVNIIVFRQINQFDLSGNVITSSEYLPTLWVKLYKSENLDNPIQTVSLGQSLFFHFPPLLRDGENYVVLLDSTLPRSQYDYILPQVSFTAVGYHKHITLIFNPTRKLPEQDIAQGSYIALPLTLLVLLAGYNHDKLIPLLLQLTSRLQGVRALGQAASDNSGPEDAKRQAKKQKTRRT

SEQ ID NO: 3334 - protein, 368 aa, Homo sapiens
MAIKSIASRLRGSRRFLSGFVAGAVVGAAGAGLAALQFFRSQGAEGALTGKQPDGSAEKAVLEQFGFPLTGTEARCYTNHALSYDQAKRVPRWVLEHISKSKIMGDADRKHCKFKPDPNIPPTFSAFNEDYVGSGWSRGHMAPAGNNKFSSKAMAETFYLSNIVPQDFDNNSGYWNRIEMYCRELTERFEDVWVVSGPLTLPQTRGDGKKIVSYQVIGEDNVAVPSHLYKVILARRSSVSTEPLALGAFVVPNEAIGFQPQLTEFQVSLQDLEKLSGLVFFPHLDRTSDIRNICSVDTCKLLDFQEFTLYLSTRKIEGARSVLRLEKIMENLKNAEIEPDDYFMSRYEKKLEELKAKEQSGTQIRKPS

SEQ ID NO: 3335 - protein, 420 aa, Homo sapiens
MLSSFPVVLLETMSHYTDEPRFTIEQIDLLQRLRRTGMTKHEILHALETLDRLDQEHSDKFGRRSSYGGSSYGNSTNNVPASSSTATASTQTQHSGMSPSPSNSYDTSPQPCTTNQNGRENNERLSTSNGKMSPTRYHANSMGQRSYSFEASEEDLDVDDKVEELMRRDSSVIKEEIKAFLANRRISQAVVAQVTGISQSRISHWLLQQGSDLSEQKKRAFYRWYQLEKTNPGATLSMRPAPIPIEDPEWRQTPPPVSATSGTFRLRRGSRFTWRKECLAVMESYFNENQYPDEAKREEIANACNAVIQKPGKKLSDLERVTSLKVYNWFANRRKEIKRRANIEAAILESHGIDVQSPGGHSNSDDVDGNDYSEQDDSTSHSDHQDPISLAVEMAAVNHTILALARQGANEIKTEALDDD

SEQ ID NO: 3336 - protein, 310 aa, Homo sapiens
MPLLVEGRRVRLPQSAGDLVRAHPPLEERARLLRGQSVQQVGPQGLLYVQQRELAVTSPKDGSISILGSDDATTCHIVVLRHTGNGATCLTHCDGTDTKAEVPLIMNSIKSFSDHAQCGRLEVHLVGGFSDDRQLSQKLTHQLLSEFDRQEDDIHLVTLCVTELNDREENENHFPVIYGIAVNIKTAEIYRASFQDRGPEEQLRAARTLAGGPMISIYDAETEQLRIGPYSWTPFPHVDFWLHQDDKQILENLSTSPLAEPPHFVEHIRSTLMFLKKHPSPAHTLFSGNKALLYKKNEDGLWEKISSPGS

SEQ ID NO: 3337 - protein, 1425 aa, Homo sapiens
MENYFQAEAYNLDKVLDEFEQNEDETVSSTLLDTKWNKILDPPSHRLSFNPTLASVNESAVSNESQPQLKVFSLAHSAPLTTEEEDHCANGQDCNLNPEIATMWIDENAVAEDQLIKRNYSWDDQCSAVEVGEKKCGNLACLPDEKNVLVVAVMHNCDKRTLQNDLQDCNNYNSQSLMDAFSCSLDNENRQTDQFSFSINESTEKDMNSEKQMDPLNRPKTEGRSVNHLCPTSSDSLASVCSPSQLKDDGSIGRDPSMSAITSLTVDSVISSQGTDGCPAVKKQENYIPDEDLTGKISSPRTDLGSPNSFSHMSEGILMKKEPAEESTTEESLRSGLPLLLKPDMPNGSGRNNDCERCSDCLVPNEVRADENEGYEHEETLGTTEFLNMTEHFSESQDMTNWKLTKLNEMNDSQVNEEKEKFLQISQPEDTNGDSGGQCVGLADAGLDLKGTCISESEECDFSTVIDTPAANYLSNGCDSYGMQDPGVSFVPKTLPSKEDSVTEEKEIEESKSECYSNIYEQRGNEATEGSGLLLNSTGDLMKKNYLHNFCSQVPSVLGQSSPKVVASLPSISVPFGGARPKQPSNLKLQIPKPLSDHLQNDFPANSGNNTKNKNDILGKAKLGENSATNVCSPSLGNISNVDTNGEHLESYEAEISTRPCLALAPDSPDNDLRAGQFGISARKPFTTLGEVAPVWVPDSQAPNCMKCEARFTFTKRRHHCRACGKVFCASCCSLKCKLLYMDRKEARVCVICHSVLMNAQAWENMMSASSQSPNPNNPAEYCSTIPPLQQAQASGALSSPPPTVMVPVGVLKHPGAEVAQPREQRRVWFADGILPNGEVADAAKLTMNGTSSAGTLAVSHDPVKPVTTSPLPAETDICLFSGSITQVGSPVGSAMNLIPEDGLPPILISTGVKGDYAVEEKPSQISVMQQLEDGGPDPLVFVLNANLLSMVKIVNYVNRKCWCFTTKGMHAVGQSEIVILLQCLPDEKCLPKDIFNHFVQLYRDALAGNVVSNLGHSFFSQSFLGSKEHGGFLYVTSTYQSLQDLVLPTPPYLFGILIQKWETPWAKVFPIRLMLRLGAEYRLYPCPLFSVRFRKPLFGETGHTIMNLLADFRNYQYTLPVVQGLVVDMEVRKTSIKIPSNRYNEMMKAMNKSNEHVLAGGACFNEKADSHLVCVQNDDGNYQTQAISIHNQPRKVTGASFFVFSGALKSSSGYLAKSSIVEDGVMVQITAENMDSLRQALREMKDFTITCGKADAEEPQEHIHIQWVDDDKNVSKGVVSPIDGKSMETITNVKIFHGSEYKANGKVIRWTEVFFLENDDQHNCLSDPADHSRLTEHVAKAFCLALCPHLKLLKEDGMTKLGLRVTLDSDQVGYQAGSNGQPLPSQYMNDLDSALVPVIHGGACQLSEGPVVMELIFYILENIV

SEQ ID NO: 3338 - protein, 146 aa, Homo sapiens
MKASVVLSLLGYLVVPSGAYILGRCTVAKKLHDGGLDYFEGYSLENWVCLAYFESKFNPMAIYENTREGYTGFGLFQMRGSDWCGDHGRNRCHMSCSALLNPNLEKTIKCAKTIVKGKEGMGAWPTWSRYCQYSDTLARWLDGCKL

SEQ ID NO: 3339 - protein, 599 aa, Homo sapiens [sequence omitted]

SEQ ID NO: 3340 - protein, 323 aa, Homo sapiens
MSPAAAAEPDGDQQDRHVSKLIFCFFVFGAVLLCVGVLLSIFGFQACQYKPLPDCPMVLKVAGPACAVVGLGAVILARSRAQLQLRAGLQRGQQMDPDRAFICGESRQFAQCLIFGFLFLTSGMLISVLGIWVPGCGSNWAQEPLNETDTGDSEPRMCGFLSLQIMGPLIVLVGLCFFVVAHVKKRNTLNAGQDASEREEGQIQIMEPVQVTVGDSVIIFPPPPPPYFPESSASAVAESPGTNSLLPNENPPSYYSIFNYGTPTSEGAASERDCESIYTISGTNSSSEASHTPHLPSELPPRYEEKENAAATFLPLSSEPSPP

SEQ ID NO: 3341 - protein, 224 aa, Homo sapiens
MPGSPRPAPSWVLLLRLLALLRPPGLGEACSCAPAHPQQHICHSALVIRAKISSEKVVPASADPADTEKMLRYEIKQIKMFKGFEKVKDVQYIYTPFDSSLCGVKLEANSQKQYLLTGQVLSDGKVFIHLCNYIEPWEDLSLVQRESLNHHYHLNCGCQITTCYTVPCTISAPNECLWTDWLLERKLYGYQAQHYVCMKHVDGTCSWYRGHLPLRKEFVDIVQP

SEQ ID NO: 3342 - protein, 645 aa, Homo sapiens
MSERKEGRGKGKGKKKERGSGKKPESAAGSQSPALPPRLKEMKSQESAAGSKLVLRCETSSEYSSLRFKWFKNGNELNRKNKPQNIKIQKKPGKSELRINKASLADSGEYMCKVISKLGNDSASANITIVESNEIITGMPASTEGAYVSSESPIRISVSTEGANTSSSTSTSTTGTSHLVKCAEKEKTFCVNGGECFMVKDLSNPSRYLCKCPNEFTGDRCQNYVMASFYKHLGIEFMEAEELYQKRVLTITGICIALLVVGIMCVVAYCKTKKQRKKLHDRLRQSLRSERNNMMNIANGPHHPNPPPENVQLVNQYVSKNVISSEHIVEREAETSFSTSHYTSTAHHSTTVTQTPSHSWSNGHTESILSESHSVIVMSSVENSRHSSPTGGPRGRLNGTGGPRECNSFLRHARETPDSYRDSPHSERYVSAMTTPARMSPVDFHTPSSPKSPPSEMSPPVSSMTVSMPSMAVSPFMEEERPLLLVTPPRLREKKFDHHPQQFSSFHHNPAHDSNSLPASPLRIVEDEEYETTQEYEPAQEPVKKLANSRRAKRTKPNGHIANRLEVDSNTSSQSSNSESETEDERVGEDTPFLGIQNPLAASLEATPAFRLADSRTNPAGRFSTQEEIQARLSSVIANQDPIAV

SEQ ID NO: 3343 - protein, 623 aa, Homo sapiens
MPSDLAKKKAAKKKEAAKARQRPRKGHEENGDVVTEPQVAEKNEANGRETTEVDLLTKELEDFEMKKAAARAVTGVLASHPNSTDVHIINLSLTFHGQELLSDTKLELNSGRRYGLIGLNGIGKSMLLSAIGKREVPIPEHIDIYHLTREMPPSDKTPLHCVMEVDTERAMLEKEAERLAHEDAECEKLMELYERLEELDADKAEMRASRILHGLGFTPAMQRKKLKDFSGGWRMRVALARALFIRPFMLLLDEPTNHLDLDACVWLEEELKTFKRILVLVSHSQDFLNGVCTNIIHMHNKKLKYYTGNYDQYVKTRLELEENQMKRFHWEQDQIAHMKNYIARFGHGSAKLARQAQSKEKTLQKMMASGLTERVVSDKTLSFYFPPCGKIPPPVIMVQNVSFKYTKDGPCIYNNLEFGIDLDTRVALVGPNGAGKSTLLKLLTGELLPTDGMIRKHSHVKIGRYHQHLQEQLDLDLSPLEYMMKCYPEIKEKEEMRKIIGRYGLTGKQQVSPIRNLSDGQKCRVCLAWLAWQNPHMLFLDEPTNHLDIETIDALADAINEFEGGMMLVSHDFRLIQQVAQEIWVCEKQTITKWPGDILAYKEHLKSKLVDEEPQLTKRTHNV

SEQ ID NO: 3344 - protein, 454 aa, Homo sapiens
MGRTYIVEETVGQYLSNINLQGKAFVSGLLIGQCSSQKDYVILATRTPPKEEQSENLKHPKAKLDNLDEEWATEHACQVSRMLPGGLLVLGVFIITTLELANDFQNALRRLMFAVEKSINRKRLWNFTEEEVSERVTLHICASTKKIFCRTYDIHDPKSSARPADWKYQSGLSSSWLSLECTVHINIHIPLSATSVSYTLEKNTKNGLTRWAKEIENGVYLINGQVKDEDCDLLEGQKKSSRGNTQATSHSFDVRVLTQLLLNSDHRSTATVQICSGSVNLKGAVKCRAYIHSSKPKVKDAVQAVKRDILNTVADRCEMLFEDLLLNEIPEKKDSEKEFHVLPYRVFVPLPGSTVMLCDYKFDDESAEEIRDHFMEMLDHTIQIEDLEIAEETNTACMSSSMNSQASLDNTDDEQPKQPIKTTMLLKIQQNIGVIAAFTVAVLAAGISFHYFSD

SEQ ID NO: 3345 - protein, 490 aa, Homo sapiens
MESISMMGSPKSLSETFLPNGINGIKDARKVTVGVIGSGDFAKSLTIRLIRCGYHVVIGSRNPKFASEFFPHVVDVTHHEDALTKTNIIFVAIHREHYTSLWDLRHLLVGKILIDVSNNMRINQYPESNAEYLASLFPDSLIVKGFNVVSAWALQLGPKDASRQVYICSNNIQARQQVIELARQLNFIPIDLGSLSSAREIENLPLRLFTLWRGPVVVAISLATFFFLYSFVRDVIHPYARNQQSDFYKIPIEIVNKTLPIVAITLLSLVYLAGLLAAAYQLYYGTKYRRFPPWLETWLQCRKQLGLLSFFFAMVHVAYSLCLPMRRSERYLFLNMAYQQVHANIENSWNEEEVWRIEMYISFGIMSLGLLSLLAVTSIPSVSNALNWREFSFIQSTLGYVALLISTFHVLIYGWKRAFEEEYYRFYTPPNFVLALVLPSIVILGKIILFLPCISRKLKRIKKGWEKSQFLEEGMGGTIPHVSPERVTVM

SEQ ID NO: 3346 - protein, 268 aa, Homo sapiens
MAAALGASGGAGAGDDDFDQFDKPGAERSWRRRAADEDWDSELEDDLLGEDLLSGKKNQSDLSDEELNDDLLQSDNEDEENFSSQGVTISLNATSGMVTSFELSDNTNDQSGEQESEYEQEQGEDELVYHKSDGSELYTQEYPEEGQYEGHEAELTEDQIEYVEEPEEEQLYTDEVLDIEINEPLDEFTGGMETLELQKDIKEESDEEEEDDEESGRLRFKTERKEGTIIRLSDVTRERRNIPETLGNFFACLPSSFTLISTSSIVLL

SEQ ID NO: 3347 - protein, 244 aa, Homo sapiens
MGCRDVHAATVLSFLCGIASVAGLFAGTLLPNWRKLRLITFNRNEKNLTVYTGLWVKCARYDGSSDCLMYDTTWYSSVDQLDLRVLQFALPLSMLIAMGALLLCLIGMCNTAFRSSVPNIKLAKCLVNSAGCHLVAGLLFFLAGTVSLSPSIWVIFYNIHLNKKFEPVFSFDYAVYVTIASAGGLFMTSLILFIWYCTCKSLPSPFWQPLYSHPPSMHTYSQPYSARSRLSAIEIDIPVVSHTT

SEQ ID NO: 3348 - protein, 647 aa, Homo sapiens
MAEEEAPKKSRAAGGGASWELCAGALSARLAEEGSGDAGGRRRPPVDPRRLARQLLLLLWLLEAPLLLGVRAQAAGQGPGQGPGPGQQPPPPPQQQQSGQQYNGERGISVPDHGYCQPISIPLCTDIAYNQTIMPNLLGHTNQEDAGLEVHQFYPLVKVQCSAELKFFLCSMYAPVCTVLEQALPPCRSLCERARQGCEALMNKFGFQWPDTLKCEKFPVHGAGELCVGQNTSDKGTPTPSLLPEFWTSNPQHGGGGHRGGFPGGAGASERGKFSCPRALKVPSYLNYHFLGEKDCGAPCEPTKVYGLMYFGPEELRFSRTWIGIWSVLCCASTLFTVLTYLVDMRRFSYPERPIIFLSGCYTAVAVAYIAGFLLEDRVVCNDKFAEDGARTVAQGTKKEGCTILFMMLYFFSMASSIWWVILSLTWFLAAGMKWGHEAIEANSQYFHLAAWAVPAIKTITILALGQVDGDVLSGVCFVGLNNVDALRGFVLAPLFVYLFIGTSFLLAGFVSLFRIRTIMKHDGTKTEKLEKLMVRIGVFSVLYTVPATIVIACYFYEQAFRDQWERSWVAQSCKSYAIPCPHLQAGGGAPPHPPMSPDFTVFMIKYLMTLIVGITSGFWIWSGKTLNSWRKFYTRLTNSKQGETTV

SEQ ID NO: 3349 - protein, 888 aa, Homo sapiens [sequence omitted]

SEQ ID NO: 3350 - protein, 269 aa, Homo sapiens
MPLGLKPTCSVCKTTSSSMWKKGAQGEILCHHCTGRGGAGSGGAGSGAAGGTGGSGGGGFGAATFASTSATPPQSNGGGGGKQSKQEIHRRSARLRNTKYKSAPAAEKKVSTKGKGRRHIFKLKNPIKAPESVSTIITAESIFYKGVYYQIGDVVSVIDEQDGKPYYAQIRGFIQDQYCEKSAALTWLIPTLSSPRDQFDPASYIIGPEEDLPRKMEYLEFVCHAPSEYFKSRSSPFPTVPTRPEKGYIWTHVGPTPAITIKESVANHL

SEQ ID NO: 3351 - protein, 230 aa, Homo sapiens
MAQGLIEVERKFLPGPGTEERLQELGGTLEYRVTFRDTYYDTPELSLMQADHWLRRREDSGWELKCPGAAGVLGPHTEYKELTAEPTIVAQLCKVLRADGLGAGDVAAVLGPLGLQEVASFVTKRSAWKLVLLGADEEEPQLRVDLDTADFGYAVGEVEALVHEEAEVPTALEKIHRLSSMLGVPAQETAPAKLIVYLQRFRPQDYQRLLEVNSSRERPQETEDPDHCLG

SEQ ID NO: 3352 - protein, 243 aa, Homo sapiens
MARLWGALSLWPLWAAVPWGGAAAVGVRACSSTAAPDGVEGPALRRSYWRHLRRLVLGPPEPPFSHVCQVGDPVLRGVAAPVERAQLGGPELQRLTQRLVQVMRRRRCVGLSAPQLGVPRQVLALELPEALCRECPPRQRALRQMEPFPLRVFVNPSLRVLDSRLVTFPEGCESVAGFLACVPRFQAVQISGLDPNGEQVVWQASGWAARIIQHEMDHLQGCLFIDKMDSRTFTNVYWMKVND

SEQ ID NO: 3353 - protein, 240 aa, Homo sapiens
MSPLLFGAGLVVLNLVTSARSQKTEPLSGSGDQPLFRGADRYDFAIMIPPGGTECFWQFAHQTGYFYFSYEVQRTVGMSHDRHVAATAHNPQGFLIDTSQGVRGQINFSTQETGFYQLCLSNQHNHFGSVQVYLNFGVFYEGPETDHKQKERKQLNDTLDAIEDGTQKVQNNIFHMWRYYNFARMRKMADFFLIQSNYNYVNWWSTAQSLVIILSGILQLYFLKRLFNVPTTTDTKKPRC

SEQ ID NO: 3354 - protein, 446 aa, Homo sapiens
MLHPETSPGRGHLLAVLLALLGTAWAEVWPPQLQEQAPMAGALNRKESFLLLSLHNRLRSWVQPPAADMRRLDWSDSLAQLAQARAALCGTPTPSLASGLWRTLQVGWNMQLLPAGLVSFVEVVSLWFAEGQRYSHAAGECARNATCTHYTQLVWATSSQLGCGRHLCSAGQAAIEAFVCAYSPRGNWEVNGKTIVPYKKGAWCSLCTASVSGCFKAWDHAGGLCEVPRNPCRMSCQNHGRLNISTCHCHCPPGYTGRYCQVRCSLQCVHGRFREEECSCVCDIGYGGAQCATKVHFPFHTCDLRIDGDCFMVSSEADTYYRARMKCQRKGGVLAQIKSQKVQDILAFYLGRLETTNEVIDSDFETRNFWIGLTYKTAKDSFRWATGEHQAFTSFAFGQPDNHGFGNCVELQASAAFNWNDQRCKTRNRYICQFAQEHISRWGPGS

SEQ ID NO: 3355 - protein, 879 aa, Homo sapiens
MMFYRLLSIVGRQRASPGWQNWSSARNSTSAAEARSMALPTQAQVVICGGGITGTSVAYHLSKMGWKDIVLLEQGRLAAGSTRFCAGILSTARHLTIEQKMADYSNKLYYQLEQETGIQTGYTRTGSIFLAQTQDRLISLKRINAGLNVIGIPSEIISPKKVAELHHLLNVHDLVGAMHVPEDAVVSSADVALALASAASQNGVQIYDRTSVLHVMVKKGQVTGVETDKGQIECQYFVNCAGQWAYELGLSNEEPVSIPLHACEHFYLLTRPLETPLQSSTPTIVDADGRIYIRNWQGGILSGGFEKNPKPIFTEGKNQLEIQNLQEDWDHFEPLLSSLLRRMPELETLEIMKLVNCPETFTPDMRCIMGESPAVQGYFVLAGMNSAGLSFGGGAGKYLAEWMVHGYPSENVWELDLKRFGALQSSRTFLRHRVMEVMPLMYDLKVPRWDFQTGRQLRTSPLYDRLDAQGARWMEKHGFERPKYFVPPDKDLLALEQSKTFYKPDWFDIVESEVKCCKEAVCVIDMSSFTKFEITSTGDQALEVLQYLFSNDLDVPVGHIVHTGMLNEGGGYENDCSIARLNKRSFFMISPTDQQVHCWAWLKKHMPKDSNLLLEDVTWKYTALNLIGPRAVDVLSELSYAPMTPDHFPSLFCKEMSVGYANGIRVMSMTHTGEPGFMLYIPIEYALHVYNEVMSVGQKYGIRNAGYYALRSLRIEKFFAFWGQDINNLTTPLECGRESRVKLEKGMDFIGRDALLQQKQNGVYKRLTMFILDDHDSDLDLWPWWGEPIYRNGQYVGKTTSSAYSYSLERHVCLGFVHNFSEDTGEEQVVTADFINRGEYEIDIAGYRFQAKAKLYPVASLFTQKRRKDDMELSDLHGK

SEQ ID NO: 3356 - protein, 479 aa, Homo sapiens
MATDSWALAVDEQEAAAESLSNLHLKEEKIKPDTNGAVVKTNANAEKTDEEEKEDRAAQSLLNKLIRSNLVDNTNQVEVLQRDPNSPLYSVKSFEELRLKPQLLQGVYAMGFNRPSKIQENALPLMLAEPPQNLIAQSQSGTGKTAAFVLAMLSQVEPANKYPQCLCLSPTYELALQTGKVIEQMGKFYPELKLAYAVRGNKLERGQKISEQIVIGTPGTVLDWCSKLKFIDPKKIKVFVLDEADVMIATQGHQDQSIRIQRMLPRNCQMLLFSATFEDSVWKFAQKVVPDPNVIKLKREEETLDTIKQYYVLCSSRDEKFQALCNLYGAITIAQAMIFCHTRKTASWLAAELSKEGHQVALLSGEMMVEQRAAVIERFREGKEKVLVTTNVCARGIDVEQVSVVINFDLPVDKDGNPDNETYLHRIGRTGRFGKRGLAVNMVDSKHSMNILNRIQEHFNKKIERLDTDDLDEIEKIAN

SEQ ID NO: 3357 - protein, 176 aa, Homo sapiens
MARLPKLAVFDLDYTLWPFWVDTHVDPPFHKSSDGTVRDRRGQDVRLYPEVPEVLKRLQSLGVPGAAASRTSEIEGANQLLELFDLFRYFVHREIYPGSKITHFERLQQKTGIPFSQMIFFDDERRNIVDVSKLGVTCIHIQNGMNLQTLSQGLETFAKAQTGPLRSSLEESPFEA

SEQ ID NO: 3358 - protein, 242 aa, Homo sapiens
MPRGFTWLRYLGIFLGVALGNEPLEMWPLTQNEECTVTGFLRDKLQYRSRLQYMKHYFPINYKISVPYEGVFRIANVTRLQRAQVSERELRYLWVLVSLSATESVQDVLLEGHPSWKYLQEVETLLLNVQQGLTDVEVSPKVESVLSLLNAPGPNLKLVRPKALLDNCFRVMELLYCSCCKQSSVLNWQDCEVPSPQSCSPEPSLQYAATQLYPPPPWSPSSPPHSTGSVRPVRAQGEGLLP

SEQ ID NO: 3359 - protein, 313 aa, Homo sapiens
MAAPMNGQVCVVTGASRGIGRGIALQLCKAGATVYITGRHLDTLRVVAQEAQSLGGQCVPVVCDSSQESEVRSLFEQVDREQQGRLDVLVNNAYAGVQTILNTRNKAFWETPASMWDDINNVGLRGHYFCSVYGARLMVPAGQGLIVVISSPGSLQYMFNVPYGVGKAACDKLAADCAHELRRHGVSCVSLWPGIVQTELLKEHMAKEEVLQDPVLKQFKSAFSSAETTELSGKCVVALATDPNILSLSGKVLPSCDLARRYGLRDVDGRPVQDYLSLSSVLSHVSGLGWLASYLPSFLRVPKWIIALYTSKF

SEQ ID NO: 3360 - protein, 976 aa, Homo sapiens [sequence omitted]

SEQ ID NO: 3361 - protein, 502 aa, Homo sapiens
MSLVLLSLAALCRSAVPREPTVQCGSETGPSPEWMLQHDLIPGDLRDLRVEPVTTSVATGDYSILMNVSWVLRADASIRLLKATKICVTGKSNFQSYSCVRCNYTEAFQTQTRPSGGKWTFSYIGFPVELNTVYFIGAHNIPNANMNEDGPSMSVNFTSPGCLDHIMKYKKKCVKAGSLWDPNITACKKNEETVEVNFTTTPLGNRYMALIQHSTIIGFSQVFEPHQKKQTRASVVIPVTGDSEGATVQLTPYFPTCGSDCIRHKGTVVLCPQTGVPFPLDNNKSKPGGWLPLLLLSLLVATWVLVAGIYLMWRHERIKKTSFSTTTLLPPIKVLVVYPSEICFHHTICYFTEFLQNHCRSEVILEKWQKKKIAEMGPVQWLATQKKAADKVVFLLSNDVNSVCDGTCGKSEGSPSENSQDLFPLAFNLFCSDLRSQIHLHKYVVVYFREIDTKDDYNALSVCPKYHLMKDATAFCAELLHVKQQVSAGKRSQACHDGCCSL

SEQ ID NO: 3362 - protein, 1091 aa, Homo sapiens
MAGPGSPRRASRGASALLAAALLYAALGDVVRSEQQIPLSVVKLWASAFGGEIKSIAAKYSGSQLLQKKYKEYEKDVAIEEIDGLQLVKKLAKNMEEMFHKKSEAVRRLVEAAEEAHLKHEFDADLQYEYFNAVLINERDKDGNFLELGKEFILAPNDHFNNLPVNISLSDVQVPTNMYNKDPAIVNGVYWSESLNKVFVDNFDRDPSLIWQYFGSAKGFFRQYPGIKWEPDENGVIAFDCRNRKWYIQAATSPKDVVILVDVSGSMKGLRLTIAKQTVSSILDTLGDDDFFNIIAYNEELHYVEPCLNGTLVQADRTNKEHFREHLDKLFAKGIGMLDIALNEAFNILSDFNHTGQGSICSQAIMLITDGAVDTYDTIFAKYNWPDRKVRIFTYLIGREAAFADNLKWMACANKGFFTQISTLADVQENVMEYLHVLSRPKVIDQEHDVVWTEAYIDSTLPQAQKLTDDQGPVLMTTVAMPVFSKQNETRSKGILLGVVGTDVPVKELLKTIPKYKLGIHGYAFAITNNGYILTHPELRLLYEEGKKRRKPNYSSVDLSEVEWEDRDDVLRNAMVNRKTGKFSMEVKKTVDKGKRVLVMTNDYYYTDIKGTPFSLGVALSRGHGKYFFRGNVTIEEGLHDLEHPDVSLADEWSYCNTDLHPEHRHLSQLEAIKLYLKGKEPLLQCDKELIQEVLFDAVVSAPIEAYWTSLALNKSENSDKGVEVAFLGTRTGLSRINLFVGAEQLTNQDFLKAGDKENIFNADHFPLWYRRAAEQIPGSFVYSIPFSTGPVNKSNVVTASTSIQLLDERKSPVVAAVGIQMKLEFFQRKFWTASRQCASLDGKCSISCDDETVNCYLIDNNGFILVSEDYTQTGDFFGEIEGAVMNKLLTMGSFKRITLYDYQAMCRANKESSDGAHGLLDPYNAFLSAVKWIMTELVLFLVEFNLCSWWHSDMTAKAQKLKQTLEPCDTEYPAFVSERTIKETTGNIACEDCSKSFVIQQIPSSNLFMVVVDSSCLCESVAPITMAPIEIRYNESLKCERLKAQKIRRRPESCHGFHPEENARECGGAPSLQAQTVLLLLPLLLMLFSR

SEQ ID NO: 3363 - protein, 986 aa, Homo sapiens
MSQWTPEYNELYTLKVDMKSEIPSDAPKTQESLKGILLHPEPIGAAKSFPAGVEMINSKVGNEFSHLCDDSQKQEKEMNGNQQEQEKSLVVRKKRKSQQAGPSYVQNCVKENQGILGLRQHLGTPSDEDNDSSFSDCLSSPSSSLHFGDSDTVTSDEDKEVSVRHSQTILNAKSRSHSARSHKWPRTETESVSGLLMKRPCLHGSSLRRLPCRKRFVKNNSSQRTQKQKERILMQRKKREVLARRKYALLPSSSSSSENDLSSESSSSSSTEGEEDLFVSASENHQNNPAVPSGSIDEDVVVIEASSTPQVTANEEINVTSTDSEVEIVTVGESYRSRSTLGHSRSHWSQGSSSHASRPQEPRNRSRISTVIQPLRQNAAEVVDLTVDEDEPTVVPTTSARMESQATSASINNSNPSTSEQASDTASAVTSSQPSTVSETSATLTSNSTTGTSIGDDSRRTTSSAVTETGPPAMPRLPSCCPQHSPCGGSSQNHHALGHPHTSCFQQHGHHFQHHHHHHHTPHPAVPVSPSFSDPACPVERPPQVQAPCGANSSSGTSYHEQQALPVDLSNSGIRSHGSGSFHGASAFDPCCPVSSSRAAIFGHQAAAAAPSQPLSSIDGYGSSMVAQPQPQPPPQPSLSSCRHYMPPPYASLTRPLHHQASACPHSHGNPPPQTQPPPQVDYVIPHPVHAFHSQISSHATSHPVAPPPPTHLASTAAPIPQHLPPTHQPISHHIPATAPPAQRLHPHEVMQRMEVQRRRMMQHPTRAHERPPPHPHRMHPNYGHGHHIHVPQTMSSHPRQAPERSAWELGIEAGVTAATYTPGALHPHLAHYHAPPRLHHLQLGALPLMVPDMAGYPHIRYISSGLDGTSFRGPFRGNFEELIHLEERLGNVNRGASQGTIERCTYPHKYKKRKLHCKQDGEEGTEEDTEEKCTICLSILEEGEDVRRLPCMHLFHQVCVDQWLITNKKCPICRVDIEAQLPSES

SEQ ID NO: 3364 - protein, 398 aa, Homo sapiens
MALLRRPTVSSDLENIDTGVNSKVKSHVTIRRTVLEEIGNRVTTRAAQVAKKAQNTKVPVQPTKTTNVNKQLKPTASVKPVQMEKLAPKGPSPTPEDVSMKEENLCQAFSDALLCKIEDIDNEDWENPQLCSDYVKDIYQYLRQLEVLQSINPHFLDGRDINGRMRAILVDWLVQVHSKFRLLQETLYMCVGIMDRFLQVQPVSRKKLQLVGITALLLASKYEEMFSPNIEDFVYITDNAYTSSQIREMETLILKELKFELGRPLPLHFLRRASKAGEVDVEQHTLAKYLMELTLIDYDMVHYHPSKVAAAASCLSQKVLGQGKWNLKQQYYTGYTENEVLEVMQHMAKNVVKVNENLTKFIAIKNKYASSKLLKISMIPQLNSKAVKDLASPLIGRS

SEQ ID NO: 3365 - protein, 1108 aa, Homo sapiens
MGSKGVYQYHWQSHNVKHSGVDDMVLLSKITENSIVENLKKRYMDDYIFTYIGSVLISVNPFKQMPYFGEKEIEMYQGAAQYENPPHIYALADNMYRNMIIDRENQCVIISGESGAGKTVAAKYIMSYISRVSGGGTKVQHVKDIILQSNPLLEAFGNAKTVRNNNSSRFGKYFEIQFSPGGEPDGGKISNFLLEKSRVVMRNPGERSFHIFYQLIEGASAEQKHSLGITSMDYYYYLSLSGSYKVDDIDDRREFQETLHAMNVIGIFAEEQTLVLQIVAGILHLGNISFKEVGNYAAVESEEFLAFPAYLLGINQDRLKEKLTSRQMDSKWGGKSESIHVTLNVEQACYTRDALAKALHARVFDFLVDSINKAMEKDHEEYNIGVLDIYGFEIFQKNGFEQFCINFVNEKLQQIFIELTLKAEQEEYVQEGIRWTPIEYFNNKIVCDLIENKVNPPGIMSILDDVCATMHAVGEGADQTLLQKLQMQIGSHEHFNSWNQGFIIHHYAGKVSYDMDGFCERNRDVLFMDLIELMQSSELPFIKSLFPENLQADKKGRPTTAGSKIKKQANDLVSTLMKCTPHYIRCIKPNETKKPRDWEESRVKHQVEYLGLKENIRVRRAGYAYRRIFQKFLQRYAILTKATWPSWQGEEKQGVLHLLQSVNMDSDQFQLGRSKVFIKAPESLFLLEEMRERKYDGYARVIQKSWRKFVARKKYVQMREEASDLLLNKKERRRNSINRNFIGDYIGMEEHPELQQFVGKREKIDFADTVTKYDRRFKGVKRDLLLTPKCLYLIGREKVKQGPDKGLVKEVLKRKIEIERILSVSLSTMQDDIFILHEQEYDSLLESVFKTEFLSLLAKRYEEKTQKQLPLKFSNTLELKLKKENWGPWSAGGSRQVQFHQGFGDLAVLKPSNKVLQVSIGPGLPKNSRPTRRNTTQNTGYSSGTQNANYPVRAAPPPPGYHQNGVIRNQYVPYPHAPGSQRSNQKSLYTSMARPPLPRQQSTSSDRVSQTPESLDFLKVPDQGAAGVRRQTTSRPPPAGGRPKPQPKPKPQVPQCKALYAYDAQDTDELSFNANDIIDIIKEDPSGWWTGRLRGKQGLFPNNYVTKI

SEQ ID NO: 3366 - protein, 96 aa, Homo sapiens
MSESSSKSSQPLASKQEKDGTEKRGRGRPRKQPPKEPSEVPTPKRPRGRPKGSKNKGAAKTRKTTTTPGRKPRGRPKKLEKEEEEGISQESSEEEQ

SEQ ID NO: 3367 - protein, 709 aa, Homo sapiens
MPGIDKLPIEETLEDSPQTRSLLGVFEEDATAISNYMNQLYQAMHRIYDAQNELSAATHLTSKLLKEYEKQRFPLGGDDEVMSSTLQQFSKVIDELSSCHAVLSTQLADAMMFPITQFKERDLKEILTLKEVFQIASNDHDAAINRYSRLSKKRENDKVKYEVTEDVYTSRKKQHQTMMHYFCALNTLQYKKKIALLEPLLGYMQAQISFFKMGSENLNEQLEEFLANIGTSVQNVRREMDSDIETMQQTIEDLEVASDPLYVPDPDPTKFPVNRNLTRKAGYLNARNKTGLVSSTWDRQFYFTQGGNLMSQARGDVAGGLAMDIDNCSVMAVDCEDRRYCFQITSFDGKKSSILQAESKKDHEEWICTINNISKQIYLSENPEETAARVNQSALEAVTPSPSFQQRHESLRPAAGQSRPPTARTSSSGSLGSESTNLAALSLDSLVAPDTPIQFDIISPVCEDQPGQAKAFGQGGRRTNPFGESGGSTKSETEDSILHQLFIVRFLGSMEVKSDDHPDVVYETMRQILAARAIHNIFRMTESHLLVTCDCLKLIDPQTQVTRLTFPLPCVVLYATHQENKRLFGFVLRTSSGRSESNLSSVCYIFESNNEGEKICDSVGLAKQIALHAELDRRASEKQKEIERVKEKQQKELNKQKQIEKDLEEQSRLIAASSRPNQASSEGQFVVLSSSQSEESDLGEGGKKRESEA

SEQ ID NO: 3368 - protein, 780 aa, Homo sapiens
MTAAAASNWGLITNIVNSIVGVSVLTMPFCFKQCGIVLGALLLVFCSWMTHQSCMFLVKSASLSKRRTYAGLAFHAYGKAGKMLVETSMIGLMLGTCIAFYVVIGDLGSNFFARLFGFQVGGTFRMFLLFAVSLCIVLPLSLQRNMMASIQSFSAMALLFYTVFMFVIVLSSLKHGLFSGQWLRRVSYVRWEGVFRCIPIFGMSFACQSQVLPTYDSLDEPSVKTMSSIFASSLNVVTTFYVMVGFFGYVSFTEATAGNVLMHFPSNLVTEMLRVGFMMSVAVGFPMMILPCRQALSTLLCEQQQKDGTFAAGGYMPPLRFKALTLSVVFGTMVGGILIPNVETILGLTGATMGSLICFICPALIYKKIHKNALSSQVVLWVGLGVLVVSTVTTLSVSEEVPEDLAEEAPGGRLGEAEGLMKVEAARLSAQDPVVAVAEDGREKPKLPKEREELEQAQIKGPVDVPGREDGKEAPEEAQLDRPGQGIAVPVGEAHRHEPPVPHDKVVVDEGQDREVPEENKPPSRHAGGKAPGVQGQMAPPLPDSEREKQEPEQGEVGKRPGQAQALEEAGDLPEDPQKVPEADGQPAVQPAKEDLGPGDRGLHPRPQAVLSEQQNGLAVGGGEKAKGGPPPGNAAGDTGQPAEDSDHGGKPPLPAEKPAPGPGLPPEPREQRDVERAGGNQAASQLEGKASALQPPASGPGSGSPLPQPWGDAQVILGSPARPPFSFQPPAEQTPRRAFCSLPISSLLSGNLLSALLPFKHLRHRHMACDYRFISLAPL

SEQ ID NO: 3369 - protein, 861 aa, Homo sapiens
MNQPGGAAAPQADGASAAGRKSTASRERLKRSQKSTKVEGPEPVPAEASLSAEQGTMTEVKVKTELPDDYIQEVIWQGEAKEEKKAVSKDGTSDVPAEICVVIGGVRNQQTLGSYECGICGKKYKYYNCFQTHVRAHRDTEATSGEGASQSNNFRYTCDICGKKYKYYSCFQEHRDLHAVDVFSVEGAPENRADPFDQGVVATDEVKEEPPEPFQKIGPMNNITSDIFKKKEVRQCQKRETGNYTCEFCGKQYKYYTPYQEHVALHAPIKSAFSRRVEGKAQNHFEETNSSSQNSSEPYTCGACGIQFQFYNNLLEHMQSHAADNENNIASNQSRSPPAVVEEKWKPQAQRNSANNTTTSGLTPNSMIPEKERQNIAERLLRVMCADLGALSVVSGKEFLKLAQTLVDSGARYGAFSVTEILGNFNTLALKHLPRMYNQVKVKVTCALGSNACLGIGVTCHSQSVGPDSCYILTAYQAEGNHIKSYVLGVKGADIRDSGDLVHHWVQNVLSEFVMSEIRTVYVTDCRVSTSAFSKAGMCLRCSACALNSVVQSVLSKRTLQARSMHEVIELLNVCEDLAGSTGLAKETFGSLEETSPPPCWNSVTDSLLLVHERYEQICEFYSRAKKMNLIQSLNKHLLSNLAAILTPVKQAVIELSNESQPTLQLVLPTYVRLEKLFTAKANDAGTVSKLCHLFLEALKENFKVHPAHKVAMILDPQQKLRPVPPYQHEEIIGKVCELINEVKESWAEEADFEPAAKKPRSAAVENPAAQEDDRLGKNEVYDYLQEPLFQATPDLFQYWSCVTQKHTKLAKLAFWLLAVPAVGARSGCVNMCEQALLIKRRRLLSPEDMNKLMFLKSNML

SEQ ID NO: 3370 - protein, 342 aa, Homo sapiens
MACEPQVDPGATGPLPPSSPGWSALPGGSPPGWGQELHNGQVLTVLRIDNTCAPISFDLGAAEEQLQTWGIQVPADQYRSLAESALLEPQVRRYIIYNSRPMRLAFAVVFYVVVWANIYSTSQMFALGNHWAGMLLVTLAAVSLTLTLVLVFERHQKKANTNTDLRLAAANGALLRHRVLLGVTDTVEGCQSVIQLWFVYFDLENCVQFLSDHVQEMKTSQESLLRSRLSQLCVVMETGVSPATAEGPENLEDAPLLPGNSCPNERPLMQTELHQLVPEAEPEEMARQLLAVFGGYYIRLLVTSQLPQAMGTRHTNSPRIPCPCQLIEAYILGTGCCPFLAR

SEQ ID NO: 3371 - protein, 327 aa, Homo sapiens
MAAPGSCALWSYCGRGWSRAMRGCQLLGLRSSWPGDLLSARLLSQEKRAAETHFGFETVSEEEKGGKVYQVFESVAKKYDVMNDMMSLGIHRVWKDLLLWKMHPLPGTQLLDVAGGTGDIAFRFLNYVQSQHQRKQKRQLRAQQNLSWEEIAKEYQNEEDSLGGSRVVVCDINKEMLKVGKQKALAQGYRAGLAWVLGDAEELPFDDDKFDIYTIAFGIRNVTHIDQALQEAHRVLKPGGRFLCLEFSQVNNPLISRLYDLYSFQVIPVLGEVIAGDWKSYQYLVESIRRFPSQEEFKDMIEDAGFHKVTYESLTSGIVAIHSGFKL

SEQ ID NO: 3372 - protein, 620 aa, Homo sapiens
MIEESGNKRKTMAEKRQLFIEMRAQNFDVIRLSTYRTACKLRFVQKRCNLHLVDIWNMIEAFRDNGLNTLDHTTEISVSRLETVISSIYYQLNKRLPSTHQISVEQSISLLLNFMIAAYDSEGRGKLTVFSVKAMLATMCGGKMLDKLRYVFSQMSDSNGLMIFSKFDQFLKEVLKLPTAVFEGPSFGYTEHSVRTCFPQQRKIMLNMFLDTMMADPPPQCLVWLPLMHRLAHVENVFHPVECSYCRCESMMGFRYRCQQCHNYQLCQNCFWRGHAGGPHSNQHQMKEHSSWKSPAKKLSHAISKSLGCVPTREPPHPVFPEQPEKPLDLAHIVPPRPLTNMNDTMVSHMSSGVPTPTKRLQYSQDIPSHLADEHALIASYVARLQHCARVLDSPSRLDEEHRLIARYAARLAAEAGNVTRPPTDLSFNFDANKQQRQLIAELENKNREILQEIQRLRLEHEQASQPTPEKAQQNPTLLAELRLLRQRKDELEQRMSALQESRRELMVQLEELMKLLKAQATGSPHTSPTHGGGRPMPMPVRSTSAGSTPTHCPQDSLSGVGGDVQEAFAQGTRRNLRNDLLVAADSITNTMSSLVKELHSAEEGAEEEEEKMQNGKDRG

SEQ ID NO: 3373 - protein, 1092 aa, Homo sapiens
MGNAGSMDSQQTDFRAHNVPLKLPMPEPGELEERFAIVLNAMNLPPDKARLLRQYDNEKKWELICDQERFQVKNPPHTYIQKLKGYLDPAVTRKKFRRRVQESTQVLRELEISLRTNHIGWVREFLNEENKGLDVLVEYLSFAQYAVTFDFESVESTVESSVDKSKPWSRSIEDLHRGSNLPSPVGNSVSRSGRHSALRYNTLPSRRTLKNSRLVSKKDDVHVCIMCLRAIMNYQYGFNMVMSHPHAVNEIALSLNNKNPRTKALVLELLAAVCLVRGGHEIILSAFDNFKEVCGEKQRFEKLMEHFRNEDNNIDFMVASMQFINIVVHSVEDMNFRVHLQYEFTKLGLDEYLDKLKHTESDKLQVQIQAYLDNVFDVGALLEDAETKNAALERVEELEENISHLSEKLQDTENEAMSKIVELEKQLMQRNKELDVVREIYKDANTQVHTLRKMVKEKEEAIQRQSTLEKKIHELEKQGTIKIQKKGDGDIAILPVVASGTLSMGSEVVAGNSVGPTMGAASSGPLPPPPPPLPPSSDTPETVQNGPVTPPMPPPPPPPPPPPPPPPPPPPPPLPGPAAETVPAPPLAPPLPSAPPLPGTSSPTVVFNSGLAAVKIKKPIKTKFRMPVFNWVALKPNQINGTVFNEIDDERILEDLNVDEFEEIFKTKAQGPAIDLSSSKQKIPQKGSNKVTLLEANRAKNLAITLRKAGKTADEICKAIHVFDLKTLPVDFVECLMRFLPTENEVKVLRLYERERKPLENLSDEDRFMMQFSKIERLMQKMTIMAFIGNFAESIQMLTPQLHAIIAASVSIKSSQKLKKILEIILALGNYMNSSKRGAVYGFKLQSLDLLLDTKSTDRKQTLLHYISNVVKEKYHQVSLFYNELHYVEKAAAVSLENVLLDVKELQRGMDLTKREYTMHDHNTLLKEFILNNEGKLKKLQDDAKIAQDAFDDVVKYFGENPKTTPPSVFFPVFVRFVKAYKQAEEENELRKKQEQALMEKLLEQEALMEQQDPKSPSHKSKRQQQELIAELRRRQVKDNRHVYEGKDGAIEDIITDLRNQPYRRADAVRRSVRRRFDDQNLRSVNGAEITM

SEQ ID NO: 3374 - protein, 384 aa, Homo sapiens
MAEQTYSWAYSLVDSSQVSTFLISILLIVYGSFRSLNMDFENQDKEKDSNSSSGSFNGNSTNNSIQTIDSTQALFLPIGASVSLLVMFFFFDSVQVVFTICTAVLATIAFAFLLLPMCQYLTRPCSPQNKISFGCCGRFTAAELLSFSLSVMLVLIWVLTGHWLLMDALAMGLCVAMIAFVRLPSLKVSCLLLSGLLIYDVFWVFFSAYIFNSNVMVKVATQPADNPLDVLSRKLHLGPNVGRDVPRLSLPGKLVFPSSTGSHFSMLGIGDIVMPGLLLCFVLRYDNYKKQASGDSCGAPGPANISGRMQKVSYFHCTLIGYFVGLLTATVASRIHRAAQPALLYLVPFTLLPLLTMAYLKGDLRRMWSEPFHSKSSSSRFLEV

SEQ ID NO: 3375 - protein, 262 aa, Homo sapiens
MAAPSGTVSDSESSNSSSDAEELERCREAAMPAWGLEQRPHVAGKPRAGAANSQLSTSQPSLRHKVNEHEQDGNELQTTPEFRAHVAKKLGALLDSFITISEAAKEPAKAKVQKVALEDDGFRLFFTSVPGGREKEESPQPRRKRQPSSSSEDSDEEWRRCREAAVSASDILQESAIHSPGTVEKEAKKKRKLKKKAKKVASVDSAVAATTPTSMATVQKQKSGELNGDQVSLGTKKKKKAKKASETSPFPPAKSATAIPAN

SEQ ID NO: 3376 - protein, 346 aa, Homo sapiens
MAPAAASPPEVIRAAQKDEYYRGGLRSAAGGALHSLAGARKWLEWRKEVELLSDVAYFGLTTLAGYQTLGEEYVSIIQVDPSRIHVPSSLRRGVLVTLHAVLPYLLDKALLPLEQELQADPDSGRPLQGSLGPGGRGCSGARRWMRHHTATLTEQQRRALLRAVFVLRQGLACLQRLHVAWFYIHGVFYHLAKRLTGITYQALRPDPLRVLMSVAPSALQLRVRSLPGEDLRARVSYRLLGVISLLHLVLSMGLQLYGFRQRQRARKEWRLHRGLSHRRASLEERAVSRNPLCTLCLEERRHPTATPCGHLFCWECITAWCSSKAECPLCREKFPPQKLIYLRHYR

SEQ ID NO: 3377 - protein, 454 aa, Homo sapiens
MNLASQSGEAGAGQLLFANFNQDNTEVKGASRAAGLGRRAVVWSLAVGSKSGYKFFSLSSVDKLEQIYECTDTEDVCIVERLFSSSLVAIVSLKAPRKLKVCHFKKGTEICNYSYSNTILAVKLNRQRLIVCLEESLYIHNIRDMKVLHTIRETPPNPAGLCALSINNDNCYLAYPGSATIGEVQVFDTINLRAANMIPAHDSPLAALAFDASGTKLATASEKGTVIRVFSIPEGQKLFEFRRGVKRCVSICSLAFSMDGMFLSASSNTETVHIFKLETVKEKPPEEPTTWTGYFGKVLMASTSYLPSQVTEMFNQGRAFATVRLPFCGHKNICSLATIQKIPRLLVGAADGYLYMYNLDPQEGGECALMKQHRLDGSLETTNEILDSASHDCPLVTQTYGAAAGKGTYVPSSPTRLAYTDDLGAVGGACLEDEASALRLDEDSEHPPMILRTD

SEQ ID NO: 3378 - protein, 175 aa, Homo sapiens [sequence omitted]

SEQ ID NO: 3379 - protein, 377 aa, Homo sapiens
MAEEVVVVAKFDYVAQQEQELDIKKNERLWLLDDSKSWWRVRNSMNKTGFVPSNYVERKNSARKASIVKNLKDTLGIGKVKRKPSVPDSASPADDSFVDPGERLYDLNMPAYVKFNYMAEREDELSLIKGTKVIVMEKCSDGWWRGSYNGQVGWFPSNYVTEEGDSPLGDHVGSLSEKLAAVVNNLNTGQVLHVVQALYPFSSSNDEELNFEKGDVMDVIEKPENDPEWWKCRKINGMVGLVPKNYVTVMQNNPLTSGLEPSPPQCDYIRPSLTGKFAGNPWYYGKVTRHQAEMALNERGHEGDFLIRDSESSPNDFSVSLKAQGKNKHFKVQLKETVYCIGQRKFSTMEELVEHYKKAPIFTSEQGEKLYLVKHLS

SEQ ID NO: 3380 - protein, 393 aa, Homo sapiens
MTTYSDKGAKPERGRFLHFHSVTFWVGNAKQATSFYCSKMGFEPLAYRGLETGSREVVSHVIKQGKIVFVLSSALNPWNKEMGDHLVKHGDGVKDIAFEVEDCDYIVQKARERGAKIMREPWVEQDKFGKVKFAVLQTYGDTTHTLVEKMNYIGQFLPGYEAPAFMDPLLPKLPKCSLEMIDHIVGNQPDQEMVSASEWYLKNLQFHRFWSVDDTQVHTEYSSLRSIVVANYEESIKMPINEPAPGKKKSQIQEYVDYNGGAGVQHIALKTEDIITAIRHLRERGLEFLSVPSTYYKQLREKLKTAKIKVKENIDALEELKILVDYDEKGYLLQIFTKPVQDRPTLFLEVIQRHNHQGFGAGNFNSLFKAFEEEQNLRGNLTNMETNGVVPGM

SEQ ID NO: 3381 - protein, 208 aa, Homo sapiens [sequence omitted]

SEQ ID NO: 3382 - protein, 376 aa, Homo sapiens
MESYDIIANQPVVIDNGSGVIKAGFAGDQIPKYCFPNYVGRPKHMRVMAGALEGDLFIGPKAEEHRGLLTIRYPMEHGVVRDWNDMERIWQYVYSKDQLQTFSEEHPVLLTEAPLNPSKNREKAAEVFFETFNVPALFISMQAVLSLYATGRTTGVVLDSGDGVTHAVPIYEGFAMPHSIMRVDIAGRDVSRYLRLLLRKEGVDFHTSAEFEVVRTIKERACYLSINPQKDEALETEKVQYTLPDGSTLDVGPARFRAPELLFQPDLVGDESEGLHEVVAFAIHKSDMDLRRTLFANIVLSGGSTLFKGFGDRLLSEVKKLAPKDIKIKISAPQERLYSTWIGGSILASLDTFKKMWVSKKEYEEDGSRAIHRKTF

SEQ ID NO: 3383 - protein, 303 aa, Homo sapiens
MAAVHDLEMESMNLNMGREMKEELEEEEKMREDGGGKDRAKSKKVHRIVSKWMLPEKSRGTYLERANCFPPPVFIISISLAELAVFIYYAVWKPQKQWITLDTGILESPFIYSPEKREEAWRFISYMLVHAGVQHILGNLCMQLVLGIPLEMVHKGLRVGLVYLAGVIAGSLASSIFDPLRYLVGASGGVYALMGGYFMNVLVNFQEMIPAFGIFRLLIIILIIVLDMGFALYRRFFVPEDGSPVSFAAHIAGGFAGMSIGYTVFSCFDKALLKDPRFWIAIAAYLACVLFAVFFNIFLSPAN

SEQ ID NO: 3384 - protein, 950 aa, Homo sapiens
MLSSWQGGPRPRQLLLWLLILAAWETGSGQLHYSVPEEAKHGTFVGRIAQDLGLELAELVPRLFRVASKRHGDLLEVNLQNGILFVNSRIDREELCGRSAECSIHLEVIVDRPLQVFHVEVKVRDINDNPPIFPESKKRIIIAESRPPETRFPLDGASDADIGVNSALTYRLDPNDYFTLDAQNSLEQMSSLSLVLRKTLDREEIQEHSLLLTASDGGKPELTGTVQLLITILDVNDNAPEFYQSVYKVTVLENAFNGTLVIKLNATDPDDGTNGDIVYSFRRPVWPAVVYAFTINPNNGEIRTKGKLDFEEKKLYEISVEAVDKGNIPMAGHCTLLVEVLDVNDNAPEVTITSLSLPIREDTQPSAIIALISVSDRDSGSNGQVTCTLTPHVPFKLVSTYKNYYSLVLDSALDRESVSAYELVVTARDGGSPSLWATASVSVGVADVNDNAPAFAQPEYTVFVKENNPPGCHIFTVSAQDADAQENALVSYSLVERRVGERALSSYVSVHAESGKVYALQPLDHEELELLQFQVSARDSGVPPLGSNVTLQVFVLDENDNAPALLTPGAGSAGGTVSELMPRSVGAGHVVAKVRAVDADSGYNAWLSYELQLAAVGARIPFRVGLYTGEISTTRPLDEVDAPHHRLLVLVKDHGEPALTATATVLLSLVESGQAPQASSRASAGAVGPEAALVDVNVYLIIAICAVSSLLVLTLLLYTALRCSAPPTEGACAPGKPTLVCSSAAGSWSYSQQRRPRVCSGEGPHKTDLMAFSPSLPPCLGSAEGTGQREEDSECLKEPRQPNPDWRYSASLRAGMHSSVHLEEAGILRAGPGGPDQQWPTVSSATPEPEAGEVSPPVGAGVNSNSWTFKYGPGNPKQSGPGELPDKFIIPGSPAIISIRQEPTNSQIDKSDFITFGKKEETKKKKKKKKGNKTQEKKEKGNSTTDNSDQ

SEQ ID NO: 3385 - protein, 126 aa, Homo sapiens
MPEPTKSAPAPKKGSKKAVTKAQKKDGKKRKRSRKESYSVYVYKVLKQVHPDTGISSKAMGIMNSFVNDIFERIAGEASRLAHYNKRSTITSREIQTAVRLLLPGELAKHAVSEGTKAVTKYTSSK

SEQ ID NO: 3386 - protein, 249 aa, Homo sapiens
MAKSGLRQDPQSTAAATVLKRAVELDSESRYPQALVCYQEGIDLLLQVLKGTKDNTKRCNLREKISKYMDRAENIKKYLDQEKEDGKYHKQIKIEENATGFSYESLFREYLNETVTEVWIEDPYIRHTHQLYNFLRFCEMLIKRPCKVKTIHLLTSLDEGIEQVQQSRGLQEIEESLRSHGVLLEVQYSSSIHDREIRFNNGWMIKIGRGLDYFKKPQSRFSLGYCDFDLRPCHETTVDIFHKKHTKNI

SEQ ID NO: 3387 - protein, 513 aa, Homo sapiens
MKMASFLAFLLLNFRVCLLLLQLLMPHSAQFSVLGPSGPILAMVGEDADLPCHLFPTMSAETMELKWVSSSLRQVVNVYADGKEVEDRQSAPYRGRTSILRDGITAGKAALRIHNVTASDSGKYLCYFQDGDFYEKALVELKVAALGSDLHVDVKGYKDGGIHLECRSTGWYPQPQIQWSNNKGENIPTVEAPVVADGVGLYAVAASVIMRGSSGEGVSCTIRSSLLGLEKTASISIADPFFRSAQRWIAALAGTLPVLLLLLGGAGYFLWQQQEEKKTQFRKKKREQELREMAWSTMKQEQSTRVKLLEELRWRSIQYASRGERHSAYNEWKKALFKPADVILDPKTANPILLVSEDQRSVQRAKEPQDLPDNPERFNWHYCVLGCESFISGRHYWEVEVGDRKEWHIGVCSKNVQRKGWVKMTPENGFWTMGLTDGNKYRTLTEPRTNLKLPKPPKKVGVFLDYETGDISFYNAVDGSHIHTFLDVSFSEALYPVFRILTLEPTALTICPA

SEQ ID NO: 3388 - protein, 1220 aa, Homo sapiens
MGKKQKNKSEDSTKDDIDLDALAAEIEGAGAAKEQEPQKSKGKKKKEKKKQDFDEDDILKELEELSLEAQGIKADRETVAVKPTENNEEEFTSKDKKKKGQKGKKQSFDDNDSEELEDKDSKSKKTAKPKVEMYSGSDDDDDFNKLPKKAKGKAQKSNKKWDGSEEDEDNSKKIKERSRINSSGESGDESDEFLQSRKGQKKNQKNKPGPNIESGNEDDDASFKIKTVAQKKAEKKERERKKRDEEKAKLRKLKEKEELETGKKDQSKQKESQRKFEEETVKSKVTVDTGVIPASEEKAETPTAAEDDNEGDKKKKDKKKKKGEKEEKEKEKKKGPSKATVKAMQEALAKLKEEEERQKREEEERIKRLEELEAKRKEEERLEQEKRERKKQKEKERKERLKKEGKLLTKSQREARARAEATLKLLQAQGVEVPSKDSLPKKRPIYEDKKRKKIPQQLESKEVSESMELCAAVEVMEQGVPEKEETPPPVEPEEEEDTEDAGLDDWEAMASDEETEKVEGNKVHIEVKENPEEEEEEEEEEEEDEESEEEEEEEGESEGSEGDEEDEKVSDEKDSGKTLDKKPSKEMSSDSEYDSDDDRTKEERAYDKAKRRIEKRRLEHSKNVNTEKLRAPIICVLGHVDTGKTKILDKLRHTHVQDGEAGGITQQIGATNVPLEAINEQTKMIKNFDRENVRIPGMLIIDTPGHESFSNLRNRGSSLCDIAILVVDIMHGLEPQTIESINLLKSKKCPFIVALNKIDRLYDWKKSPDSDVAATLKKQKKNTKDEFEERAKAIIVEFAQQGLNAALFYENKDPRTFVSLVPTSAHTGDGMGSLIYLLVELTQTMLSKRLAHCEELRAQVMEVKALPGMGTTIDVILINGRLKEGDTIIVPGVEGPIVTQIRGLLLPPPMKELRVKNQYEKHKEVEAAQGVKILGKDLEKTLAGLPLLVAYKEDEIPVLKDELIHELKQTLNAIKLEEKGVYVQASTLGSLEALLEFLKTSEVPYAGINIGPVHKKDVMKASVMLEHDPQYAVILAFDVRIERDAQEMADSLGVRIFSAEIIYHLFDAFTKYRQDYKKQKQEEFKHIAVFPCKIKILPQYIFNSRDPIVMGVTVEAGQVKQGTPMCVPSKNFVDIGIVTSIEINHKQVDVAKKGQEVCVKIEPIPGESPKMFGRHFEATDILVSKISRQSIDALKDWFRDEMQKSDWQLIVELKKVFEII

SEQ ID NO: 3389 - protein, 510 aa, Homo sapiens
MPGGGASAASGRLLTAAEQRGSREAAGSASRSGFGGSGGGRGGASGPGSGSGGPGGPAGRMSLTPKELSSLLSIISEEAGGGSTFEGLSTAFHHYFSKADHFRLGSVLVMLLQQPDLLPSAAQRLTALYLLWEMYRTEPLAANPFAASFAHLLNPAPPARGGQEPDRPPLSGFLPPITPPEKFFLSQLMLAPPRELFKKTPRQIALMDVGNMGQSVDISGLQLALAERQSELPTQSKASFPSILSDPDPDSSNSGFDSSVASQITEALVSGPKPPIESHFRPEFIRPPPPLHICEDELAWLNPTEPDHAIQWDKSMCVKNSTGVEIKRIMAKAFKSPLSSPQQTQLLGELEKDPKLVYHIGLTPAKLPDLVENNPLVAIEMLLKLMQSSQITEYFSVLVNMDMSLHSMEVVNRLTTAVDLPPEFIHLYISNCISTCEQIKDKYMQNRLVRLVCVFLQSLIRNKIINVQDLFIEVQAFCIEFSRIREAAGLFRLLKTLDTGETPSETKMSK

SEQ ID NO: 3390 - protein, 327 aa, Homo sapiens
MLFLLLPLLAVLPGDGNADGLKEPLSFHVTWIASFYNHSWKQNLVSGWLSDLQTHTWDSNSSTIVFLCPWSRGNFSNEEWKELETLFRIRTIRSFEGIRRYAHELQFEYPFEIQVTGGCELHSGKVSGSFLQLAYQGSDFVSFQNNSWLPYPVAGNMAKHFCKVLNQNQHENDITHNLLSDTCPRFILGLLDAGKAHLQRQVKPEAWLSHGPSPGPGHLQLVCHVSGFYPKPVWVMWMRGEQEQQGTQRGDILPSADGTWYLRATLEVAAGEAADLSCRVKHSSLEGQDIVLYWEHHSSVGFIILAVIVPLLLLIGLALWFRKRCFC

SEQ ID NO: 3391 - protein, 257 aa, Homo sapiens
MEFPDLGAHCSEPSCQRLDFLPLKCDACSGIFCADHVAYAQHHCGSAYQKDIQVPVCPLCNVPVPVARGEPPDRAVGEHIDRDCRSDPAQQKRKIFTNKCERAGCRQREMMKLTCERCSRNFCIKHRHPLDHDCSGEGHPTSRAGLAAISRAQAVASTSTVPSPSQTMPSCTSPSRATTRSPSWTAPPVIALQNGLSEDEALQRALEMSLAETKPQVPSCQEEEDLALAQALSASEAEYQRQQAQSRSSKPSNCSLC

SEQ ID NO: 3392 - protein, 1359 aa, Homo sapiens
MAEAGLRGWLLWALLLRLAQSEPYTTIHQPGYCAFYDECGKNPELSGSLMTLSNVSCLSNTPARKITGDHLILLQKICPRLYTGPNTQACCSAKQLVSLEASLSITKALLTRCPACSDNFVNLHCHNTCSPNQSLFINVTRVAQLGAGQLPAVVAYEAFYQHSFAEQSYDSCSRVRVPAAATLAVGTMCGVYGSALCNAQRWLNFQGDTGNGLAPLDITFHLLEPGQAVGSGIQPLNEGVARCNESQGDDVATCSCQDCAASCPAIARPQALDSTFYLGQMPGSLVLIIILCSVFAVVTILLVGFRVAPARDKSKMVDPKKGTSLSDKLSFSTHTLLGQFFQGWGTWVASWPLTILVLSVIPVVALAAGLVFTELTTDPVELWSAPNSQARSEKAFHDQHFGPFFRTNQVILTAPNRSSYRYDSLLLGPKNFSGILDLDLLLELLELQERLRHLQVWSPEAQRNISLQDICYAPLNPDNTSLYDCCINSLLQYFQNNRTLLLLTANQTLMGQTSQVDWKDHFLYCANAPLTFKDGTALALSCMADYGAPVFPFLAIGGYKGKDYSEAEALIMTFSLNNYPAGDPRLAQAKLWEEAFLEEMRAFQRRMAGMFQVTFMAERSLEDEINRTTAEDLPIFATSYIVIFLYISLALGSYSSWSRVMVDSKATLGLGGVAVVLGAVMAAMGFFSYLGIRSSLVILQVVPFLVLSVGADNIFIFVLEYQRLPRRPGEPREVHIGRALGRVAPSMLLCSLSEAICFFLGALTPMPAVRTFALTSGLAVILDFLLQMSAFVALLSLDSKRQEASRLDVCCCVKPQELPPPGQGEGLLLGFFQKAYAPFLLHWITRGVVLLLFLALFGVSLYSMCHISVGLDQELALPKDSYLLDYFLFLNRYFEVGAPVYFVTTLGYNFSSEAGMNAICSSAGCNNFSFTQKIQYATEFPEQSYLAIPASSWVDDFIDWLTPSSCCRLYISGPNKDKFCPSTVNSLNCLKNCMSITMGSVRPSVEQFHKYLPWFLNDRPNIKCPKGGLAAYSTSVNLTSDGQVLDTVAILSPRLEYSGTISAHCNLYLLDSTSRFMAYHKPLKNSQDYTEALRAARELAANITADLRKVPGTDPAFEVFPYTITNVFYEQYLTILPEGLFMLSLCLVPTFAVSCLLLGLDLRSGLLNLLSIVMILVDTVGFMALWGISYNAVSLINLVSAVGMSVEFVSHITRSFAISTKPTWLERAKEATISMGSAVFAGVAMTNLPGILVLGLAKAQLIQIFFFRLNLLITLLGLLHGLVFLPVILSYVGPDVNPALALEQKRAEEAVAAVMVASCPNHPSRVSTADNIYVNHSFEGSIKGAGAISNFLPNNGRQF

SEQ ID NO: 3393 - protein, 114 aa, Homo sapiens
MKILVALAVFFLVSTQLFAEEIGANDDLNYWSDWYDSDQIKEELPEPFEHLLQRIARRPKPQQFFGLMGKRDAGHGQISHKRHKTDSFVGLMGKRALNSVAYERSAMQNYERRR

SEQ ID NO: 3394 - protein, 111 aa, Homo sapiens
MKILVALAVFFLVSTQLFAEEIGANDDLNYWSDWYDSDQIKEELPEPFEHLLQRIARRPKPQQFFGLMGKRDADSSIEKQVALLKALYGHGQISHKMAYERSAMQNYERRR

SEQ ID NO: 3395 - protein, 178 aa, Homo sapiens
MAGVGAGPLRAMGRQALLLLALCATGAQGLYFHIGETEKRCFIEEIPDETMVIGNYRTQMWDKQKEVFLPSTPGLGMHVEVKDPDGKVVLSRQYGSEGRFTFTSHTPGDHQICLHSNSTRMALFAGGKLYREERFRLTSESTNQRVLWWSIAQTVILILTGIWQMRHLKSFFEAKKLV

SEQ ID NO: 3396 - protein, 285 aa, Homo sapiens
MVMRPLWSLLLWEALLPITVTGAQVLSKVGGSVLLVAARPPGFQVREAIWRSLWPSEELLATFFRGSLETLYHSRFLGRAQLHSNLSLELGPLESGDSGNFSVLMVDTRGQPWTQTLQLKVYDAVPRPVVQVFIAVERDAQPSKTCQVFLSCWAPNISEITYSWRRETTMDFGMEPHSLFTDGQVLSISLGPGDRDVAYSCIVSNPVSWDLATVTPWDSCHHEAAPGKASYKDVLLVVVPVSLLLMLVTLFSAWHWCPCSGKKKKDVHADRVGPETENPLVQDLP

SEQ ID NO: 3397 - protein, 814 aa, Homo sapiens
MDAAFLLVLGLLAQSLCLSLGVPGWRRPTTLYPWRRAPALSRVRRAWVIPPISVSENHKRLPYPLVQIKSDKQQLGSVIYSIQGPGVDEEPRGVFSIDKFTGKVFLNAMLDREKTDRFRLRAFALDLGGSTLEDPTDLEIVVVDQNDNRPAFLQEAFTGRVLEGAVPGTYVTRAEATDADDPETDNAALRFSILQQGSPELFSIDELTGEIRTVQVGLDREVVAVYNLTLQVADMSGDGLTATASAIITLDDINDNAPEFTRDEFFMEAIEAVSGVDVGRLEVEDRDLPGSPNWVARFTILEGDPDGQFTIRTDPKTNEGVLSIVKALDYESCEHYELKVSVQNEAPLQAAALRAERGQAKVRVHVQDTNEPPVFQENPLRTSLAEGAPPGTLVATFSARDPDTEQLQRLSYSKDYDPEDWLQVDAATGRIQTQHVLSPASPFLKGGWYRAIVLAQDDASQPRTATGTLSIEILEVNDHAPVLAPPPPGSLCSEPHQGPGLLLGATDEDLPPHGAPFHFQLSPRLPELGRNWSLSQVNVSHARLRPRHQVPEGLHRLSLLLRDSGQPPQQREQPLNVTVCRCGKDGVCLPGAAALLAGGTGLSLGALVIVLASALLLLVLVLLVALRARFWKQSRGKGLLHGPQDDLRDNVLNYDEQGGGEEDQDAYDISQLRHPTALSLPLGPPPLRRDAPQGRLHPQPPRVLPTSPLDIADFINDGLEAADSDPSVPPYDTALIYDYEGDGSVAGTLSSILSSQGDEDQDYDYLRDWGPRFARLADMYGHPCGLEYGARWDHQAREGLSPGALLPRHRGRTA

SEQ ID NO: 3398 - protein, 424 aa, Homo sapiens
MGSSSLSEDYRQCLERELRRGRAGVCGDPSLRAVLWQILVEDFDLHGALQDDALALLTDGLWGRADLAPALRGLARAFELLELAAVHLYLLPWRKEFTTIKTFSGGYVHVLKGVLSDDLLLKSFQKMGYVRRDSHRLMVTALPPACQLVQVALGCFALRLECEILGEVLAQLGTSVLPAEELLQARRASGDVASCVAWLQQRLAQDEEPPPLPPRGSPAAYRAPLDLYRDLQEDEGSEDASLYGEPSPGPDSPPAELAYRPPLWEQSAKLWGTGGRAWEPPAEELPQASSPPYGALEEGLEPEPSAFSFLSLRRELSRPGDLATPESSAAASPRRIRAEGVPASAYRSVSEPPGYQAHSCLSPGALPTLCCDTCRQLHAAHCAALPACRPGHSLRVLLGDAQRRLWLQRAQMDTLLYNSPGARP

SEQ ID NO: 3399 - protein, 1215 aa, Homo sapiens
MPGLLNWITGAALPLTASDVTSCVSGYALGLTASLTYGNLEAQPFQGLFVYPLDECTTVIGFEAVIADRVVTVQIKDKAKLESGHFDASHVRSPTVTGNILQDGVSIAPHSCTPGKVTLDEDLERILFVANLGTIAPMENVTIFISTSSELPTLPSGAVRVLLPAVCAPTVPQFCTKSTGTSNQQAQGKDRHCFGAWAPGSWNKLCLATLLNTEVSNPMEYEFNFQLEIRGPCLLAGVESPTHEIRADAAPSARSAKSIIITLANKHTFDRPVEILIHPSEPHMPHVLIEKGDMTLGEFDQHLKGRTDFIKGMKKKSRAERKTEIIRKRLHKDIPHHSVIMLNFCPDLQSVQPCLRKAHGEFIFLIDRSSSMSGISMHRVKDAMLVALKSLMPACLFNIIGFGSTFKSLFPSSQTYSEDSLAMACDDIQRMKADMGGTNILSPLKWVIRQPVHRGHPRLLFVITDGAVNNTGKVLELVRNHAFSTRCYSFGIGPNVCHRLVKGLASVSEGSAELLMEGERLQPKMVKSLKKAMAPVLSDVTVEWIFPETTEVLVSPVSASSLFPGERLVGYGIVCDASLHISNPRSDKRRRYSMLHSQESGSSVFYHSQDDGPGLEGGDCAKNSGAPFILGQAKNARLASGDSTTKHDLNLSQRRRAYSTNQITNHKPLPRATMASDPMPAAKRYPLRKARLQDLTNQTSLDVQRWQIDLQPLLNSGQDLNQGPKLRGPGARRPSLLPQGCQPFLPWGQETQAWSPVRERTSDSRSPGDLEPSHHPSAFETETSSDWDPPAESQERASPSRPATPAPVLGKALVKGLHDSQRLQWEVSFELGTPGPERGGAQDADLWSETFHHLAARAIIRDFEQLAEREGEIEQGSNRRYQVSALHTSKACNIISKYTAFVPVDVSKSRYLPTVVEYPNSGAALRMLGSRALAQQWRGTSSGFGRPQTMLGEDSAPGNDMEASPTALFSEARSPGREKHGASEGPQRSLATNTLSSMKASENLFGSWLNLNKSRLLTRAAKGFLSKPLIKAVESTSGNQSFDYIPLVSLQLASGAFLLNEAFCEATHIPMEKLKWTSPFTCHRVSLTTRPSESKTPSPQLCTSSPPRHPSCDSFSLEPLAKGKLGLEPRAVVEHTGKLWATVVGLAWLEHSSASYFTEWELVAAKANSWLEQQEVPEGRTQGTLKAAARQLFVLLRHWDENLEFNMLCYNPNYV

SEQ ID NO: 3400 - protein, 565 aa, Homo sapiens
MPQASEHRLGRTREPPVNIQPRVGSKLPFAPRARSKERRNPASGPNPMLRPLPPRPGLPDERLKKLELGRGRTSGPRPRGPLRADHGVPLPGSPPPTVALPLPSRTNLARSKSVSSGDLRPMGIALGGHRGTGELGAALSRLALRPEPPTLRRSTSLRRLGGFPGPPTLFSIRTEPPASHGSFHMISARSSEPFYSDDKMAHHTLLLGSGHVGLRNLGNTCFLNAVLQCLSSTRPLRDFCLRRDFRQEVPGGGRAQELTEAFADVIGALWHPDSCEAVNPTRFRAVFQKYVPSFSGYSQQDAQEFLKLLMERLHLEINRRGRRAPPILANGPVPSPPRRGGALLEEPELSDDDRANLMWKRYLEREDSKIVDLFVGQLKSCLKCQACGYRSTTFEVFCDLSLPIPKKGFAGGKVSLRDCFNLFTKEEELESENAPVCDRCRQKTRSTKKLTVQRFPRILVLHLNRFSASRGSIKKSSVGVDFPLQRLSLGDFASDKAGSPVYQLYALCNHSGSVHYGHYTALCRCQTGWHVYNDSRVSPVSENQVASSEGYVLFYQLMQEPPRCL

SEQ ID NO: 3401 - protein, 748 aa, Homo sapiens
MIPAASSTPPGDALFPSVAPQDFWRSQVTGYSGSVTRHLSHRANNFKRHPKRRKCIRPSPPPPPNTPCPLELVDFGDLHPQRSFRELLFNGCILFGIEFSYAMETAYVTPVLLQMGLPDQLYSLVWFISPILGFLLQPLLGAWSDRCTSRFGRRRPFILVLAIGALLGLSLLLNGRDIGIALADVTGNHKWGLLLTVCGVVLMDFSADSADNPSHAYMMDVCSPADQDRGLNIHALLAGLGGGFGYVVGGIHWDKTGFGRALGGQLRVIYLFTAVTLSVTTVLTLVSIPERPLRPPSEKRAAMKSPSLPLPPSPPVLPEEGPGDSLPSHTATNFSSPISPPSPLTPKYGSFISRDSSLTGISEFASSFGTANIDSVLIDCFTGGHDSYLAIPGSVPRPPISVSFPRAPDGFYRQDRGLLEGREGALTSGCDGDILRVGSLDTSKPRSSGILKRPQTLAIPDAAGGGGPETSRRRNVTFSQQVANILLNGVKYESELTGSSERAEQPLSVGRLCSTICNMPKALRTLCVNHFLGWLSFEGMLLFYTDFMGEVVFQGDPKAPHTSEAYQKYNSGVTMGCWGMCIYAFSAAFYSAILEKLEEFLSVRTLYFIAYLAFGLGTGLATLSRNLYVVLSLCITYGILFSTLCTLPYSLLCDYYQSKKFAGSSADGTRRGMGVDISLLSCQYFLAQILVSLVLGPLTSAVGSANGVMYFSSLVSFLGCLYSSLFVIYEIPPSDAADEEHRPLLLNV

SEQ ID NO: 3402 - protein, 86 aa, Homo sapiens
MIPAVVLLLLLLVEQAAALGEPQLCYILDAILFLYGIVLTLLYCRLKIQVRKAAITSYEKSDGVYTGLSTRNQETYETLKHEKPPQ

SEQ ID NO: 3403 - protein, 743 aa, Homo sapiens
MLSRLGALLQEAVGAREPSIDLLQAFVEHWKGITHYYIESTDESTPAKKTDIPWRLKQMLDILVYEEQQQAAAGEAGPCLEYLLQHKILETLCTLGKAEYPPGMRQQVFQFFSKVLAQVQHPLLHYLSVHRPVQKLLRLGGTASGSVTEKEEVQFTTVLCSKIQQDPELLAYILEGKKIVGRKKACGEPTALPKDTTSHGDKDCSHDGAPARPQLDGESCGAQALNSHMPAETEELDGGTTESNLITSLLGLCQSKKSRVALKAQENLLLLVSMASPAAATYLVQSSACCPAIVRHLCQLYRSMPVFLDPADIATLEGISWRLPSAPSDEASFPGKEALAAFLGWFDYCDHLITEAHTVVADALAKAVAENFFVETLQPQLLHVSEQSILTSTALLTAMLRQLRSPALLREAVAFLLGTDRQPEAPGDNPHTLYAHLIGHCDHLSDEISITTLRLFEELLQKPHEGIIHSLVLRNLEGRPYVAWGSPEPESYEDTLDLEEDPYFTDSFLDSGFQTPAKPRLAPATSYDGKTAVTEIVNSFLCLVPEEAKTSAFLEETGYDTYVHDAYGLFQECSSRVASWGWPLTPTPLDPHEPERPFFEGHFLRVLFDRMSRILDQPYSLNLQVTSVLSRLALFPHPHIHEYLLDPYISLAPGCRSLFSVLVRVIGDLMQRIQRVPQFPGKLLLVRKQLTGQAPGEQLDHQTLLQGVVVLEEFCKELAAIAFVKFPPHDPRQNVSPAPEGQV

SEQ ID NO: 3404 - protein, 492 aa, Homo sapiens
MKLLLLHPAFQSCLLLTLLGLWRTTPEAHASSLGAPAISAASFLQDLIHRYGEGDSLTLQQLKALLNHLDVGVGRGNVTQHVQGHRNLSTCFSSGDLFTAHNFSEQSRIGSSELQEFCPTILQQLDSRACTSENQENEENEQTEEGRPSAVEVWGYGLLCVTVISLCSLLGASVVPFMKKTFYKRLLLYFIALAIGTLYSNALFQLIPEAFGFNPLEDYYVSKSAVVFGGFYLFFFTEKILKILLKQKNEHHHGHSHYASESLPSKKDQEEGVMEKLQNGDLDHMIPQHCSSELDGKAPMVDEKVIVGSLSVQDLQASQSACYWLKGVRYSDIGTLAWMITLSDGLHNFIDGLAIGASFTVSVFQGISTSVAILCEEFPHELGDFVILLNAGMSIQQALFFNFLSACCCYLGLAFGILAGSHFSANWIFALAGGMFLYISLADMFPEMNEVCQEDERKGSILIPFIIQNLGLLTGFTIMVVLTMYSGQIQIG

SEQ ID NO: 3405 - protein, 458 aa, Homo sapiens
MLPDFMLVLIVLGIPSSATTGFNSIAENEDALLRHLFQGYQKWVRPVLHSNDTIKVYFGLKISQLVDVDEKNQLMTTNVWLKQEWTDHKLRWNPDDYGGIHSIKVPSESLWLPDIVLFENADGRFEGSLMTKVIVKSNGTVVWTPPASYKSSCTMDVTFFPFDRQNCSMKFGSWTYDGTMVDLILINENVDRKDFFDNGEWEILNAKGMKGNRRDGVYSYPFITYSFVLRRLPLFYTLFLIIPCLGLSFLTVLVFYLPSDEGEKLSLSTSVLVSLTVFLLVIEEIIPSSSKVIPLIGEYLLFIMIFVTLSIIVTVFVINVHHRSSSTYHPMAPWVKRLFLQKLPKLLCMKDHVDRYSSPEKEESQPVVKGKVLEKKKQKQLSDGEKVLVAFLEKAADSIRYISRHVKKEHFISQVVQDWKFVAQVLDRIFLWLFLIVSVTGSVLIFTPALKMWLHSYH

SEQ ID NO: 3406 - protein, 502 aa, Homo sapiens
MSGRRFHLSTTDRVIKAVPFPPTQRLTFKEVFENGKPKVDVLKNHLVKEGRLEEEVALKIINDGAAILRQEKTMIEVDAPITVCGDIHGQFFDLMKLFEVGGSPSNTRYLFLGDYVDRGYFSIECVLYLWSLKINHPKTLFLLRGNHECRHLTDYFTFKQECRIKYSEQVYDACMETFDCLPLAALLNQQFLCVHGGMSPEITSLDDIRKLDRFTEPPAFGPVCDLLWSDPSEDYGNEKTLEHYTHNTVRGCSYFYSYPAVCEFLQNNNLLSIIRAHEAQDAGYRMYRKSQATGFPSLITIFSAPNYLDVYNNKAAVLKYENNVMNIRQFNCSPHPYWLPNFMDVFTWSLPFVGEKVTEMLVNVLNICSDDELISDDEAEGSTTVRKEIIRNKIRAIGKMARVFSILRQESESVLTLKGLTPTGTLPLGVLSGGKQTIETAIRGFSLQHKIRSFEEARGLDRINERMPPRKDSIHAGGPMKSVTSAHSHAAHRSDQGKKAHS

SEQ ID NO: 3407 - protein, 881 aa, Homo sapiens
MKKQFNRMKQLANQTVGRAEKTEVLSEDLLQIERRLDTVRSICHHSHKRLVACFQGQHGTDAERRHKKLPLTALAQNMQEASTQLEDSLLGKMLETCGDAENQLALELSQHEVFVEKEIVDPLYGIAEVEIPNIQKQRKQLARLVLDWDSVRARWNQAHKSSGTNFQGLPSKIDTLKEEMDEAGNKVEQCKDQLAADMYNFMAKEGEYGKFFVTLLEAQADYHRKALAVLEKTLPEMRAHQDKWAEKPAFGTPLEEHLKRSGREIALPIEACVMLLLETGMKEEGLFRIGAGASKLKKLKAALDCSTSHLDEFYSDPHAVAGALKSYLRELPEPLMTFNLYEEWTQVASVQDQDKKLQDLWRTCQKLPPQNFVNFRYLIKFLAKLAQTSDVNKMTPSNIAIVLGPNLLWARNEGTLAEMAAATSVHVVAVIEPIIQHADWFFPEEVEFNVSEAFVPLTTPSSNHSFHTGNDSDSGTLERKRPASMAVMEGDLVKKESFGVKLMDFQAHRRGGTLNRKHISPAFQPPLPPTDGSTVVPAGPEPPPQSSRAESSSGGGTVPSSAGILEQGPSPGDGSPPKPKDPVSAAVPAPGRNNSQIASGQNQPQAAAGSHQLSMGQPHNAAGPSPHTLRRAVKKPAPAPPKPGNPPPGHPGGQSSSGTSQHPPSLSPKPPTRSPSPPTQHTGQPPGQPSAPSQLSAPRRYSSSLSPIQAPNHPPPQPPTQATPLMHTKPNSQGPPNPMALPSEHGLEQPSHTPPQTPTPPSTPPLGKQNPSLPAPQTLAGGNPETAQPHAGTLPRPRPVPKPRNRPSVPPPPQPPGVHSAGDSSLTNTAPTASKIVTDSNSRVSEPHRSIFPEMHSDSASKDVPGRILLDIDNDTESTAL

SEQ ID NO: 3408 - protein, 357 aa, Homo sapiens
MRPPPALALAGLCLLALPAAAASYFGLTGREVLTPFPGLGTAAAPAQGGAHLKQCDLLKLSRRQKQLCRREPGLAETLRDAAHLGLLECQFQFRHERWNCSLEGRMGLLKRGFKETAFLYAVSSAALTHTLARACSAGRMERCTCDDSPGLESRQAWQWGVCGDNLKYSTKFLSNFLGSKRGNKDLRARADAHNTHVGIKAVKSGLRTTCKCHGVSGSCAVRTCWKQLSPFRETGQVLKLRYDSAVKVSSATNEALGRLELWAPARQGSLTKGLAPRSGDLVYMEDSPSFCRPSKYSPGTAGRVCSREASCSSLCCGRGYDTQSRLVAFSCHCQVQWCCYVECQQCVQEELVYTCKH

SEQ ID NO: 3409 - protein, 2334 aa, Homo sapiens
MQPPPQTVPSGMAGPPPAGNPRSVFWASSPYRRRANNNAAVAPTTCPLQPVTDPFAFSRQALQSTPLGSSSKSSPPVLQGPAPAGFSQHPGLLVPHTHARDSSQGPCEPLPGPLTQPRAHASPFSGALTPSAPPGPEMNRSAEVGPSSEPEVQTLPYLPHYIPGVDPETSHGGHPHGNMPGLDRPLSRQNPHDGVVTPAASPSLPQPGLQMPGQWGPVQGGPQPSGQHRSPCPEGPVPSGVPCATSVPHFPTPSILHQGPGHEQHSPLVAPPAALPSDGRDEVSHLQSGSHLANNSDPESTFRQNPRIVNHWASPELRQNPGVKNEHRPASALVNPLARGDSPENRTHHPLGAGAGSGCAPLEADSGASGALAMFFQGGETENEENLSSEKAGLSGQADFDDFCSSPGLGRPPAPTHVGAGSLCQALLPGPSNEAAGDVWGDTASTGVPDASGSQYENVENLEFVQNQEVLPSEPLNLDPSSPSDQFRYGPLPGPAVPRHGAVCHTGAPDATLHTVHPDSVSSSYSSRSHGRLSGSARPQELVGTFIQQEVGKPEDEASGSFFKQIDSSPVGGETDETTVSQNYRGSVSQPSTPSPPKPTGIFQTSANSSFEPVKSHLVGVKPFEADRANVVGEVRETCVRQKQCRPAAALPDASPGNLEQPPDNMETLCAPQVCPLPLNSTTEAVHMLPHAGAPPLDTVYPAPEKRPSARTQGPVKCESPATTLWAQSELPDFGGNVLLAPAAPALYVCAKPQPPVVQPPEEAMSGQQSRNPSSAAPVQSRGGIGASENLENPPKMGEEEALQSQASSGYASLLSSPPTESLQNPPVLIAQPDHSYNLAQPINFSVSLSNSHEKNQSWREALVGDRPAVSSWALGGDSGENTSLSGIPTSSVLSLSLPSSVAQSNFPQGSGASEMVSNQPANLLVQPPSQPVPENLVPESQKDRKAGSALPGFANSPAGSTSVVLVPPAHGTLVPDGNKANHSSHQEDTYGALDFTLSRTLENPVNVYNPSHSDSLASQQSVASHPRQSGPGAPNLDRFYQQVTKDAQGQPGLERAQQELVPPQQQASPPQLPKAMFSELSNPESLPAQGQAQNSAQSPASLVLVDAGQQLPPRPPQSSSVSLVSSGSGQAAVPSEQPWPQPVPALAPGPPPQDLAAYYYYRPLYDAYQPQYSLPYPPEPGAASLYYQDVYSLYEPRYRPYDGAASAYAQNYRYPEPERPSSRASHSSERPPPRQGYPEGYYSSKSGWSSQSDYYASYYSSQYDYGDPGHWDRYHYSARVRDPRTYDRRYWCDAEYDAYRREHSAFGDRPEKRDNNWRYDPRFTGSFDDDPDPHRDPYGEEVDRRSVHSEHSARSLHSAHSLASRRSSLSSHSHQSQIYRSHNVAAGSYEAPLPPGSFHGDFAYGTYRSNFSSGPGFPEYGYPADTVWPAMEQVSSRPTSPEKFSVPHVCARFGPGGQLIKVIPNLPSEGQPALVEVHSMEALLQHTSEQEEMRAFPGPLAKDDTHKVDVINFAQNKAMKCLQNENLIDKESASLLWNFIVLLCRQNGTVVGTDIAELLLRDHRTVWLPGKSPNEANLIDFTNEAVEQVEEEESGEAQLSFLTGGPAAAASSLERETERFRELLLYGRKKDALESAMKNGLWGHALLLASKMDSRTHARVMTRFANSLPINDPLQTVYQLMSGRMPAASTCCGDEKWGDWRPHLAMVLSNLNNNMDVESRTMATMGDTLASRGLLDAAHFCYLMAQAGFGVYTKKTTKLVLIGSNHSLPFLKFATNEAIQRTEAYEYAQSLGAETCPLPSFQVFKFIYSCRLAEMGLATQAFHYCEAIAKSILTQPHLYSPVLISQLVQMASQLRLFDPQLKEKPEEESLAAPTWLVHLQQVERQIKEGAGVWHQDGALPQQCPGTPSSEMEQLDRPGLSQPGALGIANPLLAVPAPSPEHSSPSVRLLPSAPQTLPDGPLASPARVPMFPVPLPPGPLEPGPGCVTPGPALGFLEPSGPGLPPGVPPLQERRHLLQEARSPDPGIVPQEAPVGNSLSELSEENFDGKFANLTPSRTVPDSEAPPGWDRADSGPTQPPLSLSPAPETKRPGQAAKKETKEPKKGESWFFRWLPGKKKTEAYLPDDKNKSIVWDEKKNQWVNLNEPEEEKKAPPPPPTSMPKTVQAAPPALPGPPGAPVNMYSRRAAGTRARYVDVLNPSGTQRSEPALAPADFVAPLAPLPIPSNLFVPTPVSSVRPQGRSGRNDGLLALSSPDAEEPQLPDGTGREGPAAARGLANPEPAPEPKAPGDLPAAGGPPSGAMPFYNPAQLAQACATSGSSRLGRIGQRKHLVLN

SEQ ID NO: 3410 - protein, 270 aa, Homo sapiens
MMLRLLSSLLLVAVASGYGPPSSHSSSRVVHGEDAVPYSWPWQVSLQYEKSGSFYHTCGGSLIAPDWVVTAGHCISRDLTYQVVLGEYNLAVKEGPEQVIPINSEELFVHPLWNRSCVACGNDIALIKLSRSAQLGDAVQLASLPPAGDILPNKTPCYITGWGRLYTNGPLPDKLQQARLPVVDYKHCSRWNWWGSTVKKTMVCAGGYIRSGCNGDSGGPLNCPTEDGGWQVHGVTSFVSAFGCNFIWKPTVFTRVSAFIDWIEETIASH

SEQ ID NO: 3411 - protein, 233 aa, Homo sapiens
MAGVRSLRCSRGCAGGCECGDKGKCSDSSLLGKRLSEDSSRHQLLQKWASMWSSMSEDASVADMERAQLEEEAAAAEERPLVFLCSGCRRPLGDSLSWVASQEDTNCILLRCVSCNVSVDKEQKLSKREKENGCVLETLCCAGCSLNLGYVYRCTPKNLDYKRDLFCLSVEAIESYVLGSSEKQIVSEDKELFNLESRVEIEKSLTQMEDVLKALQMKLWEAESKLSFATCKS

SEQ ID NO: 3412 - protein, 290 aa, Homo sapiens
MVLLHVKRGDESQFLLQAPGSTELEELTVQVARVYNGRLKVQRLCSEMEELAEHGIFLPPNMQGLTDDQIEELKLKDEWGEKCVPSGGAVFKKDDIGRRNGQAPNEKMKQVLKKTIEEAKAIISKKQVEAGVCVTMEMVKDALDQLRGAVMIVYPMGLPPYDPIRMEFENKEDLSGTQAGLNVIKEAEAQLWWAAKELRRTKKLSDYVGKNEKTKIIAKIQQRGQGAPAREPIISSEEQKQLMLYYHRRQEELKRLEENDDDAYLNSPWADNTALKRHFHGVKDIKWRPR

SEQ ID NO: 3413 - protein, 876 aa, Homo sapiens
MELITILEKTVSPDRLELEAAQKFLERAAVENLPTFLVELSRVLANPGNSQVARVAAGLQIKNSLTSKDPDIKAQYQQRWLAIDANARREVKNYVLQTLGTETYRPSSASQCVAGIACAEIPVNQWPELIPQLVANVTNPNSTEHMKESTLEAIGYICQDIDPEQLQDKSNEILTAIIQGMRKEEPSNNVKLAATNALLNSLEFTKANFDKESERHFIMQVVCEATQCPDTRVRVAALQNLVKIMSLYYQYMETYMGPALFAITIEAMKSDIDEVALQGIEFWSNVCDEEMDLAIEASEAAEQGRPPEHTSKFYAKGALQYLVPILTQTLTKQDENDDDDDWNPCKAAGVCLMLLATCCEDDIVPHVLPFIKEHIKNPDWRYRDAAVMAFGCILEGPEPSQLKPLVIQAMPTLIELMKDPSVVVRDTAAWTVGRICELLPEAAINDVYLAPLLQCLIEGLSAEPRVASNVCWAFSSLAEAAYEAADVADDQEEPATYCLSSSFELIVQKLLETTDRPDGHQNNLRSSAYESLMEIVKNSAKDCYPAVQKTTLVIMERLQQVLQMESHIQSTSDRIQFNDLQSLLCATLQNVLRKVQHQDALQISDVVMASLLRMFQSTAGSGGVQEDALMAVSTLVEVLGGEFLKYMEAFKPFLGIGLKNYAEYQVCLAAVGLVGDLCRALQSNIIPFCDEVMQLLLENLGNENVHRSVKPQILSVFGDIALAIGGEFKKYLEVVLNTLQQASQAQVDKSDYDMVDYLNELRESCLEAYTGIVQGLKGDQENVHPDVMLVQPRVEFILSFIDHIAGDEDHTDGVVACAAGLIGDLCTAFGKDVLKLVEARPMIHELLTEGRRSKTNKAKTLATWATKELRKLKNQA

SEQ ID NO: 3414 - protein, 351 aa, Homo sapiens
MSPRSCLRSLRLLVFAVFSAAASNWLYLAKLSSVGSISEEETCEKLKGLIQRQVQMCKRNLEVMDSVRRGAQLAIEECQYQFRNRRWNCSTLDSLPVFGKVVTQGTREAAFVYAISSAGVAFAVTRACSSGELEKCGCDRTVHGVSPQGFQWSGCSDNIAYGVAFSQSFVDVRERSKGASSSRALMNLHNNEAGRKAILTHMRVECKCHGVSGSCEVKTCWRAVPPFRQVGHALKEKFDGATEVEPRRVGSSRALVPRNAQFKPHTDEDLVYLEPSPDFCEQDMRSGVLGTRGRTCNKTSKAIDGCELLCCGRGFHTAQVELAERCSCKFHWCCFVKCRQCQRLVELHTCR

SEQ ID NO: 3415 - protein, 815 aa, Homo sapiens
MFRKARRVNVRKRNDSEEEERERDEEQEPPPLLPPPGTGEEAGPGGGDRAPGGESLLGPGPSPPSALTPGLGAEAGGGFPGGAEPGNGLKPRKRPRENKEVPRASLLSFQDEEEENEEVFKVKKSSYSKKIVKLLKKEYKEDLEKSKIKTELNSSAESEQPLDKTGHVKDTNQEDGVIISEHGEDEMDMESEKEEEKPKTGGAFSNALSSLNVLRPGEIPDAAFIHAARKKRQMARELGDFTPHDNEPGKGRLVREDENDASDDEDDDEKRRIVFSVKEKSQRQKIAEEIGIEGSDDDALVTGEQDEELSRWEQEQIRKGINIPQVQASQPAEVNMYYQNTYQTMPYGSSYGIPYSYTAYGSSDAKSQKTDNTVPFKTPSNEMTPVTIDLVKKQLKDRLDSMKELHKTNRQQHEKHLQSRVDSTRAIERLEGSSGGIGERYKFLQEMRGYVQDLLECFSEKVPLINELESAIHQLYKQRASRLVQRRQDDIKDESSEFSSHSNKALMAPNLDSFGRDRALYQEHAKRRIAEREARRTRRRQAREQTGKMADHLEGLSSDDEETSTDITNFNLEKDRISKESGKVFEDVLESFYSIDCIKSQFEAWRSKYYTSYKDAYIGLCLPKLFNPLIRLQLLTWTPLEAKCRDFENMLWFESLLFYGCEEREQEKDDVDVALLPTIVEKVILPKLTVIAENMWDPFSTTQTSRMVGITLKLINGYPSVVNAENKNTQVYLKALLLRMRRTLDDDVFMPLYPKNVLENKNSGPYLFFQRQFWSSVKVIKPPFQRGSCPIPRRKECCSERPRRIWTDRPCVVFS

SEQ ID NO: 3416 - protein, 325 aa, Homo sapiens
MAWSLGSWLGGCLLVSALGMVPPPENVRMNSVNFKNILQWESPAFAKGNLTFTAQYLSYRIFQDKCMNTTLTECDFSSLSKYGDHTLRVRAEFADEHSDWVNITFCPVDDTIIGPPGMQVEVLADSLHMRFLAPKIENEYETWTMKNVYNSWTYNVQYWKNGTDEKFQITPQYDFEVLRNLEPWTTYCVQVRGFLPDRNKAGEWSEPVCEQTTHDETVPSWMVAVILMASVFMVCLALLGCFALLWCVYKKTKYAFSPRNSLPQHLKEFLGHPHHNTLLFFSFPLSDENDVFDKLSVIAEDSESGKQNPGDSCSLGTPPGQGPQS

SEQ ID NO: 3417 - protein, 271 aa, Homo sapiens
MISAHCNLHLPGSSDSPASASQVAGITGRLPTLQTVRYGSKAVTRHRRVMHFQRQKLMAVTEYIPPKPAIHPSCLPSPPSPPQEEIGLIRLLRREIAAVFQDNRMIAVCQNVALSAEDKLLMRHQLRKHKILMKVFPNQVLKPFLEDSKYQNLLPLFVGHNMLLVSEEPKVKEMVRILRTVPFLPLLGGCIDDTILSRQGFINYSKLPSLPLVQGELVGGLTCLTAQTHSLLQHQPLQLTTLLDQYIREQREKDSVMSANGKPDPDTVPDS

SEQ ID NO: 3418 - protein, 425 aa, Homo sapiens
MASSSPDSPCSCDCFVSVPPASAIPAVIFAKNSDRPRDEVQEVVFVPAGTHTPGSRLQCTYIEVEQVSKTHAVILSRPSWLWGAEMGANEHGVCIGNEAVWTKEPVGEGEALLGMDLLRLALERSSSAQEALHVITGLLEHYGQGGNCLEDAAPFSYHSTFLLADRTEAWVLETAGRLWAAQRIQEGARNISNQLSIGTDISAQHPELRTHAQAKGWWDGQGAFDFAQIFSLTQQPVRMEAAKARFQAGRELLRQRQGGITAEVMMGILRDKESGICMDSGGFRTTASMVSVLPQDPTQPCVHFLTATPDPSRSVFKPFIFGMGVAQAPQVLSPTFGAQDPVRTLPRFQTQVDRRHTLYRGHQAALGLMERDQDRGQQLQQKQQDLEQEGLEATQGLLAGEWAPPLWELGSLFQAFVKRESQAYA

SEQ ID NO: 3419 - protein, 337 aa, Homo sapiens
MRPTLLWSLLLLLGVFAAAAAAPPDPLSQLPAPQHPKIRLYNAEQVLSWEPVALSNSTRPVVYQVQFKYTDSKWFTADIMSIGVNCTQITATECDFTAASPSAGFPMDFNVTLRLRAELGALHSAWVTMPWFQHYRNVTVGPPENIEVTPGEGSLIIRFSSPFDIADTSTAFFCYYVHYWEKGGIQQVKGPFRSNSISLDNLKPSRVYCLQVQAQLLWNKSNIFRVGHLSNISCYETMADASTELQQVILISVGTFSLLSVLAGACFFLVLKYRGLIKYWFHTPPSIPLQIEEYLKDPTQPILEALDKDSSPKDDVWDSVSIISFPEKEQEDVLQTL

SEQ ID NO: 3420 - protein, 720 aa, Homo sapiens
MPPPSDIVKVAIEWPGANAQLLEIDQKRPLASIIKEVCDGWSLPNPEYYTLRYADGPQLYITEQTRSDIKNGTILQLAISPSRAARQLMERTQSSNMETRLDAMKELAKLSADVTFATEFINMDGIIVLTRLVESGTKLLSHYSEMLAFTLTAFLELMDHGIVSWDMVSITFIKQIAGYVSQPMVDVSILQRSLAILESMVLNSQSLYQKIAEEITVGQLISHLQVSNQEIQTYAIALINALFLKAPEDKRQDMANAFAQKHLRSIILNHVIRGNRPIKTEMAHQLYVLQVLTFNLLEERMMTKMDPNDQAQRDIIFELRRIAFDAESDPSNAPGSGTEKRKAMYTKDYKMLGFTNHINPAMDFTQTPPGMLALDNMLYLAKVHQDTYIRIVLENSSREDKHECPFGRSAIELTKMLCEILQVGELPNEGRNDYHPMFFTHDRAFEELFGICIQLLNKTWKEMRATAEDFNKVMQVVREQITRALPSKPNSLDQFKSKLRSLSYSEILRLRQSERMSQDDFQSPPIVELREKIQPEILELIKQQRLNRLCEGSSFRKIGNRRRQERFWYCRLALNHKVLHYGDLDDNPQGEVTFESLQEKIPVADIKAIVTGKDCPHMKEKSALKQNKEVLELAFSILYDPDETLNFIAPNKYEYCIWIDGLSALLGKDMSSELTKSDLDTLLSMEMKLRLLDLENIQIPEAPPPIPKEPSSYDFVYHYG

SEQ ID NO: 3421 - protein, 247 aa, Homo sapiens
MLQNSAVLLVLVISASATHEAEQNDSVSPRKSRVAAQNSAEVVRCLNSALQVGCGAFACLENSTCDTDGMYDICKSFLYSAAKFDTQGKAFVKESLKCIANGVTSKVFLAIRRCSTFQRMIAEVQEECYSKLNVCSIAKRNPEAITEVVQLPNHFSNRYYNRLVRSLLECDEDTVSTIRDSLMEKIGPNMASLFHILQTDHCAQTHPRADFNRRRTNEPQKLKVLLRNLRGEEDSPSHIKRTSHESA

SEQ ID NO: 3422 - protein, 677 aa, Homo sapiens
MDDPDCDSTWEEDEEDAEDAEDEDCEDGEAAGARDADAGDEDEESEEPRAARPSSFQSRMTGSRNWRATRDMCRYRHNYPDLVERDCNGDTPNLSFYRNEIRFLPNGCFIEDILQNWTDNYDLLEDNHSYIQWLFPLREPGVNWHAKPLTLREVEVFKSSQEIQERLVRAYELMLGFYGIRLEDRGTGTVGRAQNYQKRFQNLNWRSHNNLRITRILKSLGELGLEHFQAPLVRFFLEETLVRRELPGVRQSALDYFMFAVRCRHQRRQLVHFAWEHFRPRCKFVWGPQDKLRRFKPSSLPHPLEGSRKVEEEGSPGDPDHEASTQGRTCGPEHSKGGGRVDEGPQPRSVEPQDAGPLERSQGDEAGGHGEDRPEPLSPKESKKRKLELSRREQPPTEPGPQSASEVEKIALNLEGCALSQGSLRTGTQEVGGQDPGEAVQPCRQPLGARVADKVRKRRKVDEGAGDSAAVASGGAQTLALAGSPAPSGHPKAGHSENGVEEDTEGRTGPKEGTPGSPSETPGPSPAGPAGDEPAESPSETPGPRPAGPAGDEPAESPSETPGPRPAGPAGDEPAESPSETPGPSPAGPTRDEPAESPSETPGPRPAGPAGDEPAESPSETPGPRPAGPAGDEPAESPSETPGPSPAGPTRDEPAKAGEAAELQDAEVESSAKSGKP

SEQ ID NO: 3423 - protein, 213 aa, Homo sapiens
MAAPAVSGLSRQVRCFSTSVVRPFAKLVRPPVQVYGIEGRYATALYSAASKQNKLEQVEKELLRVAQILKEPKVAASVLNPYVKRSIKVKSLNDITAKERFSPLTTNLINLLAENGRLSNTQGVVSAFSTMMSVHRGEVPCTVTSASPLEEATLSELKTVLKSFLSQGQVLKLEAKTDPSILGGMIVRIGEKYVDMSVKTKIQKLGRAMREIV

SEQ ID NO: 3424 - protein, 686 aa, Homo sapiens
MAEAAEPEGVAPGPQGPPEVPAPLAERPGEPGAAGGEAEGPEGSEGAEEAPRGAAAVKEAGGGGPDRGPEAEARGTRGAHGETEAEEGAPEGAEVPQGGEETSGAQQVEGASPGRGAQGEPRGEAQREPEDSAAPERQEEAEQRPEVPEGSASGEAGDSVDAEGPLGDNIEAEGPAGDSVEAEGRVGDSVDAEGPAGDSVDAEGPLGDNIQAEGPAGDSVDAEGRVGDSVDAEGPAGDSVDAEGRVGDSVEAGDPAGDGVEAGVPAGDSVEAEGPAGDSMDAEGPAGRARRVSGEPQQSGDGSLSPQAEAIEVAAGESAGRSPGELAWDAAEEAEVPGVKGSEEAAPGDARADAGEDRVGDGPQQEPGEDEERRERSPEGPREEEAAGGEEESPDSSPHGEASRGAAEPEAQLSNHLAEEGPAEGSGEAARVNGRREDGEASEPRALGQEHDITLFVKAGYDGESIGNCPFSQRLFMILWLKGVIFNVTTVDLKRKPADLQNLAPGTNPPFMTFDGEVKTDVNKIEEFLEEKLAPPRYPKLGTQHPESNSAGNDVFAKFSAFIKNTKKDANEIHEKNLLKALRKLDNYLNSPLPDEIDAYSTEDVTVSGRKFLDGDELTLADCNLLPKLHIIKIVAKKYRDFEFPSEMTGIWRYLNNAYARDEFTNTCPADQEIEHAYSDVAKRMK

SEQ ID NO: 3425 - protein, 277 aa, Homo sapiens
MSSGIHVALVTGGNKGIGLAIVRDLCRLFSGDVVLTARDVTRGQAAVQQLQAEGLSPRFHQLDIDDLQSIRALRDFLRKEYGGLDVLVNNAGIAFKVADPTPFHIQAEVTMKTNFFGTRDVCTELLPLIKPQGRVVNVSSIMSVRALKSCSPELQQKFRSETITEEELVGLMNKFVEDTKKGVHQKEGWPSSAYGVTKIGVTVLSRIHARKLSEQRKGDKILLNACCPGWVRTDMAGPKATKSPEEGAETPVYLALLPPDAEGPHGQFVSEKRVEQW

SEQ ID NO: 3426 - protein, 277 aa, Homo sapiens
MSSCSRVALVTGANRGIGLAIARELCRQFSGDVVLTARDVARGQAAVQQLQAEGLSPRFHQLDIDDLQSIRALRDFLRKEYGGLNVLVNNAAVAFKSDDPMPFDIKAEMTLKTNFFATRNMCNELLPIMKPHGRVVNISSLQCLRAFENCSEDLQERFHSETLTEGDLVDLMKKFVEDTKNEVHEREGWPNSPYGVSKLGVTVLSRILARRLDEKRKADRILVNACCPGPVKTDMDGKDSIRTVEEGAETPVYLALLPPDATEPQGQLVHDKVVQNW

SEQ ID NO: 3427 - protein, 377 aa, Homo sapiens
MCDDEETTALVCDNGSGLVKAGFAGDDAPRAVFPSIVGRPRHQGVMVGMGQKDSYVGDEAQSKRGILTLKYPIEHGIITNWDDMEKIWHHTFYNELRVAPEEHPTLLTEAPLNPKANREKMTQIMFETFNVPAMYVAIQAVLSLYASGRTTGIVLDSGDGVTHNVPIYEGYALPHAIMRLDLAGRDLTDYLMKILTERGYSFVTTAEREIVRDIKEKLCYVALDFENEMATAASSSSLEKSYELPDGQVITIGNERFRCPETLFQPSFIGMESAGIHETTYNSIMKCDIDIRKDLYANNVLSGGTTMYPGIADRMQKEITALAPSTMKIKIIAPPERKYSVWIGGSILASLSTFQQMWISKQEYDEAGPSIVHRKCF

SEQ ID NO: 3428 - protein, 667 aa, Homo sapiens
MKEKSKNAAKTRREKENGEFYELAKLLPLPSAITSQLDKASIIRLTTSYLKMRAVFPEGLGDAWGQPSRAGPLDGVAKELGSHLLQTLDGFVFVVASDGKIMYISETASVHLGLSQVELTGNSIYEYIHPSDHDEMTAVLTAHQPLHHHLLQEYEIERSFFLRMKCVLAKRNAGLTCSGYKVIHCSGYLKIRQYMLDMSLYDSCYQIVGLVAVGQSLPPSAITEIKLYSNMFMFRASLDLKLIFLDSRVTEVTGYEPQDLIEKTLYHHVHGCDVFHLRYAHHLLLVKGQVTTKYYRLLSKRGGWVWVQSYATVVHNSRSSRPHCIVSVNYVLTEIEYKELQLSLEQVSTAKSQDSWRTALSTSQETRKLVKPKNTKMKTKLRTNPYPPQQYSSFQMDKLECGQLGNWRASPPASAAAPPELQPHSESSDLLYTPSYSLPFSYHYGHFPLDSHVFSSKKPMLPAKFGQPQGSPCEVARFFLSTLPASGECQWHYANPLVPSSSSPAKNPPEPPANTARHSLVPSYEAPAAAVRRFGEDTAPPSFPSCGHYREEPALGPAKAARQAARDGARLALARAAPECCAPPTPEAPGAPAQLPFVLLNYHRVLARRGPLGGAAPAASGLACAPGGPEAATGALRLRHPSPAATSPPGAPLPHYLGASVIITNGR

SEQ ID NO: 3429 - protein, 398 aa, Homo sapiens
MSGSSLPSALALSLLLVSGSLLPGPGAAQNAGFVKSPMSETKLTGDAFELYCDVVGSPTPEIQWWYAEVNRAESFRQLWDGARKRRVTVNTAYGSNGVSVLRITRLTLEDSGTYECRASNDPKRNDLRQNPSITWIRAQATISVLQKPRIVTSEEVIIRDSPVLPVTLQCNLTSSSHTLTYSYWTKNGVELSATRKNASNMEYRINKPRAEDSGEYHCVYHFVSAPKANATIEVKAAPDITGHKRSENKNEGQDATMYCKSVGYPHPDWIWRKKENGMPMDIVNTSGRFFIINKENYTELNIVNLQITEDPGEYECNATNAIGSASVVTVLRVRSHLAPLWPFLGILAEIIILVVIIVVYEKRKRPDEVPDDDEPAGPMKTNSTNNHKDKNLRQRNTN

SEQ ID NO: 3430 - protein, 269 aa, Homo sapiens
MVRCLGPALLLLLLLGSASSVGGNRCVDAAEACTADARCQRLRSEYVAQCLGRAAQGGCPRARCRRALRRFFARGPPALTHALLFCPCAGPACAERRRQTFVPSCAFSGPGPAPPSCLEPLNFCERSRVCRPRLLAFQVSCTPAPSAPDGCLLDQGARCLRAYAGLVGTAVTPNYVDNVSARVAPWCDCGASGNRREDCEAFRGLFTRNRCLDGAIQAFASGWPPVLLDQLNPQGDPEHSLLQVSSTGRALERRSLLSILPVLALPALL

SEQ ID NO: 3431 - protein, 390 aa, Homo sapiens
MSVRVARVAWVRGLGASYRRGASSFPVPPPGAQGVAELLRDATGAEEEAPWAATERRMPGQCSVLLFPGQGSQVVGMGRGLLNYPRVRELYAAARRVLGYDLLELSLHGPQETLDRTVHCQPAIFVASLAAVEKLHHLQPSVIENCVAAAGFSVGEFAALVFAGAMEFAEGLYAVKIRAEAMQEASEAVPSGMLSVLGQPQSKFNFACLEAREHCKSLGIENPVCEVSNYLFPDCRVISGHQEALRFLQKNSSKFHFRRTRMLPVSGAFHTRLMEPAVEPLTQALKAVDIKKPLVSVYSNVHAHRYRHPGHIHKLLAQQLVSPVKWEQTMHAIYERKKGRGFPQTFEVGPGRQLGAILKSCNMQAWKSYSAVDVLQTLEHVDLDPQEPPR

SEQ ID NO: 3432 - protein, 347 aa, Homo sapiens
MGAAAVRWHLCVLLALGTRGRLAGGSGLPGSVDVDECSEGTDDCHIDAICQNTPKSYKCLCKPGYKGEGKQCEDIDECENDYYNGGCVHECINIPGNYRCTCFDGFMLAHDGHNCLDVDECQDNNGGCQQICVNAMGSYECQCHSGFFLSDNQHTCIHRSNEGMNCMNKDHGCAHICRETPKGGVACDCRPGFDLAQNQKDCTLTCNYGNGGCQHSCEDTDTGPTCGCHQKYALHSDGRTCIEKDEAAIERSQFNATSVADVDKRVKRRLLMETCAVNNGGCDRTCKDTATGVRCSCPVGFTLQPDGKTCKGQHVELCGCPCLYWPGQEPPCACIAGPRAGLNGGHV

SEQ ID NO: 3433 - protein, 264 aa, Homo sapiens
MEAFLGSRSGLWAGGPAPGQFYRIPSTPDSFMDPASALYRGPITRTQNPMVTGTSVLGVKFEGGVVIAADMLGSYGSLARFRNISRIMRVNNSTMLGASGDYADFQYLKQVLGQMVIDEELLGDGHSYSPRAIHSWLTRAMYSRRSKMNPLWNTMVIGGYADGESFLGYVDMLGVAYEAPSLATGYGAYLAQPLLREVLEKQPVLSQTEARDLVERCMRVLYYRDARSYNRFQIATVTEKGVEIEGPLSTETNWDIAHMISGFE

SEQ ID NO: 3434 - protein, 158 aa, Homo sapiens
MSHGKGTDMLPEIAAAVGFLSSLLRTRGCVSEQRLKVFSGALQEALTEHYKHHWFPEKPSKGSGYRCIRINHKMDPIISRVASQIGLSQPQLHQLLPSELTLWVDPYEVSYRIGEDGSICVLYEEAPLAASCGLLTCKNQVLLGRSSPSKNYVMAVSS

SEQ ID NO: 3435 - protein, 575 aa, Homo sapiens
MSGNWVHPGQILIWAIWVLAAPTKGPSAEGPQRNTRLGWIQGKQVTVLGSPVPVNVFLGVPFAAPPLGSLRFTNPQPASPWDNLREATSYPNLCLQNSEWLLLDQHMLKVHYPKFGVSEDCLYLNIYAPAHADTGSKLPVLVWFPGGAFKTGSASIFDGSALAAYEDVLVVVVQYRLGIFGFFTTWDQHAPGNWAFKDQVAALSWVQKNIEFFGGDPSSVTIFGESAGAISVSSLILSPMAKGLFHKAIMESGVAIIPYLEAHDYEKSEDLQVVAHFCGNNASDSEALLRCLRTKPSKELLTLSQKTKSFTRVVDGAFFPNEPLDLLSQKAFKAIPSIIGVNNHECGFLLPMKEAPEILSGSNKSLALHLIQNILHIPPQYLHLVANEYFHDKHSLTEIRDSLLDLLGDVFFVVPALITARYHRDAGAPVYFYEFRHRPQCFEDTKPAFVKADHADEVRFVFGGAFLKGDIVMFEGATEEEKLLSRKMMKYWATFARTGNPNGNDLSLWPAYNLTEQYLQLDLNMSLGQRLKEPRVDFWTSTIPLILSASDMLHSPLSSLTFLSLLQPFFFFCAP

SEQ ID NO: 3436 - protein, 917 aa, Homo sapiens
MIASHLLAYFFTELNHDQVQKVDQYLYHMRLSDETLLEISKRFRKEMEKGLGATTHPTAAVKMLPTFVRSTPDGTEHGEFLALDLGGTNFRVLWVKVTDNGLQKVEMENQIYAIPEDIMRGSGTQLFDHIAECLANFMDKLQIKDKKLPLGFTFSFPCHQTKLDESFLVSWTKGFKSSGVEGRDVVALIRKAIQRRGDFDIDIVAVVNDTVGTMMTCGYDDHNCEIGLIVGTGSNACYMEEMRHIDMVEGDEGRMCINMEWGAFGDDGSLNDIRTEFDQEIDMGSLNPGKQLFEKMISGMYMGELVRLILVKMAKEELLFGGKLSPELLNTGRFETKDISDIEGEKDGIRKAREVLMRLGLDPTQEDCVATHRICQIVSTRSASLCAATLAAVLQRIKENKGEERLRSTIGVDGSVYKKHPHFAKRLHKTVRRLVPGCDVRFLRSEDGSGKGAAMVTAVAYRLADQHRARQKTLEHLQLSHDQLLEVKRRMKVEMERGLSKETHASAPVKMLPTYVCATPDGTEKGDFLALDLGGTNFRVLLVRVRNGKWGGVEMHNKIYAIPQEVMHGTGDELFDHIVQCIADFLEYMGMKGVSLPLGFTFSFPCQQNSLDESILLKWTKGFKASGCEGEDVVTLLKEAIHRREEFDLDVVAVVNDTVGTMMTCGFEDPHCEVGLIVGTGSNACYMEEMRNVELVEGEEGRMCVNMEWGAFGDNGCLDDFRTEFDVAVDELSLNPGKQRFEKMISGMYLGEIVRNILIDFTKRGLLFRGRISERLKTRGIFETKFLSQIESDCLALLQVRAILQHLGLESTCDDSIIVKEVCTVVARRAAQLCGAGMAAVVDRIRENRGLDALKVTVGVDGTLYKLHPHFAKVMHETVKDLAPKCDVSFLQSEDGSGKGAALITAVACRIREAGQR

SEQ ID NO: 3437 - protein, 563 aa, Homo sapiens
MLLPAPALRRALLSRPWTGAGLRWKHTSSLKVANEPVLAFTQGSPERDALQKALKDLKGRMEAIPCVVGDEEVWTSDVQYQVSPFNHGHKVAKFCYADKSLLNKAIEAALAARKEWDLKPIADRAQIFLKAADMLSGPRRAEILAKTMVGQGKTVIQAEIDAAAELIDFFRFNAKYAVELEGQQPISVPPSTNSTVYRGLEGFVAAISPFNFTAIGGNLAGAPALMGNVVLWKPSDTAMLASYAVYRILREAGLPPNIIQFVPADGPLFGDTVTSSEHLCGINFTGSVPTFKHLWKQVAQNLDRFHTFPRLAGECGGKNFHFVHRSADVESVVSGTLRSAFEYGGQKCSACSRLYVPHSLWPQIKGRLLEEHSRIKVGDPAEDFGTFFSAVIDAKSFARIKKWLEHARSSPSLTILAGGKCDDSVGYFVEPCIVESKDPQEPIMKEEIFGPVLSVYVYPDDKYKETLQLVDSTTSYGLTGAVFSQDKDVVQEATKVLRNAAGNFYINDKSTGSIVGQQPFGGARASGTNDKPGGPHYILRWTSPQVIKETHKPLGDWSYAYMQ

SEQ ID NO: 3438 - protein, 643 aa, Homo sapiens
MPLLFLERFPWPSLRTYTGLSGLALLGTIISAYRALSQPEAGPGEPDQLTASLQPEPPAPARPSAGGPRARDVAQYLLSDSLFVWVLVNTACCVLMLVAKLIQCIVFGPLRVSERQHLKDKFWNFIFYKFIFIFGVLNVQTVEEVVMWCLWFAGLVFLHLMVQLCKDRFEYLSFSPTTPMSSHGRVLSLLVAMLLSCCGLAAVCSITGYTHGMHTLAFMAAESLLVTVRTAHVILRYVIHLWDLNHEGTWEGKGTYVYYTDFVMELTLLSLDLMHHIHMLLFGNIWLSMASLVIFMQLRYLFHEVQRRIRRHKNYLRVVGNMEARFAVATPEELAVNNDDCAICWDSMQAARKLPCGHLFHNSCLRSWLEQDTSCPTCRMSLNIADNNRVREEHQGENLDENLVPVAAAEGRPRLNQHNHFFHFDGSRIASWLPSFSVEVMHTTNILGITQASNSQLNAMAHQIQEMFPQVPYHLVLQDLQLTRSVEITTDNILEGRIQVPFPTQRSDSIRPALNSPVERPSSDQEEGETSAQTERVPLDLSPRLEETLDFGEVEVEPSEVEDFEARGSRFSKSADERQRMLVQRKDELLQQARKRFLNKSSEDDAASESFLPSEGASSDPVTLRRRMLAAAAERRLQKQQTS

SEQ ID NO: 3439 - protein, 1749 aa, Homo sapiens
MADEEAGGTERMEISAELPQTPQRLASWWDQQVDFYTAFLHHLAQLVPEIYFAEMDPDLEKQEESVQMSIFTPLEWYLFGEDPDICLEKLKHSGAFQLCGRVFKSGETTYSCRDCAIDPTCVLCMDCFQDSVHKNHRYKMHTSTGGGFCDCGDTEAWKTGPFCVNHEPGRAGTIKENSRCPLNEEVIVQARKIFPSVIKYVVEMTIWEEEKELPPELQIREKNERYYCVLFNDEHHSYDHVIYSLQRALDCELAEAQLHTTAIDKEGRRAVKAGAYAACQEAKEDIKSHSENVSQHPLHVEVLHSEIMAHQKFALRLGSWMNKIMSYSSDFRQIFCQACLREEPDSENPCLISRLMLWDAKLYKGARKILHELIFSSFFMEMEYKKLFAMEFVKYYKQLQKEYISDDHDRSISITALSVQMFTVPTLARHLIEEQNVISVITETLLEVLPEYLDRNNKFNFQGYSQDKLGRVYAVICDLKYILISKPTIWTERLRMQFLEGFRSFLKILTCMQGMEEIRRQVGQHIEVDPDWEAAIAIQMQLKNILLMFQEWCACDEELLLVAYKECHKAVMRCSTSFISSSKTVVQSCGHSLETKSYRVSEDLVSIHLPLSRTLAGLHVRLSRLGAVSRLHEFVSFEDFQVEVLVEYPLRCLVLVAQVVAEMWRRNGLSLISQVFYYQDVKCREEMYDKDIIMLQIGASLMDPNKFLLLVLQRYELAEAFNKTISTKDQDLIKQYNTLIEEMLQVLIYIVGERYVPGVGNVTKEEVTMREIIHLLCIEPMPHSAIAKNLPENENNETGLENVINKVATFKKPGVSGHGVYELKDESLKDFNMYFYHYSKTQHSKAEHMQKKRRKQENKDEALPPPPPPEFCPAFSKVINLLNCDIMMYILRTVFERAIDTDSNLWTEGMLQMAFHILALGLLEEKQQLQKAPEEEVTFDFYHKASRLGSSAMNIQMLLEKLKGIPQLEGQKDMITWILQMFDTVKRLREKSCLIVATTSGSESIKNDEITHDKEKAERKRKAEAARLHRQKIMAQMSALQKNFIETHKLMYDNTSEMPGKEDSIMEEESTPAVSDYSRIALGPKRGPSVTEKEVLTCILCQEEQEVKIENNAMVLSACVQKSTALTQHRGKPIELSGEALDPLFMDPDLAYGTYTGSCGHVMHAVCWQKYFEAVQLSSQQRIHVDLFDLESGEYLCPLCKSLCNTVIPIIPLQPQKINSENADALAQLLTLARWIQTVLARISGYNIRHAKGENPIPIFFNQGMGDSTLEFHSILSFGVESSIKYSNSIKEMVILFATTIYRIGLKVPPDERDPRVPMLTWSTCAFTIQAIENLLGDEGKPLFGALQNRQHNGLKALMQFAVAQRITCPQVLIQKHLVRLLSVVLPNIKSEDTPCLLSIDLFHVLVGAVLAFPSLYWDDPVDLQPSSVSSSYNHLYLFHLITMAHMLQILLTVDTGLPLAQVQEDSEEAHSASSFFAEISQYTSGSIGCDIPGWYLWVSLKNGITPYLRCAALFFHYLLGVTPPEELHTNSAEGEYSALCSYLSLPTNLFLLFQEYWDTVRPLLQRWCADPALLNCLKQKNTVVRYPRKRNSLIELPDDYSCLLNQASHFRCPRSADDERKHPVLCLFCGAILCSQNICCQEIVNGEEVGACIFHALHCGAGVCIFLKIRECRVVLVEGKARGCAYPAPYLDEYGETDPGLKRGNPLHLSRERYRKLHLVWQQHCIIEEIARSQETNQMLFGFNWQLL

SEQ ID NO: 3440 - protein, 301 aa, Homo sapiens
MQREEKQLEASLDALLSQVADLKNSLGSFICKLENEYGRLTWPSVLDSFALLSGQLNTLNKVLKHEKTPLFRNQVIIPLVLSPDRDEDLMRQTEGRVPVFSHEVVPDHLRTKPDPEVEEQEKQLTTDAARIGADAAQKQIQSLNKMCSNLLEKISKEERESESGGLRPNKQTFNPTDTNALVAAVAFGKGLSNWRPSGSSGPGQAGQPGAGTILAGTSGLQQVQMAGAPSQQQPMLSGVQMAQAGQPGKMPSGIKTNIKSASMHPYQRPSCLGFILAIPLRRKVKKLLGQEGKKNAHLQLW

SEQ ID NO: 3441 - protein, 473 aa, Homo sapiens
MRKLLTNLPAAAVLSAQVYSAVLQGLWEENVCGTPGRTRVCTALLYGQVCPFQDSTDGLRTITSILFNWPPENTSVYYQPPQRSSFRIKLAFRNLSWPGLGLEDHQEIVLGQLVLPEPNEAKPDDPAPRPGQHALTMPALEPAPPLLADLGPALEPESPAALGPPGYLHSAPGPAPAPGEGPPPGTVLEPQSAPESSCPCRGSVKNQPSEELPDMTTFPPRLLAEQLTLMDAELFKKVVLHECLGCIWGQGHLKGNEHMAPTVRATIAHFNRLTNCITTSCLGDHSMRARDRARVVEHWIKVARECLSLNNFSSVHVIVSALCSNPIGQLHKTWAGVSSKSMKELKELCKKDTAVKRDLLIKAGSFKVATQERNPQRVQMRLRRQKKGVVPFLGDFLTELQRLDSAIPDDLDGNTNKRSKEVRVLQEMQLLQVAAMNYRLRPLEKFVTYFTRMEQLSDKESYKLSCQLEPENP

SEQ ID NO: 3442 - protein, 534 aa, Homo sapiens
MAQLGKLLKEQKYDRQLRLWGDHGQEALESAHVCLINATATGTEILKNLVLPGIGSFTIIDGNQVSGEDAGNNFFLQRSSIGKNRAEAAMEFLQELNSDVSGSFVEESPENLLDNDPSFFCRFTVVVATQLPESTSLRLADVLWNSQIPLLICRTYGLVGYMRIIIKEHPVIESHPDNALEDLRLDKPFPELREHFQSYDLDHMEKKDHSHTPWIVIIAKYLAQWYSETNGRIPKTYKEKEDFRDLIRQGILKNENGAPEDEENFEEAIKNVNTALNTTQIPSSIEDIFNDDRCINITKQTPSFWILARALKEFVAKEGQGNLPVRGTIPDMIADSGKYIKLQNVYREKAKKDAAAVGNHVAKLLQSIGQAPESISEKELKLLCSNSAFLRVVRCRSLAEEYGLDTINKDEIISSMDNPDNEIVLYLMLRAVDRFHKQQGRYPGVSNYQVEEDIGKLKSCLTGFLQEYGLSVMVKDDYVHEFCRYGAAEPHTIAAFLGGAAAQEVIKIITKQFVIFNNTYIYSGMSQTSATFQL

SEQ ID NO: 3443 - protein, 528 aa, Homo sapiens
MDHCGALFLCLCLLTLQNATTETWEELLSYMENMQVSRGRSSVFSSRQLHQLEQMLLNTSFPGYNLTLQTPTIQSLAFKLSCDFSGLSLTSATLKRVPQAGGQHARGQHAMQFPAELTRDACKTRPRELRLICIYFSNTHFFKDENNSSLLNNYVLGAQLSHGHVNNLRDPVNISFWHNQSLEGYTLTCVFWKEGARKQPWGGWSPEGCRTEQPSHSQVLCRCNHLTYFAVLMQLSPALVPAELLAPLTYISLVGCSISIVASLITVLLHFHFRKQSDSLTRIHMNLHASVLLLNIAFLLSPAFAMSPVPGSACTALAAALHYALLSCLTWMAIEGFNLYLLLGRVYNIYIRRYVFKLGVLGWGAPALLVLLSLSVKSSVYGPCTIPVFDSWENGTGFQNMSICWVRSPVVHSVLVMGYGGLTSLFNLVVLAWALWTLRRLRERADAPSVRACHDTVTVLGLTVLLGTTWALAFFSFGVFLLPQLFLFTILNSLYGFFLFLWFCSQRCRSEAEAKAQIEAFSSSQTTQ

SEQ ID NO: 3444 - protein, 182 aa, Homo sapiens
MPRVVPDQRSKFENEEFFRKLSRECEIKYTGFRDRPHEERQARFQNACRDGRSEIAFVATGTNLSLQFFPASWQGEQRQTPSREYVDLEREAGKVYLKAPMILNGVCVIWKGWIDLQRLDGMGCLEFDEERAQQEDALAQQAFEEARRRTREFEDRDRSHREEMEVRVSQLLAVTGKKTTRP

SEQ ID NO: 3445 - protein, 732 aa, Homo sapiens
MGQGWATAGLPSLLFLLLCYGHPLLVPSQEASQQVTVTHGTSSQATTSSQTTTHQATAHQTSAQSPNLVTDEAEASKFVEEYDRTSQVVWNEYAEANWNYNTNITTETSKILLQKNMQIANHTLKYGTQARKFDVNQLQNTTIKRIIKKVQDLERAALPAQELEEYNKILLDMETTYSVATVCHPNGSCLQLEPDLTNVMATSRKYEDLLWAWEGWRDKAGRAILQFYPKYVELINQAARLNGYVDAGDSWRSMYETPSLEQDLERLFQELQPLYLNLHAYVRRALHRHYGAQHINLEGPIPAHLLGNMWAQTWSNIYDLVVPFPSAPSMDTTEAMLKQGWTPRRMFKEADDFFTSLGLLPVPPEFWNKSMLEKPTDGREVVCHASAWDFYNGKDFRIKQCTTVNLEDLVVAHHEMGHIQYFMQYKDLPVALREGANPGFHEAIGDVLALSVSTPKHLHSLNLLSSEGGSDEHDINFLMKMALDKIAFIPFSYLVDQWRWRVFDGSITKENYNQEWWSLRLKYQGLCPPVPRTQGDFDPGAKFHIPSSVPYIRYFVSFIIQFQFHEALCQAAGHTGPLHKCDIYQSKEAGQRLATAMKLGFSRPWPEAMQLITGQPNMSASAMLSYFKPLLDWLRTENELHGEKLGWPQYNWTPNSARSEGPLPDSGRVSFLGLDLDAQQARVGQWLLLFLGIALLVATLGLSQRLFSIRHRSLHRHSHGPQFGSEVELRHS

SEQ ID NO: 3446 - protein, 1306 aa, Homo sapiens
MGAASGRRGPGLLLPLPLLLLLPPQPALALDPGLQPGNFSADEAGAQLFAQSYNSSAEQVLFQSVAASWAHDTNITAENARRQEEAALLSQEFAEAWGQKAKELYEPIWQNFTDPQLRRIIGAVRTLGSANLPLAKRQQYNALLSNMSRIYSTAKVCLPNKTATCWSLDPDLTNILASSRSYAMLLFAWEGWHNAAGIPLKPLYEDFTALSNEAYKQDGFTDTGAYWRSWYNSPTFEDDLEHLYQQLEPLYLNLHAFVRRALHRRYGDRYINLRGPIPAHLLGDMWAQSWENIYDMVVPFPDKPNLDVTSTMLQQGWNATHMFRVAEEFFTSLELSPMPPEFWEGSMLEKPADGREVVCHASAWDFYNRKDFRIKQCTRVTMDQLSTVHHEMGHIQYYLQYKDLPVSLRRGANPGFHEAIGDVLALSVSTPEHLHKIGLLDRVTNDTESDINYLLKMALEKIAFLPFGYLVDQWRWGVFSGRTPPSRYNFDWWYLRTKYQGICPPVTRNETHFDAGAKFHVPNVTPYIRYFVSFVLQFQFHEALCKEAGYEGPLHQCDIYRSTKAGAKLRKVLQAGSSRPWQEVLKDMVGLDALDAQPLLKYFQPVTQWLQEQNQQNGEVLGWPEYQWHPPLPDNYPEGIDLVTDEAEASKFVEEYDRTSQVVWNEYAEANWNYNTNITTETSKILLQKNMQIANHTLKYGTQARKFDVNQLQNTTIKRIIKKVQDLERAALPAQELEEYNKILLDMETTYSVATVCHPNGSCLQLEPDLTNVMATSRKYEDLLWAWEGWRDKAGRAILQFYPKYVELINQAARLNGYVDAGDSWRSMYETPSLEQDLERLFQELQPLYLNLHAYVRRALHRHYGAQHINLEGPIPAHLLGNMWAQTWSNIYDLVVPFPSAPSMDTTEAMLKQGWTPRRMFKEADDFFTSLGLLPVPPEFWNKSMLEKPTDGREVVCHASAWDFYNGKDFRIKQCTTVNLEDLVVAHHEMGHIQYFMQYKDLPVALREGANPGFHEAIGDVLALSVSTPKHLHSLNLLSSEGGSDEHDINFLMKMALDKIAFIPFSYLVDQWRWRVFDGSITKENYNQEWWSLRLKYQGLCPPVPRTQGDFDPGAKFHIPSSVPYIRYFVSFIIQFQFHEALCQAAGHTGPLHKCDIYQSKEAGQRLATAMKLGFSRPWPEAMQLITGQPNMSASAMLSYFKPLLDWLRTENELHGEKLGWPQYNWTPNSARSEGPLPDSGRVSFLGLDLDAQQARVGQWLLLFLGIALLVATLGLSQRLFSIRHRSLHRHSHGPQFGSEVELRHS

SEQ ID NO: 3447 - protein, 298 aa, Homo sapiens
MGIVCAQCSFILLLSIIRARPPPFLFCPLSSQRTESPYKPVHLGLGPTDKVAAIAMARIIDLVPWDDGSTHVYASPAILLPMERQRNQLAGVKQQLYHPALPTLRHMDRDTVKACLPDEHCQSTTYCRKDEFDNAHFTLLGVPNKPLQCLDITATGQKLRNRYHEGKLAPIAPGINRVDWPCFTRAIEDWSHFVSSAGEFKLPCLRKRAEGLSGYAVRYLKPDVTQTWRQEALCGAWAGRPCSPDSPRPYPCCPPQYCLSQNPSLDRYGQKPLPFDSLNTFRSFGSSYSRVNYLTPWH

SEQ ID NO: 3448 - protein, 331 aa, Homo sapiens
MENPSPAAALGKALCALLLATLGAAGQPLGGESICSARALAKYSITFTGKWSQTAFPKQYPLFRPPAQWSSLLGAAHSSDYSMWRKNQYVSNGLRDFAERGEAWALMKEIEAAGEALQSVHAVFSAPAVPSGTGQTSAELEVQRRHSLVSFVVRIVPSPDWFVGVDSLDLCDGDRWREQAALDLYPYDAGTDSGFTFSSPNFATIPQDTVTEITSSSPSHPANSFYYPRLKALPPIARVTLVRLRQSPRAFIPPAPVLPSRDNEIVDSASVPETPLDCEVSLWSSWGLCGGHCGRLGTKSRTRYVRVQPANNGSPCPELEEEAECVPDNCV

SEQ ID NO: 3449 - protein, 235 aa, Homo sapiens
MGSTESSEGRRVSFGVDEEERVRVLQGVRLSENVVNRMKEPSSPPPAPTSSTFGLQDGNLRAPHKESTLPRSGSSGGQQPSGMKEGVKRYEQEHAAIQDKLFQVAKREREAATKHSKASLPTGEGSISHEEQKSVRLARELESREAELRRRDTFYKEQLERIERKNAEMYKLSSEQFHEAASKMESTIKPRRVEPVCSGLQAQILHCYRDRPHEVLLCSDLVKAYQRCVSAAHKG

SEQ ID NO: 3450 - protein, 351 aa, Homo sapiens
MSFFPELYFNVDNGYLEGLVRGLKAGVLSQADYLNLVQCETLEDLKLHLQSTDYGNFLANEASPLTVSVIDDRLKEKMVVEFRHMRNHAYEPLASFLDFITYSYMIDNVILLITGTLHQRSIAELVPKCHPLGSFEQMEAVNIAQTPAELYNAILVDTPLAAFFQDCISEQDLDEMNIEIIRNTLYKAYLESFYKFCTLLGGTTADAMCPILEFEADRRAFIITINSFGTELSKEDRAKLFPHCGRLYPEGLAQLARADDYEQVKNVADYYPEYKLLFEGAGSNPGDKTLEDRFFEHEVKLNKLAFLNQFHFGVFYAFVKLKEQECRNIVWIAECIAQRHRAKIDNYIPIF

SEQ ID NO: 3451 - protein, 132 aa, Homo sapiens
MLTAAVLSCALLLALPATRGAQMGLAPMEGIRRPDQALLPELPGLGLRAPLKKTTAEQAEEDLLQEAQALAEVLDLQDREPRSSRRCVRLHESCLGQQVPCCDPCATCYCRFFNAFCYCRKLGTAMNPCSRT

SEQ ID NO: 3452 - protein, 146 aa, Homo sapiens
MRLLQLLFRASPATLLLVLCLQLGANKAQDNTRKIIIKNFDIPKSVRPNDEVTAVLAVQTELKECMVVKTYLISSIPLQGAFNYKYTACLCDDNPKTFYWDFYTNRTVQIAAVVDVIRELGICPDDAAVIPIKNNRFYTIEILKVE

SEQ ID NO: 3453 - protein, 424 aa, Homo sapiens
MGCGTSKVLPEPPKDVQLDLVKKVEPFSGTKSDVYKHFITEVDSVGPVKAGFPAASQYAHPCPGPPTAGHTEPPSEPPRRARVAKYRAKFDPRVTAKYDIKALIGRGSFSRVVRVEHRATRQPYAIKMIETKYREGREVCESELRVLRRVRHANIIQLVEVFETQERVYMVMELATGGELFDRIIAKGSFTERDATRVLQMVLDGVRYLHALGITHRDLKPENLLYYHPGTDSKIIITDFGLASARKKGDDCLMKTTCGTPEYIAPEVLVRKPYTNSVDMWALGVIAYILLSGTMPFEDDNRTRLYRQILRGKYSYSGEPWPSVSNLAKDFIDRLLTVDPGARMTALQALRHPWVVSMAASSSMKNLHRSISQNLLKRASSRCQSTKSAQSTRSSRSTRSNKSRRVRERELRELNLRYQQQYNG

SEQ ID NO: 3454 - protein, 878 aa, Homo sapiens
MATAPSYPAGLPGSPGPGSPPPPGGLELQSPPPLLPQIPAPGSGVSFHIQIGLTREFVLLPAASELAHVKQLACSIVDQKFPECGFYGLYDKILLFKHDPTSANLLQLVRSSGDIQEGDLVEVVLSASATFEDFQIRPHALTVHSYRAPAFCDHCGEMLFGLVRQGLKCDGCGLNYHKRCAFSIPNNCSGARKRRLSSTSLASGHSVRLGTSESLPCTAEELSRSTTELLPRRPPSSSSSSSASSYTGRPIELDKMLLSKVKVPHTFLIHSYTRPTVCQACKKLLKGLFRQGLQCKDCKFNCHKRCATRVPNDCLGEALINGDVPMEEATDFSEADKSALMDESEDSGVIPGSHSENALHASEEEEGEGGKAQSSLGYIPLMRVVQSVRHTTRKSSTTLREGWVVHYSNKDTLRKRHYWRLDCKCITLFQNNTTNRYYKEIPLSEILTVESAQNFSLVPPGTNPHCFEIVTANATYFVGEMPGGTPGGPSGQGAEAARGWETAIRQALMPVILQDAPSAPGHAPHRQASLSISVSNSQIQENVDIATVYQIFPDEVLGSGQFGVVYGGKHRKTGRDVAVKVIDKLRFPTKQESQLRNEVAILQSLRHPGIVNLECMFETPEKVFVVMEKLHGDMLEMILSSEKGRLPERLTKFLITQILVALRHLHFKNIVHCDLKPENVLLASADPFPQVKLCDFGFARIIGEKSFRRSVVGTPAYLAPEVLLNQGYNRSLDMWSVGVIMYVSLSGTFPFNEDEDINDQIQNAAFMYPASPWSHISAGAIDLINNLLQVKMRKRYSVDKSLSHPWLQEYQTWLDLRELEGKMGERYITHESDDARWEQFAAEHPLPGSGLPTDRDLGGACPPQDHDMQGLAERISVL

SEQ ID NO: 3455 - protein, 386 aa, Homo sapiens [sequence omitted]

SEQ ID NO: 3456 - protein, 149 aa, Homo sapiens [sequence omitted]

SEQ ID NO: 3457 - protein, 194 aa, Homo sapiens
MPSSPLRVAVVCSSNQNRSMEAHNILSKRGFSVRSFGTGTHVKLPGPAPDKPNVYDFKTTYDQMYNDLLRKDKELYTQNGILHMLDRNKRIKPRPERFQNCKDLFDLILTCEERVYDQVVEDLNSREQETCQPVHVVNVDIQDNHEEATLGAFLICELCQCIQHTEDMENEIDELLQEFEEKSGRTFLHTVCFY

SEQ ID NO: 3458 - protein, 475 aa, Homo sapiens
MACSLKDELLCSICLSIYQDPVSLGCEHYFCRRCITEHWVRQEAQGARDCPECRRTFAEPALAPSLKLANIVERYSSFPLDAILNARRAARPCQAHDKVKLFCLTDRALLCFFCDEPALHEQHQVTGIDDAFDELQRELKDQLQALQDSEREHTEALQLLKRQLAETKSSTKSLRTTIGEAFERLHRLLRERQKAMLEELEADTARTLTDIEQKVQRYSQQLRKVQEGAQILQERLAETDRHTFLAGVASLSERLKGKIHETNLTYEDFPTSKYTGPLQYTIWKSLFQDIHPVPAALTLDPGTAHQRLILSDDCTIVAYGNLHPQPLQDSPKRFDVEVSVLGSEAFSSGVHYWEVVVAEKTQWVIGLAHEAASRKGSIQIQPSRGFYCIVMHDGNQYSACTEPWTRLNVRDKLDKVGVFLDYDQGLLIFYNADDMSWLYTFREKFPGKLCSYFSPGQSHANGKNVQPLRINTVRI

SEQ ID NO: 3459 - protein, 423 aa, Homo sapiens
MSASAVYVLDLKGKVLICRNYRGDVDMSEVEHFMPILMEKEEEGMLSPILAHGGVRFMWIKHNNLYLVATSKKNACVSLVFSFLYKVVQVFSEYFKELEEESIRDNFVIIYELLDELMDFGYPQTTDSKILQEYITQEGHKLETGAPRPPATVTNAVSWRSEGIKYRKNEVFLDVIESVNLLVSANGNVLRSEIVGSIKMRVFLSGMPELRLGLNDKVLFDNTGRGKSKSVELEDVKFHQCVRLSRFENDRTISFIPPDGEFELMSYRLNTHVKPLIWIESVIEKHSHSRIEYMIKAKSQFKRRSTANNVEIHIPVPNDADSPKFKTTVGSVKWVPENSEIVWSIKSFPGGKEYLMRAHFGLPSVEAEDKEGKPPISVKFEIPYFTTSGIQVRYLKIIEKSGYQALPWVRYITQNGDYQLRTQ

SEQ ID NO: 3460 - protein, 503 aa, Homo sapiens
MSGALLWPLLPLLLLLLSARDGVRAAQPQAPGYLIAAPSVFRAGVEEVISVTIFNSPREVTVQAQLVAQGEPVVQSQGAILDKGTIKLKVPTGLRGQALLKVWGRGWQAEEGPLFHNQTSVTVDGRGASVFIQTDKPVYRPQHRVLISIFTVSPNLRPVNEKLEAYILDPRGSRMIEWRHLKPFCCGITNMSFPLSDQPVLGEWFIFVEMQGHAYNKSFEVQKYVLPKFELLIDPPRYIQDLDACETGTVRARYTFGKPVAGALMINMTVNGVGYYSHEVGRPVLRTTKILGSRDFDICVRDMIPADVPEHFRGRVSIWAMVTSVDGSQQVAFDDSTPVQRQLVDIRYSKDTRKQFKPGLAYVGKVELSYPDGSPAEGVTVQIKAELTPKDNIYTSEVVSQRGLVGFEIPSIPTSAQHVWLEVFQELEDYDVSDSFGVSREDGPFWWAGLTAQRRRRSSVFPWPWGITKDSGFAFTVRRGNGTGGDDRPSEPEPPAGRWPLHR

SEQ ID NO: 3461 - protein, 402 aa, Homo sapiens
MVCARAALGPGALWAAAWGVLLLTAPAGAQRGRKKVVHVLEGESGSVVVQTAPGQVVSHRGGTIVLPCRYHYEAAAHGHDGVRLKWTKVVDPLAFTDVFVALGPQHRAFGSYRGRAELQGDGPGDASLVLRNVTLQDYGRYECEVTNELEDDAGMVKLDLEGVVFPYHPRGGRYKLTFAEAQRACAEQDGILASAEQLHAAWRDGLDWCNAGWLRDGSVQYPVNRPREPCGGLGGTGSAGGGGDANGGLRNYGYRHNAEERYDAFCFTSNLPGRVFFLKPLRPVPFSGAARACAARGAAVAKVGQLFAAWKLQLLDRCTAGWLADGSARYPIVNPRARCGGRRPGVRSLGFPDATRRLFGVYCYRAPGAPDPAPGGWGWGWAGGGGWAGGARDPAAWTPLHV

SEQ ID NO: 3462 - protein, 1156 aa, Homo sapiens
MASLLPLLCLCVVAAHLAGARDATPTEEPMATALGLERRSVYTGQPSPALEDWEEASEWTSWFNVDHPGGDGDFESLAAIRFYYGPARVCPRPLALEARTTDWALPSAVGERVHLNPTRGFWCLNREQPRGRRCSNYHVRFRCPLEASWGAWGPWGPCSGSCGPGRRLRRRHCPSPAGDACPGRPLEAQKCVRPRCPGCSLDTCECPDHILLGSVVTPSGQPLLGARVSLRDQPGTVATSDAHGTFRVPGVCADSRANIRAQMDGFSAGEAQAQANGSISVVTIILDKLEKPYLVKHPESRVREAGQNVTFCCKASGTPMPKKYSWFHNGTLLDRRAHGYGAHLELRGLRPDQAGIYHCKAWNEAGAVRSGTARLTVLAPGQPACDPRPREYLIKLPEDCGQPGSGPAYLDVGLCPDTRCPSLAGSSPRCGDASSRCCSVRRLERREIHCPGYVLPVKVVAECGCQKCLPPRGLVRGRVVAADSGEPLRFARILLGQEPIGFTAYQGDFTIEVPPSTQRLVVTFVDPSGEFMDAVRVLPFDPRGAGVYHEVKAMRKKAPVILHTSQSNTIPLGELEDEAPLGELVLPSGAFRRADGKPYSGPVEARVTFVDPRDLTSAASAPSDLRFVDSDGELAPLRTYGMFSVDLRAPGSAEQLQVGPVAVRVAASQIHMPGHVEALKLWSLNPETGLWEEESGFRREGSSGPRVRREERVFLVGNVEIRERRLFNLDVPERRRCFVKVRAYANDKFTPSEQVEGVVVTLVNLEPAPGFSANPRAWGRFDSAVTGPNGACLPAFCDADRPDAYTALVTATLGGEELEPAPSLPRPLPATVGVTQPYLDRLGYRRTDHDDPAFKRNGFRINLAKPRPGDPAEANGPVYPWRSLRECQGAPVTASHFRFARVEADKYEYNVVPFREGTPASWTGDLLAWWPNPQEFRACFLKVKIQGPQEYMVRSHNAGGSHPRTRGQLYGLRDARSVRDPERPGTSAACVEFKCSGMLFDQRQVDRTLVTIMPQGSCRRVAVNGLLRDYLTRHPPPVPAEDPAAFSMLAPLDPLGHNYGVYTVTDQSPRLAKEIAIGRCFDGSSDGFSREMKADAGTAVTFQCREPPAGRPSLFQRLLESPATALGDIRREMSEAAQAQARASGPLRTRRGRVRQ

SEQ ID NO: 3463 - protein, 74 aa, Homo sapiens [sequence omitted]

SEQ ID NO: 3464 - protein, 129 aa, Homo sapiens
MGRRDAQLLAALLVLGLCALAGSEKPSPCQCSRLSPHNRTNCGFPGITSDQCFDNGCCFDSSVTGVPWCFHPLPKQESDQCVMEVSDRRNCGYPGISPEECASRKCCFSNFIFEVPWCFFPKSVEDCHY

SEQ ID NO: 3465 - protein, 84 aa, Homo sapiens
MATMENKVICALVLVSMLALGTLAEAQTETCTVAPRERQNCGFPGVTPSQCANKGCCFDDTVRGVPWCFYPNTIDVPPEEECEF

SEQ ID NO: 3466 - protein, 240 aa, Homo sapiens
MAEYLASIFGTEKDKVNCSFYFKIGACRHGDRCSRLHNKPTFSQTIALLNIYRNPQNSSQSADGLRCAVSDVEMQEHYDEFFEEVFTEMEEKYGEVEEMNVCDNLGDHLVGNVYVKFRREEDAEKAVIDLNNRWFNGQPIHAELSPVTDFREACCRQYEMGECTRGGFCNFMHLKPISRELRRELYGRRRKKHRSRSRSRERRSRSRDRGRGGGGGGGGGGGGRERDRRRSRDRERSGRF

SEQ ID NO: 3467 - protein, 312 aa, Homo sapiens
MEEECRVLSIQSHVIRGYVGNRAATFPLQVLGFEIDAVNSVQFSNHTGYAHWKGQVLNSDELQELYEGLRLNNMNKYDYVLTGYTRDKSFLAMVVDIVQELKQQNPRLVYVCDPVLGDKWDGEGSMYVPEDLLPVYKEKVVPLADIITPNQFEAELLSGRKIHSQEEALRVMDMLHSMGPDTVVITSSDLPSPQGSNYLIVLGSQRRRNPAGSVVMERIRMDIRKVDAVFVGTGDLFAAMLLAWTHKHPNNLKVACEKTVSTLHHVLQRTIQCAKAQAGEGVRPSPMQLELRMVQSKRDIEDPEIVVQATVL

SEQ ID NO: 3468 - protein, 98 aa, Homo sapiens
MMCGAPSATQPATAETQHIADQVRSQLEEKENKKFPVFKAVSFKSQVVAGTNYFIKVHVGDEDFVHLRVFQSLPHENKPLTLSNYQTNKAKHDELTYF

SEQ ID NO: 3469 - protein, 1259 aa, Homo sapiens
MDASEEPLPPVIYTMENKPIVTCAGDQNLFTSVYPTLSQQLPREPMEWRRSYGRAPKMIHLESNFVQFKEELLPKEGNKALLTFPFLHIYWTECCDTEVYKATVKDDLTKWQNVLKAHSSVDWLIVIVENDAKKKNKTNILPRTSIVDKIRNDFCNKQSDRCVVLSDPLKDSSRTQESWNAFLTKLRTLLLMSFTKNLGKFEDDMRTLREKRTEPGWSFCEYFMVQEELAFVFEMLQQFEDALVQYDELDALFSQYVVNFGAGDGANWLTFFCQPVKSWNGLILRKPIDMEKRESIQRREATLLDLRSYLFSRQCTLLLFLQRPWEVAQRALELLHNCVQELKLLEVSVPPGALDCWVFLSCLEVLQRIEGCCDRAQIDSNIAHTVGLWSYATEKLKSLGYLCGLVSEKGPNSEDLNRTVDLLAGLGAERPETANTAQSPYKKLKEALSSVEAFEKHYLDLSHATIEMYTSIGRIRSAKFVGKDLAEFYMRKKAPQKAEIYLQGALKNYLAEGWALPITHTRKQLAECQKHLGQIENYLQTSSLLASDHHLTEEERKHFCQEILDFASQPSDSPGHKIVLPMHSFAQLRDLHFDPSNAVVHVGGVLCVEITMYSQMPVPVHVEQIVVNVHFSIEKNSYRKTAEWLTKHKTSNGIINFPPETAPFPVSQNSLPALELYEMFERSPSDNSLNTTGIICRNVHMLLRRQESSSSLEMPSGVALEEGAHVLRCSHVTLEPGANQITFRTQAKEPGTYTLRQLCASVGSVWFVLPHIYPIVQYDVYSQEPQLHVEPLADSLLAGIPQRVKFTVTTGHYTIKNGDSLQLSNAEAMLILCQAESRAVVYSNTREQSSEAALRIQSSDKVTSISLPVAPAYHVIEFELEVLSLPSAPALGGESDMLGMAEPHRKHKDKQRTGRCMVTTDHKVSIDCPWSIYSTVIALTFSVPFRTTHSLLSSGTRKYVQVCVQNLSELDFQLSDSYLVDTGDSTDLQLVPLNTQSQQPIYSKQSVFFVWELKWTEEPPPSLHCRFSVGFSPASEEQLSISLKPYTYEFKVENFFTLYNVKAEIFPPSGMEYCRTGSLCSLEVLITRLSDLLEVDKDEALTESDEHFSTKLMYEVVDNSSNWAVCGKSCGVISMPVAARATHRVHMEVMPLFAGYLPLPDVRLFKYLPHHSAHSSQLDADSWIENDSLSVDKHGDDQPDSSSLKSRGSVHSACSSEHKGLPMPRLQALPAGQVFNSSSGTQVLVIPSQDDHVLEVSVT

SEQ ID NO: 3470 - protein, 257 aa, Homo sapiens
MGTVRPPRPSLLLVSTRESCLFLLFCLHLGAACPQPCRCPDHAGAVAVFCSLRGLQEVPEDIPANTVLLKLDANKISHLPDGAFQHLHRLRELDLSHNAIEAIGSATFAGLAGGLRLLDLSYNRIQRIPKDALGKLSAKIRLSHNPLHCECALQEALWELKLDPDSVDEIACHTSVQEEFVGKPLVQALDAGASLCSVPHRTTDVAMLVTMFGWFAMVIAYVVYYVRHNQEDARRHLEYLKSLPSAPASKDPIGPGP

SEQ ID NO: 3471 - protein, 374 aa, Homo sapiens
MSLLVVSMACVGFFLLQGAWPHEGVHRKPSLLAHPGRLVKSEETVILQCWSDVMFEHFLLHREGMFNDTLRLIGEHHDGVSKANFSISRMTQDLAGTYRCYGSVTHSPYQVSAPSDPLDIVIIGLYEKPSLSAQLGPTVLAGENVTLSCSSRSSYDMYHLSREGEAHERRLPAGPKVNGTFQADFPLGPATHGGTYRCFGSFHDSPYEWSKSSDPLLVSVTGNPSNSWPSPTEPSSKTERMFHHVGQACLKLPTSSDPTVSACQSNPRHLHILIGTSVVIILFILLFFLLHRWCSNKKNAAVMDQESAGNRTANSEDSDEQDPQEVTYTQLNHCVFTQRKITRPSQRPKTPPTDIIVYTELPNAESRSKVVSCP

SEQ ID NO: 3472 - protein, 230 aa, Homo sapiens
MGKVRGLRARVHQAAVRPKGEAAPGPAPPAPEATPPPASAAGKDWAFINTNIFARTKIDPSALVQKLELDVRSVTSVRRGEAGSSARSVPSIRRGAEAKTVLPKKEKMKLRREQWLQKIEAIKLAEQKHREERRRRATVVVGDLHPLRDALPELLGLEAGSRRQARSRESNKPRPSELSRMSAAQRQQLLEEERTRFQELLASPAYRASPLVAIGQTLARQMQLEDGGQL

SEQ ID NO: 3473 - protein, 1980 aa, Homo sapiens
MNPTNPFSGQQPSAFSASSSNVGTLPSKPPFRFGQPSLFGQNSTLSGKSSGFSQVSSFPASSGVSHSSSVQTLGFTQTSSVGPFSGLEHTSTFVATSGPSSSSVLGNTGFSFKSPTSVGAFPSTSAFGQEAGEIVNSGFGKTEFSFKPLENAVFKPILGAESEPEKTQSQIASGFFTFSHPISSAPGGLAPFSFPQVTSSSATTSNFTFSKPVSSNNSLSAFTPALSNQNVEEEKRGPKSIFGSSNNSFSSFPVSSAVLGEPFQASKAGVRQGCEEAVSQVEPLPSLMKGLKRKEDQDRSPRRHGHEPAEDSDPLSRGDHPPDKRPVRLNRPRGGTLFGRTIQDVFKSNKEVGRLGNKEAKKETGFVESAESDHMAIPGGNQSVLAPSRIPGVNKEEETESREKKEDSLRGTPARQSNRSESTDSLGGLSPSEVTAIQCKNIPDYLNDRTILENHFGKIAKVQRIFTRRSKKLAVVHFFDHASAALARKKGKSLHKDMAIFWHRKKISPNKKPFSLKEKKPGDGEVSPSTEDAPFQHSPLGKAAGRTGASSLLNKSSPVKKPSLLKAHQFEGDSFDSASEGSEGLGPCVLSLSTLIGTVAETSKEKYRLLDQRDRIMRQARVKRTDLDKARTFVGTCLDMCPEKERYMRETRSQLSVFEVVPGTDQVDHAAAVKEYSRSSADQEEPLPHELRPLPVLSRTMDYLVTQIMDQKEGSLRDWYDFVWNRTRGIRKDITQQHLCDPLTVSLIEKCTRFHIHCAHFMCEEPMSSFDAKINNENMTKCLQSLKEMYQDLRNKGVFCASEAEFQGYNVLLSLNKGDILREVQQFHPAVRNSSEVKFAVQAFAALNSNNFVRFFKLVQSASYLNACLLHCYFSQIRKDALRALNFAYTVSTQRSTIFPLDGVVRMLLFRDCEEATDFLTCHGLTVSDGCVELNRSAFLEPEGLSKTRKSVFITRKLTVSVGEIVNGGPLPPVPRHTPVCSFNSQNKYIGESLAAELPVSTQRPGSDTVGGGRGEECGVEPDAPLSSLPQSLPAPAPSPVPLPPVLALTPSVAPSLFQLSVQPEPPPPEPVPMYSDEDLAQVVDELIQEALQRDCEEVGSAGAAYAAAALGVSNAAMEDLLTAATTGILRHIAAEEVSKERERREQERQRAEEERLKQERELVLSELSQGLAVELMERVMMEFVRETCSQELKNAVETDQRVRVARCCEDVCAHLVDLFLVEEIFQTAKETLQELQCFCKYLQRWREAVTARKKLRRQMRAFPAAPCCVDVSDRLRALAPSAECPIAEENLARGLLDLGHAGRLGISCTRLRRLRNKTAHQMKVQHFYQQLLSDVAWASLDLPSLVAEHLPGRQEHVFWKLVLVLPDVEEQSPESCGRILANWLKVKFMGDEGSVDDTSSDAGGIQTLSLFNSLSSKGDQMISVNVCIKVAHGALSDGAIDAVETQKDLLGASGLMLLLPPKMKSEDMAEEDVYWLSALLQLKQLLQAKPFQPALPLVVLVPSPGGDAVEKEVEDGLMLQDLVSAKLISDYTVTEIPDTINDLQGSTKVLQAVQWLVSHCPHSLDLCCQTLIQYVEDGIGHEFSGRFFHDRRERRLGGLASQEPGAIIELFNSVLQFLASVVSSEQLCDLSWPVTEFAEAGGSRLLPHLHWNAPEHLAWLKQAVLGFQLPQMDLPPLGAPWLPVCSMVVQYASQIPSSRQTQPVLQSQVENLLHRTYCRWKSKSPSPVHGAGPSVMEIPWDDLIALCINHKLRDWTPPRLPVTSEALSEDGQICVYFFKNDLKKYDVPLSWEQARLQTQKELQLREGRLAIKPFHPSANNFPIPLLHMHRNWKRSTECAQEGRIPSTEDLMRGASAEELLAQCLSSSLLLEKEENKRFEDQLQQWLSEDSGAFTDLTSLPLYLPQTLVSLSHTIEPVMKTSVTTSPQSDMMREQLQLSEATGTCLGERLKHLERLIRSSREEEVASELHLSALLDMVDI

SEQ ID NO: 3474 - protein, 92 aa, Homo sapiens
MSELEKAMVALIDVFHQYSGREGDKHKLKKSELKELINNELSHFLEEIKEQEVVDKVMETLDNDGDGECDFQEFMAFVAMVTTACHEFFEHE

SEQ ID NO: 3475 - protein, 595 aa, Homo sapiens
MLLLLLLLPPLLCGRVGAKEQKDYLLTMQKSVTVQEGLCVSVLCSFSYPQNGWTASDPVHGYWFRAGDHVSRNIPVATNNPARAVQEETRDRFHLLGDPQNKDCTLSIRDTRESDAGTYVFCVERGNMKWNYKYDQLSVNVTASQDLLSRYRLEVPESVTVQEGLCVSVPCSVLYPHYNWTASSPVYGSWFKEGADIPWDIPVATNTPSGKVQEDTHGRFLLLGDPQTNNCSLSIRDARKGDSGKYYFQVERGSRKWNYIYDKLSVHVTALTHMPTFSIPGTLESGHPRNLTCSVPWACEQGTPPTITWMGASVSSLDPTITRSSMLSLIPQPQDHGTSLTCQVTLPGAGVTMTRAVRLNISYPPQNLTMTVFQGDGTASTTLRNGSALSVLEGQSLHLVCAVDSNPPARLSWTWGSLTLSPSQSSNLGVLELPRVHVKDEGEFTCRAQNPLGSQHISLSLSLQNEYTGKMRPISGVTLGAFGGAGATALVFLYFCIIFVVVRSCRKKSARPAVGVGDTGMEDANAVRGSASQGPLIESPADDSPPHHAPPALATPSPEEGEIQYASLSFHKARPQYPQEQEAIGYEYSEINIPK

SEQ ID NO: 3476 - protein, 275 aa, Homo sapiens
MELDRAVGVLGAATLLLSFLGMAWALQAADTCPGERGPPGPPGKAGPPGPNGAPGEPQPCLTGPRTCKDLLDRGHFLSGWHTIYLPDCRPLTVLCDMDTDGGGWTVFQRRVDGSVDFYRDWATYKQGFGSRLGEFWLGNDNIHALTAQGTSELRVDLVDFEDNYQFAKYRSFKVADEAEKYNLVLGAFVEGSAGDSLTFHNNQSFSTKDQDNDLNTGNCAVMFQGAWWYKNCHVSNLNGRYLRGTHGSFANGINWKSGKGYNYSYKVSEMKVRPA

SEQ ID NO: 3477 - protein, 313 aa, Homo sapiens
MELDRAVGVLGAATLLLSFLGMAWALQAADTCPEVKMVGLEGSDKLTILRGCPGLPGAPGPKGEAGTNGKRGERGPPGPPGKAGPPGPNGAPGEPQPCLTGPRTCKDLLDRGHFLSGWHTIYLPDCRPLTVLCDMDTDGGGWTVFQRRVDGSVDFYRDWATYKQGFGSRLGEFWLGNDNIHALTAQGTSELRVDLVDFEDNYQFAKYRSFKVADEAEKYNLVLGAFVEGSAGDSLTFHNNQSFSTKDQDNDLNTGNCAVMFQGAWWYKNCHVSNLNGRYLRGTHGSFANGINWKSGKGYNYSYKVSEMKVRPA

SEQ ID NO: 3478 - protein, 499 aa, Homo sapiens
MTLILTSLLFFGLSLGPRTRVQAENLLKPILWAEPGPVITWHNPVTIWCQGTLEAQGYRLDKEGNSMSRHILKTLESENKVKLSIPSMMWEHAGRYHCYYQSPAGWSEPSDPLELVVTAYSRPTLSALPSPVVTSGVNVTLRCASRLGLGRFTLIEEGDHRLSWTLNSHQHNHGKFQALFPMGPLTFSNRGTFRCYGYENNTPYVWSEPSDPLQLLVSGVSRKPSLLTLQGPVVTPGENLTLQCGSDVGYIRYTLYKEGADGLPQRPGRQPQAGLSQANFTLSPVSRSYGGQYRCYGAHNVSSEWSAPSDPLDILIAGQISDRPSLSVQPGPTVTSGEKVTLLCQSWDPMFTFLLTKEGAAHPPLRLRSMYGAHKYQAEFPMSPVTSAHAGTYRCYGSRSSNPYLLSHPSEPLELVVSGATETLNPAQKKSDSKTAPHLQDYTVENLIRMGVAGLVLLFLGILLFEAQHSQRSPPRCSQEANSRKDNAPFRVVEPWEQI

SEQ ID NO: 3479 - protein, 707 aa, Homo sapiens
MAAAATAAEGVPSRGPPGEVIHLNVGGKRFSTSRQTLTWIPDSFFSSLLSGRISTLKDETGAIFIDRDPTVFAPILNFLRTKELDPRGVHGSSLLHEAQFYGLTPLVRRLQLREELDRSSCGNVLFNGYLPPPVFPVKRRNRHSLVGPQQLGGRPAPVRRSNTMPPNLGNAGLLGRMLDEKTPPSPSGQPEEPGMVRLVCGHHNWIAVAYTQFLVCYRLKEASGWQLVFSSPRLDWPIERLALTARVHGGALGEHDKMVAAATGSEILLWALQAEGGGSEIGVFHLGVPVEALFFVGNQLIATSHTGRIGVWNAVTKHWQVQEVQPITSYDAAGSFLLLGCNNGSIYYVDVQKFPLRMKDNDLLVSELYRDPAEDGVTALSVYLTPKTSDSGNWIEIAYGTSSGGVRVIVQHPETVGSGPQLFQTFTVHRSPVTKIMLSEKHLISVCADNNHVRTWSVTRFRGMISTQPGSTPLASFKILALESADGHGGCSAGNDIGPYGERDDQQVFIQKVVPSASQLFVRLSSTGQRVCSVRSVDGSPTTAFTVLECEGSRRLGSRPRRYLLTGQANGSLAMWDLTTAMDGLGQAPAGGLTEQELMEQLEHCELAPPAPSAPSWGCLPSPSPRISLTSLHSASSNTSLSGHRGSPSPPQAEARRRGGGSFVERCQELVRSGPDLRRPPTPAPWPSSGLGTPLTPPKMKLNETSF

SEQ ID NO: 3480 - protein, 410 aa, Homo sapiens
MSLMVVSMACVGFFLLEGPWPHVGGQDKPFLSAWPGTVVSEGQHVTLQCRSRLGFNEFSLSKEDGMPVPELYNRIFRNSFLMGPVTPAHAGTYRCCSSHPHSPTGWSAPSNPVVIMVTGVHRKPSLLAHPGPLVKSGETVILQCWSDVRFERFLLHREGITEDPLRLVGQLHDAGSQVNYSMGPMTPALAGTYRCFGSVTHLPYELSAPSDPLDIVVVGLYGKPSLSAQPGPTVQAGENVTLSCSSRSLFDIYHLSREAEAGELRLTAVLRVNGTFQANFPLGPVTHGGNYRCFGSFRALPHAWSDPSDPLPVSVTGNSRNLHVLIGTSVVIIPFAILLFFLLHRWCANKKNAVVMDQEPAGNRTVNREDSDEQDPQEVTYAQLNHCVFTQRKITRPSQRPKTPPTDTSV

SEQ ID NO: 3481 - protein, 304 aa, Homo sapiens
MSSTLPALLCVGLCLSQRISAQQQTLPKPFIWAEPHFMVPKEKQVTICCQGNYGAVEYQLHFEGSLFAVDRPKPPERINKVQFYIPDMNSRMAGQYSCIYRVGELWSEPSNLLDLVVTEMYDTPTLSVHPGPEVISGEKVTFYCRLDTATSMFLLLKEGRSSHVQRGYGKVQAEFPLGPVTTAHRGTYRCFGSYNNHAWSFPSEPVKLLVTGDIENTSLAPEDPTFPADTWGTYLLTTETGLQKDHALWDHTAQNLLRMGLAFLVLVALVWFLVEDWLSRKRTRERASRASTWEGRRRLNTQTL

SEQ ID NO: 3482 - protein, 220 aa, Homo sapiens
MSRYLLPLSALGTVAGAAVLLKDYVTGGACPSKATIPGKTVIVTGANTGIGKQTALELARRGGNIILACRDMEKCEAAAKDIRGETLNHHVNARHLDLASLKSIREFAAKIIEEEERVDILINNAGVMRCPHWTTEDGFEMQFGVNHLGHFLLTNLLLDKLKASAPSRIINLSSLAHVAGHIDFDDLNWQTRKYNTKAAYCQSKLAIVLFTKELSRRLQG

SEQ ID NO: 3483 - protein, 766 aa, Homo sapiens
MASDTPESLMALCTDFCLRNLDGTLGYLLDKETLRLHPDIFLPSEICDRLVNEYVELVNAACNFEPHESFFSLFSDPRSTRLTRIHLREDLVQDQDLEAIRKQDLVELYLTNCEKLSAKSLQTLRSFSHTLVSLSLFGCTNIFYEEENPGGCEDEYLVNPTCQVLVKDFTFEGFSRLRFLNLGRMIDWVPVESLLRPLNSLAALDLSGIQTSDAAFLTQWKDSLVSLVLYNMDLSDDHIRVIVQLHKLRHLDISRDRLSSYYKFKLTREVLSLFVQKLGNLMSLDISGHMILENCSISKMEEEAGQTSIEPSKSSIIPFRALKRPLQFLGLFENSLCRLTHIPAYKVSGDKNEEQVLNAIEAYTEHRPEITSRAINLLFDIARIERCNQLLRALKLVITALKCHKYDRNIQVTGSAALFYLTNSEYRSEQSVKLRRQVIQVVLNGMESYQEVTVQRNCCLTLCNFSIPEELEFQYRRVNELLLSILNPTRQDESIQRIAVHLCNALVCQVDNDHKEAVGKMGFVVTMLKLIQKKLLDKTCDQVMEFSWSALWNITDETPDNCEMFLNFNGMKLFLDCLKEFPEKQELHRNMLGLLGNVAEVKELRPQLMTSQFISVFSNLLESKADGIEVSYNACGVLSHIMFDGPEAWGVCEPQREEVEERMWAAIQSWDINSRRNINYRSFEPILRLLPQGISPVSQHWATWALYNLVSVYPDKYCPLLIKEGGMPLLRDIIKMATARQETKEMARKVIEHCSNFKEENMDTSR

SEQ ID NO: 3484 - protein, 177 aa, Homo sapiens
MLGCGIPALGLLLLLQGSADGNGIQGFFYPWSCEGDIWDRESCGGQAAIDSPNLCLRLRCCYRNGVCYHQRPDENVRRKHMWALVWTCSGLLLLSCSICLFWWAKRRDVLHMPGFLAGPCDMSKSVSLLSKHRGTKKTPSTGSVPVALSKESRDVEGGTEGEGTEEGEETEGEEEED

SEQ ID NO: 3485 - protein, 311 aa, Homo sapiens
MADVINVSVNLEAFSQAISAIQALRSSVSRVFDCLKDGMRNKETLEGREKAFIAHFQDNLHSVNRDLNELERLSNLVGKPSENHPLHNSGLLSLDPVQDKTPLYSQLLQAYKWSNKLQYHAGLASGLLNQQSLKRSANQMGVSAKRRPKAQPTTLVLPPQYVDDVISRIDRMFPEMSIHLSRPNGTSAMLLVTLGKVLKVIVVMRSLFIDRTIVKGYNENVYTEDGKLDIWSKSNYQVFQKVTDHATTALLHYQLPQMPDVVVRSFMTWLRSYIKLFQAPCQRCGKFLQDGLPPTWRDFRTLEAFHDTCRQ

SEQ ID NO: 3486 - protein, 208 aa, Homo sapiens
MASSLLAGERLVRALGPGGELEPERLPRKLRAELEAALGKKHKGGDSSSGPQRLVSFRLIRDLHQHLRERDSKLYLHELLEGSEIYLPEVVKPPRNPELVARLEKIKIQLANEEYKRITRNVTCQDTRHGGTLSDLGKQVRSLKALVITIFNFIVTVVAAFVCTYLGSQYIFTEMASRVLAALIVASVVGLAELYVMVRAMEGELGEL

SEQ ID NO: 3487 - protein, 640 aa, Homo sapiens
MGTRSSPEEGTPPPLVPECDVEVQPQGHPEESREQEASEVLAEPSSRGGAEQQAEEEEVGEGSSTESSRDAPEATPPIAMAATPPASTSSREGVRGAARRLQGQQLEALTRVALMEQRVKELQRQRKELRIEMEVEVALLRGELAGERVAARREEEQLRELLEQQAASEQRGRQQREQEQRRLSQERDRLEGLRQRLRKAQGQLDSQPEDQRERLLQGVQEMREQLDVAQRAYEDLEFQQLERESRQEEEDRDSPGPQVPDPKVQELQASMAQHRRGALQHRIRVLEEQLKSLGEQMAAESRGLSRKKEEALQALSQERSRLLELNCLQGTPGGDFSEPNPALTKLLFTQKTDRQLLVLQDAVAHSAATPTSSCLFSVHSSLQGSIGLQRTGSLPRKRGERGSQRGSPRPLSFHCTESLEASALPPAVGDSGRYPLYQLLNCGRGNSCGAIHPDIAHMERLLQQAMAERERLLKAREGTRRGTEGSSGPAVPAITAPPTPPHPPGPRILDLRQHLEGWGHNPENCPHVQVSGCCCRGPLVKMGGRIKTWRKRWFCFDRQARRLAYYADKEETKLKGVIYFQAIEEVYYDHLRCAFKSPNPRLTFCVKTYERLFYMVAPSPEAMRIWMDVIVTAADENHAP

SEQ ID NO: 3488 - protein, 40 aa, Homo sapiens
MEQGKGLAVLILAIILLQGTLAQSIKGRRNGFFLYSDSEY

SEQ ID NO: 3489 - protein, 254 aa, Homo sapiens
MAEAVLRVARRQLSQRGGSGAPILLRQMFEPVSCTFTYLLGDRESREAVLIDPVLETAPRDAQLIKELGLRLLYAVNTHCHADHITGSGLLRSLLPGCQSVISRLSGAQADLHIEDGDSIRFGRFALETRASPGHTPGCVTFVLNDHSMAFTGDALLIRGCGRTDFQQGCAKTLYHSVHEKIFTLPGDCLIYPAHDYHGFTVSTVEEERTLNPRLTLSCEEFVKIMGNLNLPKPQQIDFAVPANMRCGVQTPTA

SEQ ID NO: 3490 - protein, 539 aa, Homo sapiens
MGSPEDDLIGIPFPDHSSELLSCLNEQRQLGHLCDLTIRTQGLEYRTHRAVLAACSHYFKKLFTEGGGGAVMGAGGSGTATGGAGAGVCELDFVGPEALGALLEFAYTATLTTSSANMPAVLQAARLLEIPCVIAACMEILQGSGLEAPSPDEDDCERARQYLEAFATATASGVPNGEDSPPQVPLPPPPPPPPRPVARRSRKPRKAFLQTKGARANHLVPEVPTVPAHPLTYEEEEVAGRVGSSGGSGPGDSYSPPTGTASPPEGPQSYEPYEGEEEEEELVYPPAYGLAQGGGPPLSPEELGSDEDAIDPDLMAYLSSLHQDNLAPGLDSQDKLVRKRRSQMPQECPVCHKIIHGAGKLPRHMRTHTGEKPFACEVCGVRFTRNDKLKIHMRKHTGERPYSCPHCPARFLHSYDLKNHMHLHTGDRPYECHLCHKAFAKEDHLQRHLKGQNCLEVRTRRRRKDDAPPHYPPPSTAAASPAGLDLSNGHLDTFRLSLARFWEQSAPTGPPVSTPGPPDDDEEEGAPTTPQAEGAMESS

SEQ ID NO: 3491 - protein, 587 aa, Homo sapiens
MGWDLGTRLFQRQEQRSRLSRIWLEKTRVFLEGSTRTPALPHCLFWLLQVPSTQDPLFPGYGPQCPVDLAGPPCLRPLFGGLGGYWRALQRGREGRTMTSRASELSPGRSVTAGIIIVGDEILKGHTQDTNTFFLCRTLRSLGVQVCRVSVVPDEVATIAAEVTSFSNRFTHVLTAGGIGPTHDDVTFEAVAQAFGDELKPHPKLEAATKALGGEGWEKLSLVPSSARLHYGTDPCTGQPFRFPLVSVRNVYLFPGIPELLRRVLEGMKGLFQNPAVQFHSKELYVAADEASIAPILAEAQAHFGRRLGLGSYPDWGSNYYQVKLTLDSEEEGPLEECLAYLTARLPQGSLVPYMPNAVEQASEAVYKLAESGSSLGKKVAGALQTIETSLAQYSLTQLCVGFNGGKDCTALLHLFHAAVQRKLPDVPNPLQILYIRSISPFPELEQFLQDTIKRYNLQMLEAEGSMKQALGELQARHPQLEAVLMGTRRTDPYSCSLCPFSPTDPGWPAFMRINPLLDWTYRDIWDFLRQLFVPYCILYDRGYTSLGSRENTVRNPALKCLSPGGHPTYRPAYLLENEEEERNSRT

SEQ ID NO: 3492 - protein, 975 aa, Homo sapiens
MRWGHHLPRASWGSGFRRALQRPDDRIPFLIHWSWPLQGERPFGPPRAFIRHHGSSVDSAPPPGRHGRLFPSASATEAIQRHRRNLAEWFSRLPREERQFGPTFALDTVHVDPVIRESTPDELLRPPAELALEHQPPQAGLPPLALSQLFNPDACGRRVQTVVLYGTVGTGKSTLVRKMVLDWCYGRLPAFELLIPFSCEDLSSLGPAPASLCQLVAQRYTPLKEVLPLMAAAGSHLLFVLHGLEHLNLDFRLAGTGLCSDPEEPQEPAAIIVNLLRKYMLPQASILVTTRPSAIGRIPSKYVGRYGEICGFSDTNLQKLYFQLRLNQPYCGYAVGGSGVSATPAQRDHLVQMLSRNLEGHHQIAAACFLPSYCWLVCATLHFLHAPTPAGQTLTSIYTSFLRLNFSGETLDSTDPSNLSLMAYAARTMGKLAYEGVSSRKTYFSEEDVCGCLEAGIRTEEEFQLLHIFRRDALRFFLAPCVEPGRAGTFVFTVPAMQEYLAALYIVLGLRKTTLQKVGKEVAELVGRVGEDVSLVLGIMAKLLPLRALPLLFNLIKVVPRVFGRMVGKSREAVAQAMVLEMFREEDYYNDDVLDQMGASILGVEGPRRHPDEPPEDEVFELFPMFMGGLLSAHNRAVLAQLGCPIKNLDALENAQAIKKKLGKLGRQVLPPSELLDHLFFHYEFQNQRFSAEVLSSLRQLNLAGVRMTPVKCTVVAAVLGSGRHALDEVNLASCQLDPAGLRTLLPVFLRARKLGLQLNSLGPEACKDLRDLLLHDQCQITTLRLSNNPLTAAGVAVLMEGLAGNTSVTHLSLLHTGLGDEGLELLAAQLDRNRQLQELNVAYNGAGDTAALALARAAREHPSLELLHLYFNELSSEGRQVLRDLGGAAEGGARVVVSLTEGTAVSEYWSVILSEVQRNLNSWDRARVQRHLELLLRDLEDSRGATLNPWRKAQLLRVEGEVRALLEQLGSSGS

SEQ ID NO: 3493 - protein, 422 aa, Homo sapiens
MQQPQPQGQQQPGPGQQLGGQGAAPGAGGGPGGGPGPGPCLRRELKLLESIFHRGHERFRIASACLDELSCEFLLAGAGGAGAGAAPGPHLPPRGSVPGDPVRIHCNITESYPAVPPIWSVESDDPNLAAVLERLVDIKKGNTLLLQHLKRIISDLCKLYNLPQHPDVEMLDQPLPAEQCTQEDVSSEDEDEEMPEDTEDLDHYEMKEEEPAEGKKSEDDGIGKENLAILEKIKKNQRQDYLNGAVSGSVQATDRLMKELRDIYRSQSFKGGNYAVELVNDSLYDWNVKLLKVDQDSALHNDLQILKEKEGADFILLNFSFKDNFPFDPPFVRVVSPVLSGGYVLGGGAICMELLTKQGWSSAYSIESVIMQISATLVKGKARVQFGANKSQYSLTRAQQSYKSLVQIHEKNGWYTPPKEDG

SEQ ID NO: 3494 - protein, 660 aa, Homo sapiens
MKVTLSALDTSESSFTPLVVIELAQDVKEETKEWLKNRIIAKKKDGGAQLLFRPLLNKYEQETLENQNLYLVGASKIRMLLGAEAVGLVKECNDNTMRAFTYRTRQNFKGFDDNNDDFLTMAECQFIIKHELENLRAKDEKMIPGYPQAKLYPGKSLLRRLLTSGIVIQVFPLHDSEALKKLEDTWYTRFALKYQPIDSIRGYFGETIALYFGFLEYFTFALIPMAVIGLPYYLFVWEDYDKYVIFASFNLIWSTVILELWKRGCANMTYRWGTLLMKRKFEEPRPGFHGVLGINSITGKEEPLYPSYKRQLRIYLVSLPFVCLCLYFSLYVMMIYFDMEVWALGLHENSGSEWTSVLLYVPSIIYAIVIEIMNRLYRYAAEFLTSWENHRLESAYQNHLILKVLVFNFLNCFASLFYIAFVLKDMKLLRQSLATLLITSQILNQIMESFLPYWLQRKHGVRVKRKVQALKADIDATLYEQVILEKEMGTYLGTFDDYLELFLQFGYVSLFSCVYPLAAAFAVLNNFTEVNSDALKMCRVFKRPFSEPSANIGVWQLAFETMSVISVVTNCALIGMSPQVNAVFPESKADLILIVVAVEHALLALKFILAFAIPDKPRHIQMKLARLEFESLEALKQQQMKLVTENLKEEPMESGKEKAT

SEQ ID NO: 3495 - protein, 1037 aa, Homo sapiens
MSPPLCPLLLLAVGLRLAGTLNPSDPNTCSFWESFTTTTKESHSRPFSLLPSEPCERPWEGPHTCPQPTVVYRTVYRQVVKTDHRQRLQCCHGFYESRGFCVPLCAQECVHGRCVAPNQCQCVPGWRGDDCSSECAPGMWGPQCDKPCSCGNNSSCDPKSGVCSCPSGLQPPNCLQPCTPGYYGPACQFRCQCHGAPCDPQTGACFCPAERTGPSCDVSCSQGTSGFFCPSTHSCQNGGVFQTPQGSCSCPPGWMGTICSLPCPEGFHGPNCSQECRCHNGGLCDRFTGQCRCAPGYTGDRCREECPVGRFGQDCAETCDCAPDARCFPANGACLCEHGFTGDRCTDRLCPDGFYGLSCQAPCTCDREHSLSCHPMNGECSCLPGWAGLHCNESCPQDTHGPGCQEHCLCLHGGVCQATSGLCQCAPGYTGPHCASLCPPDTYGVNCSARCSCENAIACSPIDGECVCKEGWQRGNCSVPCPPGTWGFSCNASCQCAHEAVCSPQTGACTCTPGWHGAHCQLPCPKGQFGEGCASRCDCDHSDGCDPVHGRCQCQAGWMGARCHLSCPEGLWGVNCSNTCTCKNGGTCLPENGNCVCAPGFRGPSCQRSCQPGRYGKRCVPCKCANHSFCHPSNGTCYCLAGWTGPDCSQPCPPGHWGENCAQTCQCHHGGTCHPQDGSCICPLGWTGHHCLEGCPLGTFGANCSQPCQCGPGEKCHPETGACVCPPGHSGAPCRIGIQEPFTVMPTTPVAYNSLGAVIGIAVLGSLVVALVALFIGYRHWQKGKEHHHLAVAYSSGRLDGSEYVMPDVPPSYSHYYSNPSYHTLSQCSPNPPPPNKVPGPLFASLQNPERPGGAQGHDNHTTLPADWKHRREPPPGPLDRGSSRLDRSYSYSYSNGPGPFYNKGLISEEELGASVASLSSENPYATIRDLPSLPGGPRESSYMEMKGPPSGSPPRQPPQFWDSQRRRQPQPQRDSGTYEQPSPLIHDRDSVGSQPPLPPGLPPGHYDSPKNSHIPGHYDLPPVRHPPSPPLRRQDR

SEQ ID NO: 3496 - protein, 311 aa, Homo sapiens
MAEASPHPGRYFCHCCSVEIVPRLPDYICPRCESGFIEELPEETRSTENGSAPSTAPTDQSRPPLEHVDQHLFTLPQGYGQFAFGIFDDSFEIPTFPPGAQADDGRDPESRRERDHPSRHRYGARQPRARLTTRRATGRHEGVPTLEGIIQQLVNGIITPATIPSLGPWGVLHSNPMDYAWGANGLDAIITQLLNQFENTGPPPADKEKIQALPTVPVTEEHVGSGLECPVCKDDYALGERVRQLPCNHLFHDGCIVPWLEQHDSCPVCRKSLTGQNTATNPPGLTGVSFSSSSSSSSSSSPSNENATSNS

SEQ ID NO: 3497 - protein, 579 aa, Homo sapiens
MSALRPLLLLLLPLCPGPGPGPGSEAKVTRSCAETRQVLGARGYSLNLIPPALISGEHLRVCPQEYTCCSSETEQRLIRETEATFRGLVEDSGSFLVHTLAARHRKFDEFFLEMLSVAQHSLTQLFSHSYGRLYAQHALIFNGLFSRLRDFYGESGEGLDDTLADFWAQLLERVFPLLHPQYSFPPDYLLCLSRLASSTDGSLQPFGDSPRRLRLQITRTLVAARAFVQGLETGRNVVSEALKVPVSEGCSQALMRLIGCPLCRGVPSLMPCQGFCLNVVRGCLSSRGLEPDWGNYLDGLLILADKLQGPFSFELTAESIGVKISEGLMYLQENSAKVSAQVFQECGPPDPVPARNRRAPPPREEAGRLWSMVTEEERPTTAAGTNLHRLVWELRERLARMRGFWARLSLTVCGDSRMAADASLEAAPCWTGAGRGRYLPPVVGGSPAEQVNNPELKVDASGPDVPTRRRRLQLRAATARMKTAALGHDLDGQDADEDASGSGGGQQYADDWMAGAVAPPARPPRPPYPPRRDGSGGKGGGGSARYNQGRSRSGGASIGFHTQTILILSLSALALLGPR

SEQ ID NO: 3498 - protein, 298 aa, Homo sapiens
MVRMVPVLLSLLLLLGPAVPQENQDGRYSLTYIYTGLSKHVEDVPAFQALGSLNDLQFFRYNSKDRKSQPMGLWRQVEGMEDWKQDSQLQKAREDIFMETLKDIVEYYNDSNGSHVLQGRFGCEIENNRSSGAFWKYYYDGKDYIEFNKEIPAWVPFDPAAQITKQKWEAEPVYVQRAKAYLEEECPATLRKYLKYSKNILDRQDPPSVVVTSHQAPGEKKKLKCLAYDFYPGKIDVHWTRAGEVQEPELRGDVLHNGNGTYQSWVVVAVPPQDTAPYSCHVQHSSLAQPLVVPWEAS

SEQ ID NO: 3499 - protein, 802 aa, Homo sapiens
MRLLLALLGVLLSVPGPPVLSLEASEEVELEPCLAPSLEQQEQELTVALGQPVRLCCGRAERGGHWYKEGSRLAPAGRVRGWRGRLEIASFLPEDAGRYLCLARGSMIVLQNLTLITGDSLTSSNDDEDPKSHRDPSNRHSYPQQAPYWTHPQRMEKKLHAVPAGNTVKFRCPAAGNPTPTIRWLKDGQAFHGENRIGGIRLRHQHWSLVMESVVPSDRGTYTCLVENAVGSIRYNYLLDVLERSPHRPILQAGLPANTTAVVGSDVELLCKVYSDAQPHIQWLKHIVINGSSFGADGFPYVQVLKTADINSSEVEVLYLRNVSAEDAGEYTCLAGNSIGLSYQSAWLTVLPEEDPTWTAAAPEARYTDIILYASGSLALAVLLLLAGLYRGQALHGRHPRPPATVQKLSRFPLARQFSLESGSSGKSSSSLVRGVRLSSSGPALLAGLVSLDLPLDPLWEFPRDRLVLGKPLGEGCFGQVVRAEAFGMDPARPDQASTVAVKMLKDNASDKDLADLVSEMEVMKLIGRHKNIINLLGVCTQEGPLYVIVECAAKGNLREFLRARRPPGPDLSPDGPRSSEGPLSFPVLVSCAYQVARGMQYLESRKCIHRDLAARNVLVTEDNVMKIADFGLARGVHHIDYYKKTSNGRLPVKWMAPEALFDRVYTHQSDVWSFGILLWEIFTLGGSPYPGIPVEELFSLLREGHRMDRPPHCPPELYGLMRECWHAAPSQRPTFKQLVEALDKVLLAVSEEYLDLRLTFGPYSPSGGDASSTCSSSDSVFSHDPLPLGSSSFPFGSGVQT

SEQ ID NO: 3500 - protein, 165 aa, Homo sapiens
MALLALLLVVALPRVWTDANLTARQRDPEDSQRTDEGDNRVWCHVCERENTFECQNPRRCKWTEPYCVIAAVKIFPRFFMVAKQCSAGCAAMERPKPEEKRFLLEEPMPFFYLKCCKIRYCNLEGPPINSSVFKEYAGSMGESCGGLWLAILLLLASIAAGLSLS

SEQ ID NO: 3501 - protein, 527 aa, Homo sapiens
MAQTLQMEIPNFGNSILECLNEQRLQGLYCDVSVVVKGHAFKAHRAVLAASSSYFRDLFNNSRSAVVELPAAVQPQSFQQILSFCYTGRLSMNVGDQFLLMYTAGFLQIQEIMEKGTEFFLKVSSPSCDSQGLHAEEAPSSEPQSPVAQTSGWPACSTPLPLVSRVKTEQQESDSVQCMPVAKRLWDSGQKEAGGGGNGSRKMAKFSTPDLAANRPHQPPPPQQAPVVAAAQPAVAAGAGQPAGGVAAAGGVVSGPSTSERTSPGTSSAYTSDSPGSYHNEEDEEEDGGEEGMDEQYRQICNMYTMYSMMNVGQTAEKVEALPEQVAPESRNRIRVRQDLASLPAELINQIGNRCHPKLYDEGDPSEKLELVTGTNVYITRAQLMNCHVSAGTRHKVLLRRLLASFFDRNTLANSCGTGIRSSTNDPRRKPLDSRVLHAVKYYCQNFAPNFKESEMNAIAADMCTNARRVVRKSWMPKVKVLKAEDDAYTTFISETGKIEPDMMGVEHGFETASHEGEAGPSAEALQ

SEQ ID NO: 3502 - protein, 94 aa, Homo sapiens
MASVGECPAPVPVKDKKLLEVKLGELPSWILMRDFSPSGIFGAFQRGYYRYYNKYINVKKGSISGITMVLACYVLFSYSFSYKHLKHERLRKYH

SEQ ID NO: 3503 - protein, 131 aa, Homo sapiens
MKIFLPVLLAALLGVERASSLMCFSCLNQKSNLYCLKPTICSDQDNYCVTVSASAGIGNLVTFGHSLSKTCSPACPIPEGVNVGVASMGISCCQSFLCNFSAADGGLRASVTLLGAGLLLSLLPALLRFGP

SEQ ID NO: 3504 - protein, 221 aa, Homo sapiens
MFHGIPATPGIGAPGNKPELYEEVKLYKNAREREKYDNMAELFAVVKTMQALEKAYIKDCVSPSEYTAACSRLLVQYKAAFRQVQGSEISSIDEFCRKFRLDCPLAMERIKEDRPITIKDDKGNLNRCIADVVSLFITVMDKLRLEIRAMDEIQPDLRELMETMHRMSHLPPDFEGRQTVSQWLQTLSGMSASDELDDSQVRQMLFDLESAYNAFNRFLHA

SEQ ID NO: 3505 - protein, 493 aa, Homo sapiens
MHTLVFLSTRQVLQCQPAACQALPLLPRELFPLLFKVAFMDKKTVVLRELVHTWPFPLLSFQQLLQECAHCSRALLQERPSTESMQAVILGLTARLHTSEPGASTQPLCRKHALRVLDMTGLLDDGVEQDPGTMSMWDCTAAVARTCIAQQQGGAAEPGPAPIPVEVRVDLRVNRASYAFLREALRSSVGSPLRLCCRDLRAEDLPMRNTVALLQLLDAGCLRRVDLRFNNLGLRGLSVIIPHVARFQHLASLRLHYVHGDSRQPSVDGEDNFRYFLAQMGRFTCLRELSMGSSLLSGRLDQLLSTLQSPLESLELAFCALLPEDLRFLARSPHAAHLKKLDLSGNDLSGSQLAPFQGLLQASAATLLHLELTECQLADTQLLATLPILTQCASLRYLGLYGNPLSMAGLKELLRDSVAQAELRTVVHPFPVDCYEGLPWPPPASVLLEASINEEKFARVEAELHQLLLASGRAHVLWTTDIYGRLAADYFSL

SEQ ID NO: 3506 - protein, 678 aa, Homo sapiens
MAANVGSMFQYWKRFDLQQLQRELDATATVLANRQDESEQSRKRLIEQSREFKKNTPEDLRKQVAPLLKSFQGEIDALSKRSKEAEAAFLNVYKRLIDVPDPVPALDLGQQLQLKVQRLHDIETENQKLRETLEEYNKEFAEVKNQEVTIKALKEKIREYEQTLKNQAETIALEKEQKLQNDFAEKERKLQETQMSTTSKLEEAEHKVQSLQTALEKTRTELFDLKTKYDEETTAKADEIEMIMTDLERANQRAEVAQREAETLREQLSSANHSLQLASQIQKAPDVEQAIEVLTRSSLEVELAAKEREIAQLVEDVQRLQASLTKLRENSASQISQLEQQLSAKNSTLKQLEEKLKGQADYEEVKKELNILKSMEFAPSEGAGTQDAAKPLEVLLLEKNRSLQSENAALRISNSDLSGRCAELQVRITEAVATATEQRELIARLEQDLSIIQSIQRPDAEGAAEHRLEKIPEPIKEATALFYGPAAPASGALPEGQVDSLLSIISSQRERFRARNQELEAENRLAQHTLQALQSELDSLRADNIKLFEKIKFLQSYPGRGSGSDDTELRYSSQYEERLDPFSSFSKRERQRKYLSLSPWDKATLSMGRLVLSNKMARTIGFFYTLFLHCLVFLVLYKLAWSESMERDCATFCAKKFADHLHKFHENDNGAAAGDLWQ

SEQ ID NO: 3507 - protein, 560 aa, Homo sapiens
MAAARLLPVPAGPQPLSFQAKLTFEDVAVLLSQDEWDRLCPAQRGLYRNVMMETYGNVVSLGLPGSKPDIISQLERGEDPWVLDRKGAKKSQGLWSDYSDNLKYDHTTACTQQDSLSCPWECETKGESQNTDLSPKPLISEQTVILGKTPLGRIDQENNETKQSFCLSPNSVDHREVQVLSQSMPLTPHQAVPSGERPYMCVECGKCFGRSSHLLQHQRIHTGEKPYVCSVCGKAFSQSSVLSKHRRIHTGEKPYECNECGKAFRVSSDLAQHHKIHTGEKPHECLECRKAFTQLSHLIQHQRIHTGERPYVCPLCGKAFNHSTVLRSHQRVHTGEKPHRCNECGKTFSVKRTLLQHQRIHTGEKPYTCSECGKAFSDRSVLIQHHNVHTGEKPYECSECGKTFSHRSTLMNHERIHTEEKPYACYECGKAFVQHSHLIQHQRVHTGEKPYVCGECGHAFSARRSLIQHERIHTGEKPFQCTECGKAFSLKATLIVHLRTHTGEKPYECNSCGKAFSQYSVLIQHQRIHTGEKPYECGECGRAFNQHGHLIQHQKVHRKL

SEQ ID NO: 3508 - protein, 343 aa, Homo sapiens
MASLQRSRVLRCCSCRLFQAHQVKKSVKWTCKACGEKQSFLQAYGEGSGADCRRHVQKLNLLQGQVSELPLRSLEETVSASEEENVGHQQAGNVKQQEKSQPSESRWLKYLEKDSQELELEGTGVCFSKQPSSKMEEPGPRFSQDLPRKRKWSRSTVQPPCSRGVQDSGGSEVAWGPQKGQAGLTWKVKQGSSPCLQENSADCSAGELRGPGKELWSPIQQVTATSSKWAQFVLPPRKSSHVDSEQPRSLQRDPRPAGPAQAKQGTPRAQASREGLSRPTAAVQLPRATHPVTSGSERPCGKTSWDARTPWAEGGPLVLEAQNPRPTRLCDLFITGEDFDDDV

SEQ ID NO: 3509 - protein, 634 aa, Homo sapiens
MAQGVLWILLGLLLWSDPGTASLPLLMDSVIQALAELEQKVPAAKTRHTASAWLMSAPNSGPHNRLYHFLLGAWSLNATELDPCPLSPELLGLTKEVARHDVREGKEYGVVLAPDGSTVAVEPLLAGLEAGLQGRRVINLPLDSMAAPWETGDTFPDVVAIAPDVRATSSPGLRDGSPDVTTADIGANTPDATKGCPDVQASLPDAKAKSPPTMVDSLLAVTLAGNLGLTFLRGSQTQSHPDLGTEGCWDQLSAPRTFTLLDPKASLLTMAFLNGALDGVILGDYLSRTPEPRPSLSHLLSQYYGAGVARDPGFRSNFRRQNGAALTSASILAQQVWGTLVLLQRLEPVHLQLQCMSQEQLAQVAANATKEFTEAFLGCPAIHPRCRWGAAPYRGRPKLLQLPLGFLYVHHTYVPAPPCTDFTRCAANMRSMQRYHQDTQGWGDIGYSFVVGSDGYVYEGRGWHWVGAHTLGHNSRGFGVAIVGNYTAALPTEAALRTVRDTLPSCAVRAGLLRPDYALLGHRQLVRTDCPGDALFDLLRTWPHFTAVSLRSLHYTARRPSVYTSSTRPLPPACNSCARTASARPPTSRRHVYSGNLGPAFAGHSAGNIPDPVTSAYAASAQPQTQPACPFPSS

SEQ ID NO: 3510 - protein, 104 aa, Homo sapiens
MKLAALLGLCVALSCSSAAAFLVGSAKPVAQPVAALESAAEAGAGTLANPLGTLNPLKLLLSSLGIPVNHLIEGSQKCVAELGPQAVGAVKALKALLGALTVFG

SEQ ID NO: 3511 - protein, 433 aa, Homo sapiens
MPDYLGADQRKTKEDEKDDKPIRALDEGDIALLKTYGQSTYSRQIKQVEDDIQQLLKKINELTGIKESDTGLAPPALWDLAADKQTLQSEQPLQVARCTKIINADSEDPKYIINVKQFAKFVVDLSDQVAPTDIEEGMRVGVDRNKYQIHIPLPPKIDPTVTMMQVEEKPDVTYSDVGGCKEQIEKLREVVETPLLHPERFVNLGIEPPKGVLLFGPPGTGKTLCARAVANRTDACFIRVIGSELVQKYVGEGARMVRELFEMARTKKACLIFFDEIDAIGGARFDDGAGGDNEVQRTMLELINQLDGFDPRGNIKVLMATNRPDTLDPALMRPGRLDRKIEFSLPDLEGRTHIFKIHARSMSVERDIRFELLARLCPNSTGAEIRSVCTEAGMFAIRARRKIATEKDFLEAVNKVIKSYAKFSATPRYMTYN

SEQ ID NO: 3512 - protein, 748 aa, Homo sapiens
MDVSGQETDWRSTAFRQKLVSQIEDAMRKAGVAHSKSSKDMESHVFLKAKTRDEYLSLVARLIIHFRDIHNKKSQASVSDPMNALQSLTGGPAAGAAGIGMPPRGPGQSLGGMGSLGAMGQPMSLSGQPPPGTSGMAPHSMAVVSTATPQTQLQLQQVALQQQQQQQQFQQQQQAALQQQQQQQQQQQFQAQQSAMQQQFQAVVQQQQQLQQQQQQQQHLIKLHHQNQQQIQQQQQQLQRIAQLQLQQQQQQQQQQQQQQQQALQAQPPIQQPPMQQPQPPPSQALPQQLQQMHHTQHHQPPPQPQQPPVAQNQPSQLPPQSQTQPLVSQAQALPGQMLYTQPPLKFVRAPMVVQQPPVQPQVQQQQTAVQTAQAAQMVAPGVQVSQSSLPMLSSPSPGQQVQTPQSMPPPPQPSPQPGQPSSQPNSNVSSGPAPSPSSFLPSPSPQPSQSPVTARTPQNFSVPSPGPLNTPVNPSSVMSPAGSSQAEEQQYLDKLKQLSKYIEPLRRMINKIDKNEDRKKDLSKMKSLLDILTDPSKRCPLKTLQKCEIALEKLKNDMAVPTPPPPPVPPTKQQYLCQPLLDAVLANIRSPVFNHSLYRTFVPAMTAIHGPPITAPVVCTRKRRLEDDERQSIPSVLQGEVARLDPKFLVNLDPSHCSNNGTVHLICKLDDKDLPSVPPLELSVPADYPAQSPLWIDRQWQYDANPFLQSVHRCMTSRLLQLPDKHSVTALLNTWAQSVHQACLSAA

SEQ ID NO: 3513 - protein, 259 aa, Homo sapiens
MNKLKSSQKDKVRQFMIFTQSSEKTAVSCLSQNDWKLDVATDNFFQNPELYIRESVKGSLDRKKLEQLYNRYKDPQDENKIGIDGIQQFCDDLALDPASISVLIIAWKFRAATQCEFSKQEFMDGMTELGCDSIEKLKAQIPKMEQELKEPGRFKDFYQFTFNFAKNPGQKGLDLEMAIAYWNLVLNGRFKFLDLWNKFLLEHHKRSIPKDTWNLLLDFSTMIADDMSNYDEEGAWPVLIDDFVEFARPQIAGTKSTTV

SEQ ID NO: 3514 - protein, 435 aa, Homo sapiens
MIGGLFIYNHKGEVLISRVYRDDIGRNAVDAFRVNVIHARQQVRSPVTNIARTSFFHVKRSNIWLAAVTKQNVNAAMVFEFLYKMCDVMAAYFGKISEENIKNNFVLIYELLDEILDFGYPQNSETGALKTFITQQGIKSQHQTKEEQSQITSQVTGQIGWRREGIKYRRNELFLDVLESVNLLMSPQGQVLSAHVSGRVVMKSYLSGMPECKFGMNDKIVIEKQGKGTADETSKSGKQSIAIDDCTFHQCVRLSKFDSERSISFIPPDGEFELMRYRTTKDIILPFRVIPLVREVGRTKLEVKVVIKSNFKPSLLAQKIEVRIPTPLNTSGVQVICMKGKAKYKASENAIVWKIKRMAGMKESQISAEIELLPTNDKKKWARPPISMNFEVPFAPSGLKVRYLKVFEPKLNYSDHDVIKWVRYIGRSGIYETRC

SEQ ID NO: 3515 - protein, 367 aa, Homo sapiens
MDAQCSAKVNARKRRKEAPGPNGATEEDGVPSKVQRCAVGLRQPAPFSDEIEVDFSKPYVRVTMEEASRGTPCERPVRVYADGIFDLFHSGHARALMQAKNLFPNTYLIVGVCSDELTHNFKGFTVMNENERYDAVQHCRYVDEVVRNAPWTLTPEFLAEHRIDFVAHDDIPYSSAGSDDVYKHIKEAGMFAPTQRTEGISTSDIITRIVRDYDVYARRNLQRGYTAKELNVSFINEKKYHLQERVDKVKKKVKDVEEKSKEFVQKVEEKSIDLIQKWEEKSREFIGSFLEMFGPEGALKHMLKEGKGRMLQAISPKQSPSSSPTRERSPSPSFRWPFSGKTSPPCSPANLSRHKAAAYDISEDEED

SEQ ID NO: 3516 - protein, 278 aa, Homo sapiens
MGARLSRRRLPADPSLALDALPPELLVQVLSHVPPRSLVTRCRPVCRAWRDIVDGPTVWLLQLARDRSAEGRALYAVAQRCLPSNEDKEEFPLCALARYCLRAPFGRNLIFNSCGEQGFRGWEVEHGGNGWAIEKNLTPVPGAPSQTCFVTSFEWCSKRQLVDLVMEGVWQELLDSAQIEICVADWWGARENCGCVYQLRVRLLDVYEKEVVKFSASPDPVLQWTERGCRQVSHVFTNFGKGIRYVSFEQYGRDVSSWVGHYGALVTHSSVRVRIRLS

SEQ ID NO: 3517 - protein, 79 aa, Homo sapiens
MQALRVSQALIRSFSSTARNRFQNRVREKQKLFQEDNDIPLYLKGGIVDNILYRVTMTLCLGGTVYSLYSLGWASFPRN

SEQ ID NO: 3518 - protein, 1233 aa, Homo sapiens
MGGALGPALLLTSLFGAWAGLGPGQGEQGMTVAVVFSSSGPPQAQFRARLTPQSFLDLPLEIQPLTVGVNTTNPSSLLTQICGLLGAAHVHGIVFEDNVDTEAVAQILDFISSQTHVPILSISGGSAVVLTPKEPGSAFLQLGVSLEQQLQVLFKVLEEYDWSAFAVITSLHPGHALFLEGVRAVADASHVSWRLLDVVTLELGPGGPRARTQRLLRQLDAPVFVAYCSREEAEVLFAEAAQAGLVGPGHVWLVPNLALGSTDAPPATFPVGLISVVTESWRLSLRQKVRDGVAILALGAHSYWRQHGTLPAPAGDCRVHPGPVSPAREAFYRHLLNVTWEGRDFSFSPGGYLVQPTMVVIALNRHRLWEMVGRWEHGVLYMKYPVWPRYSASLQPVVDSRHLTVATLEERPFVIVESPDPGTGGCVPNTVPCRRQSNHTFSSGDVAPYTKLCCKGFCIDILKKLARVVKFSYDLYLVTNGKHGKRVRGVWNGMIGEVYYKRADMAIGSLTINEERSEIVDFSVPFVETGISVMVARSNGTVSPSAFLEPYSPAVWVMMFVMCLTVVAITVFMFEYFSPVSYNQNLTRGKKSGGPAFTIGKSVWLLWALVFNNSVPIENPRGTTSKIMVLVWAFFAVIFLASYTANLAAFMIQEQYIDTVSGLSDKKFQRPQDQYPPFRFGTVPNGSTERNIRSNYRDMHTHMVKFNQRSVEDALTSLKMGKLDAFIYDAAVLNYMAGKDEGCKLVTIGSGKVFATTGYGIAMQKDSHWKRAIDLALLQFLGDGETQKLETVWLSGICQNEKNEVMSSKLDIDNMAGVFYMLLVAMGLALLVFAWEHLVYWKLRHSVPNSSQLDFLLAFSRGIYSCFSGVQSLASPPRQASPDLTASSAQASVLKMLQAARDMVTTAGVSSSLDRATRTIENWGGGRRAPPPSPCPTPRSGPSPCLPTPDPPPEPSPTGWGPPDGGRAALVRRAPQPPGRPPTPGPPLSDVSRVSRRPAWEARWPVRTGHCGRHLSASERPLSPARCHYSSFPRADRSGRPFLPLFPELEDLPLLGPEQLARREALLHAAWARGSRPRHASLPSSVAEAFARPSSLPAGCTGPACARPDGHSACRRLAQAQSMCLPIYREACQEGEQAGAPAWQHRQHVCLHAHAHLPFCWGAVCPHLPPCASHGSWLSGAWGPLGHRGRTLGLGTGYRDSGGLDEISRVARGTQGFPGPCTWRRISSLESEV

SEQ ID NO: 3519 - protein, 491 aa, Homo sapiens
MASRCWRWWGWSAWPRTRLPPAGSTPSFCHHFSTQEKTPQICVVGSGPAGFYTAQHLLKHPQAHVDIYEKQPVPFGLVRFGVAPDHPEVKNVINTFTQTAHSGRCAFWGNVEVGRDVTVPELQEAYHAVVLSYGAEDHRALEIPGEELPGVCSARAFVGWYNGLPENQELEPDLSCDTAVILGQGNVALDVARILLTPPEHLERTDITKAALGVLRQSRVKTVWLVGRRGPLQVAFTIKELREMIQLPGARPILDPVDFLGLQDKIKEVPRPRKRLTELLLRTATEKPGPAEAARQASASRAWGLRFFRSPQQVLPSPDGRRAAGVRLAVTRLEGVDEATRAVPTGDMEDLPCGLVLSSIGYKSRPVDPSVPFDSKLGVIPNVEGRVMDVPGLYCSGWVKRGPTGVIATTMTDSFLTGQMLLQDLKAGLLPSGPRPGYAAIQALLSSRGVRPVSFSDWEKLDAEEVARGQGTGKPREKLVDPQEMLRLLGH

SEQ ID NO: 3520 - protein, 660 aa, Homo sapiens
MNPDLRRERDSASFNPELLTHILDGSPEKTRRRREIENMILNDPDFQHEDLNFLTRSQRYEVAVRKSAIMVKKMREFGIADPDEIMWFKNFVHRGRPEPLDLHLGMFLPTLLHQATAEQQERFFMPAWNLEIIGTYAQTEMGHGTHLRGLETTATYDPETQEFILNSPTVTSIKWWPGGLGKTSNHAIVLAQLITKGKCYGLHAFIVPIREIGTHKPLPGITVGDIGPKFGYDEIDNGYLKMDNHRIPRENMLMKYAQVKPDGTYVKPLSNKLTYGTMVFVRSFLVGEAARALSKACTIAIRYSAVRHQSEIKPGEPEPQILDFQTQQYKLFPLLATAYAFQFVGAYMKETYHRINEGIGQGDLSELPELHALTAGLKAFTSWTANTGIEACRMACGGHGYSHCSGLPNIYVNFTPSCTFEGENTVMMLQTARFLMKSYDQVHSGKLVCGMVSYLNDLPSQRIQPQQVAVWPTMVDINSPESLTEAYKLRAARLVEIAAKNLQKEVIHRKSKEVAWNLTSVDLVRASEAHCHYVVVKLFSEKLLKIQDKAIQAVLRSLCLLYSLYGISQNAGDFLQGSIMTEPQITQVNQRVKELLTLIRSDAVALVDAFDFQDVTLGSVLGRYDGNVYENLFEWAKNSPLNKAEVHESYKHLKSLQSKL

SEQ ID NO: 3521 - protein, 190 aa, Homo sapiens
MEKVPGEMEIERRERSEELSEAERKAVQAMWARLYANCEDVGVAILVRFFVNFPSAKQYFSQFKHMEDPLEMERSPQLRKHACRVMGALNTVVENLHDPDKVSSVLALVGKAHALKHKVEPVYFKILSGVILEVVAEEFASDFPPETQRAWAKLRGLIYSHVTAAYKEVGWVQQVPNATTPPATLPSSGP

SEQ ID NO: 3522 - protein, 218 aa, Homo sapiens
MDGSGEQPRGGGPTSSEQIMKTGALLLQGFIQDRAGRMGGEAPELALDPVPQDASTKKLSECLKRIGDELDSNMELQRMIAAVDTDSPREVFFRVAADMFSDGNFNWGRVVALFYFASKLVLKALCTKVPELIRTIMGWTLDFLRERLLGWIQDQGGWVRLLKPPHPHHRALTTAPAPPSLPPATPLGPWAFWSRSQWCPLPIFRSSDVVYNAFSLRV

SEQ ID NO: 3523 - protein, 787 aa, Homo sapiens
MAVWIQAQQLQGEALHQMQALYGQHFPIEVRHYLSQWIESQAWDSVDLDNPQENIKATQLLEGLVQELQKKAEHQVGEDGFLLKIKLGHYATQLQNTYDRCPMELVRCIRHILYNEQRLVREANNGSSPAGSLADAMSQKHLQINQTFEELRLVTQDTENELKKLQQTQEYFIIQYQESLRIQAQFGPLAQLSPQERLSRETALQQKQVSLEAWLQREAQTLQQYRVELAEKHQKTLQLLRKQQTIILDDELIQWKRRQQLAGNGGPPEGSLDVLQSWCEKLAEIIWQNRQQIRRAEHLCQQLPIPGPVEEMLAEVNATITDIISALVTSTFIIEKQPPQVLKTQTKFAATVRLLVGGKLNVHMNPPQVKATIISEQQAKSLLKNENTRNDYSGEILNNCCVMEYHQATGTLSAHFRNMSLKRIKRSDRRGAESVTEEKFTILFESQFSVGGNELVFQVKTLSLPVVVIVHGSQDNNATATVLWDNAFAEPGRVPFAVPDKVLWPQLCEALNMKFKAEVQSNRGLTKENLVFLAQKLFNNSSSHLEDYSGLSVSWSQFNRENLPGRNYTFWQWFDGVMEVLKKHLKPHWNDGAILGFVNKQQAHDLLINKPDGTFLLRFSDSEIGGITIAWKFDSQERMFWNLMPFTTRDFSIRSLADRLGDLNYLIYVFPDRPKDEVYSKYYTPVPCESATAKAVDGYVKPQIKQVVPEFVNASADAGGGSATYMDQAPSPAVCPQAHYNMYPQNPDSVLDTDGDFDLEDTMDVARRVEELLGRPMDSQWIPHAQS

SEQ ID NO: 3524 - protein, 131 aa, Homo sapiens
MNLPSTKVSWAAVTLLLLLLLLPPALLSSGAAAQPLPDCCRQKTCSCRLYELLHGAGNHAAGILTLGKRRSGPPGLQGRLQRLLQASGNHAAGILTMGRRAGAEPAPRPCLGRRCSAPAAASVAPGGQSGI

SEQ ID NO: 3525 - protein, 790 aa, Homo sapiens
MPLPGGLWWLLCCRRGFTLLHRDYGDGELSGDGDEDEDEETFELRTPSPAGGGRGPLEVTLTQPVRSGPVSNRLQSWEETWSLIPEKGLPEDDPDIVVKGWLYREPRGGGARPWLPPRRAWFVLTRDSLDQFSSSGKGARRLGSLVLTSLCSVTGPERRRKETGLWSVTVSGRKHSVRLCSPRQAEAERWGVALREVIASKAPLETPTQLLLRDIQESCGDPEAVALIYLRNPILRHTSGALYAPLLPLPYGVSAPGPGYAPLREEAVRLFLALQALEGARRPGPLMQGVLQTCRDLPALRDELFLQLAKQTSGPAGPPGLPATQDPAALRYWQLLTCMSCTFRPGGAVRGHLLGHLERTEQALPDSELAEYARFIRKALGRTRGRELVPSLAEISALSQRQELLCTVHCPGAGACAVAIDSHTTAGEVARELVGRLGLARSRNAFALYEQRGAQERALAGGTLVADVLTSLAAEEAGLEDSPDSGWRLCLRLHGPLHPEGLSPDGHELPFLFEQAHALLLRGRPPPPDDTLRALAALRLQSLQRDFSPRVPLPRLDRLLPPPAPPREDPPRPTPRPPPSAALLAGALWSPGLAKRRAERARRGGAGRTAGSIAREGGGGAGTAAAVLGGWKRLRGMGRAEAMAAYLALAAQCPGFGAARYDVLELSTEPGRGAPQKLCLGLGAKAMSLSRPGETEPIHSVSYGHVAACQLMGPHTLALRVGESQLLLQSPQVEEIMQLVNAYLANPSPERPCSSSSPPCQDLPDTSPPSQRPGLDEPQGQSGCLGQLQD

SEQ ID NO: 3526 - protein, 802 aa, Homo sapiens
MAATRAGPRAREIFTSLEYGPVPESHACALAWLDTQDRCLGHYVNGKWLKPEHRNSVPCQDPITGENLASCLQAQAEDVAAAVEAARMAFKGWSAHPGVVRAQHLTRLAEVIQKHQRLLWTLESLVTGRAVREVRDGDVQLAQQLLHYHAIQASTQEEALAGWEPMGVIGLILPPTFSFLEMMWRICPALAVGCTVVALVPPASPAPLLLAQLAGELGPFPGILNVLSGPASLVPILASQPGIRKVAFCGAPEEGRALRRSLAGECAELGLALGTESLLLLTDTADVDSAVEGVVDAAWSDRGPGGLRLLIQESVWDEAMRRLQERMGRLRSGRGLDGAVDMGARGAAACDLVQRFVREAQSQGAQVFQAGDVPSERPFYPPTLVSNLPPASPCAQVEVPWPVVVASPFRTAKEALLVANGTPRGGSASVWSERLGQALELGYGLQVGTVWINAHGLRDPSVPTGGCKESGCSWHGGPDGLYEYLRPSGTPARLSCLSKNLNYDTFGLAVPSTLPAGPEIGPSPAPPYGLFVGGRFQAPGARSSRPIRDSSGNLHGYVAEGGAKDIRGAVEAAHQAFPGWAGQSPGARAALLWALAAALERRKSTLASRLERQGAELKAAEAEVELSARRLRAWGARVQAQGHTLQVAGLRGPVLRLREPLGVLAVVCPDEWPLLAFVSLLAPALAYGNTVVMVPSAACPLLALEVCQDMATVFPAGLANVVTGDRDHLTRCLALHQDVQAMWYFGSAQGSQFVEWASAGNLKPVWASRGCPRAWDQEAEGAGPELGLRVARTKALWLPMGD

SEQ ID NO: 3527 - protein, 110 aa, Homo sapiens
MRFMTLLFLTALAGALVCAYDPEAASAPGSGNPCHEASAAQKENAGEDPGLARQAPKPRKQRSSLLEKGLDGAKKAVGGLGKLGKDAVEDLESVGKGAVHDVKDVLDSVL

SEQ ID NO: 3528 - protein, 1049 aa, Homo sapiens
MGSRTPESPLHAVQLRWGPRRRPPLLPLLLLLLPPPPRVGGFNLDAEAPAVLSGPPGSFFGFSVEFYRPGTDGVSVLVGAPKANTSQPGVLQGGAVYLCPWGASPTQCTPIEFDSKGSRLLESSLSSSEGEEPVEYKSLQWFGATVRAHGSSILACAPLYSWRTEKEPLSDPVGTCYLSTDNFTRILEYAPCRSDFSWAAGQGYCQGGFSAEFTKTGRVVLGGPGSYFWQGQILSATQEQIAESYYPEYLINLVQGQLQTRQASSIYDDSYLGYSVAVGEFSGDDTEDFVAGVPKGNLTYGYVTILNGSDIRSLYNFSGEQMASYFGYAVAATDVNGDGLDDLLVGAPLLMDRTPDGRPQEVGRVYVYLQHPAGIEPTPTLTLTGHDEFGRFGSSLTPLGDLDQDGYNDVAIGAPFGGETQQGVVFVFPGGPGGLGSKPSQVLQPLWAASHTPDFFGSALRGGRDLDGNGYPDLIVGSFGVDKAVVYRGRPIVSASASLTIFPAMFNPEERSCSLEGNPVACINLSFCLNASGKHVADSIGFTVELQLDWQKQKGGVRRALFLASRQATLTQTLLIQNGAREDCREMKIYLRNESEFRDKLSPIHIALNFSLDPQAPVDSHGLRPALHYQSKSRIEDKAQILLDCGEDNICVPDLQLEVFGEQNHVYLGDKNALNLTFHAQNVGEGGAYEAELRVTAPPEAEYSGLVRHPGNFSSLSCDYFAVNQSRLLVCDLGNPMKAGASLWGGLRFTVPHLRDTKKTIQFDFQILSKNLNNSQSDVVSFRLSVEAQAQVTLNGVSKPEAVLFPVSDWHPRDQPQKEEDLGPAVHHVYELINQGPSSISQGVLELSCPQALEGQQLLYVTRVTGLNCTTNHPINPKGLELDPEGSLHHQQKREAPSRSSASSGPQILKCPEAECFRLRCELGPLHQQESQSLQLHFRVWAKTFLQREHQPFSLQCEAVYKALKMPYRILPRQLPQKERQVATAVQWTKAEGSYGVPLWIIILAILFGLLLLGLLIYILYKLGFFKRSLPYGTAMEKAQLKPPATSDA

SEQ ID NO: 3529 - protein, 233 aa, Homo sapiens
MRLLVLLWGCLLLPGYEALEGPEEISGFEGDTVSLQCTYREELRDHRKYWCRKGGILFSRCSGTIYAEEEGQETMKGRVSIRDSRQELSLIVTLWNLTLQDAGEYWCGVEKRGPDESLLISLFVFPGSSRPPMQLDSTSAEDTSPALSSGSSKPRVSIPMVRILAPVLVLLSLLSAAGLIAFCSHLLLWRKEAQQATETQRNEKFCLSRLNHRTSELDPDEAFEISSLTFLSV

SEQ ID NO: 3530 - protein, 534 aa, Homo sapiens
MATALMAVVLRAAAVAPRLRGRGGTGGARRLSCGARRRAARGTSPGRRLSTAWSQPQPPPEEYAGADDVSQSPVAEEPSWVPSPRPPVPHESPEPPSGRSLVQRDIQAFLNQCGASPGEARHWLTQFQTCHHSADKPFAVIEVDEEVLKCQQGVSSLAFALAFLQRMDMKPLVVLGLPAPTAPSGCLSFWEAKAQLAKSCKVLVDALRHNAAAAVPFFGGGSVLRAAEPAPHASYGGIVSVETDLLQWCLESGSIPILCPIGETAARRSVLLDSLEVTASLAKALRPTKIIFLNNTGGLRDSSHKVLSNVNLPADLDLVCNAEWVSTKERQQMRLIVDVLSRLPHHSSAVITAASTLLTELFSNKGSGTLFKNAERMLRVRSLDKLDQGRLVDLVNASFGKKLRDDYLASLRPRLHSIYVSEGYNAAAILTMEPVLGGTPYLDKFVVSSSRQGQGSGQMLWECLRRDLQTLFWRSRVTNPINPWYFKHSDGSFSNKQWIFFWFGLADIRDSYELVNHAKGLPDSFHKPASDPGS

SEQ ID NO: 3531 - protein, 221 aa, Homo sapiens
MPLALTLLLLSGLGAPGGWGCLQCDPLVLEALGHLRSALIPSRFQLEQLQARAGAVLMGMEGPFFRDYALNVFVGKVETNQLDLVASFVKNQTQHLMGNSLKDEPLLEELVTLRANVIKEFKKVLISYELKACNPKLCRLLKEEVLDCLHCQRITPKCIHKKYCFVDRQPRVALQYQMDSKYPRNQALLGILISVSLAVFVFVVIVVSACTYRQNRKLLLQ

SEQ ID NO: 3532 - protein, 195 aa, Homo sapiens
MAAPPGEYFSVGSQVSCRTCQEQRLQGEVVAFDYQSKMLALKCPSSSGKPNHADILLINLQYVSEVEIINDRTETPPPLASLNVSKLASKARTEKEEKLSQAYAISAGVSLEGQQLFQTIHKTIKDCKWQEKNIVVMEEVVITPPYQVENCKGKEGSALSHVRKIVEKHFRDVESQKILQRSQAQQPQKEAALSS

SEQ ID NO: 3533 - protein, 826 aa, Homo sapiens
MPPASGPSVLARLLPLLGLLLGSASRAPGKSPPEPPSPQEILIKVQVYVSGELVPLARASVDVFGNRTLLAAGTTDSEGVATLPLSYRLGTWVLVTAARPGFLTNSVPWRVDKLPLYASVSLYLLPERPATLILYEDLVHILLGSPGARSQPLVQFQRRAARLPVSSTYSQLWASLTPASTQQEMRAFPAFLGTEASSSGNGSWLELMPLTAVSVHLLTGNGTEVPLSGPIHLSLPVPSETRALTVGTSIPAWRFDPKSGLWVRNGTGVIRKEGRQLYWTFVSPQLGYWVAAMASPTAGLVTITSGIQDIGTYHTIFLLTILAALALLVLILLCLLIYYCRRRCLKPRQQHRKLQLSGPSDGNKRDQATSMSQLHLICGGPLEPAPSGDPEAPPPGPLHSAFSSSRDLASSRDDFFRTKPRSASRPAAEPSGARGGESAGLKGARSAEGPGGLEPGLEEHRRGPSGAAAFLHEPPSPPPPFDHYLGHKGAAEGKTPDFLLSQSVDQLARPPSLGQAGQLIFCGSIDHLKDNVYRNVMPTLVIPAHYVRLGGEAGAAGVGDEPAPPEGTAPGPARAFPQPDPQRPQMPGHSGPGGEGGGGGGEGWGAGRAAPVSGSVTIPVLFNESTMAQLNGELQALTEKKLLELGVKPHPRAWFVSLDGRSNSQVRHSYIDLQAGGGARSTDASLDSGVDVHEARPARRRPAREERERAPPAAPPPPPAPPRLALSEDTEPSSSESRTGLCSPEDNSLTPLLDEVAAPEGRAATVPRGRGRSRGDSSRSSASELRRDSLTSPEDELGAEVGDEAGDKKSPWQRREERPLMVFNVK

SEQ ID NO: 3534 - protein, 430 aa, Homo sapiens
MGGHPQLRLVKALLLLGLNPVSASLQDQHCESLSLASNISGLQCNASVDLIGTCWPRSPAGQLVVRPCPAFFYGVRYNTTNNGYRECLANGSWAARVNYSECQEILNEEKKSKVHYHVAVIINYLGHCISLVALLVAFVLFLRLRPGCTHWGDQADGALEVGAPWSGAPFQVRRSIRCLRNIIHWNLISAFILRNATWFVVQLTMSPEVHQSNVGWCRLVTAAYNYFHVTNFFWMFGEGCYLHTAIVLTYSTDRLRKWMFICIGWGVPFPIIVAWAIGKLYYDNEKCWFGKRPGVYTDYIYQGPMILVLLINFIFLFNIVRILMTKLRASTTSETIQYRKAVKATLVLLPLLGITYMLFFVNPGEDEVSRVVFIYFNSFLESFQVRSAIRKRWHRWQDKHSIRARVARAMSIPTSPTRVSFHSIKQSTAV

SEQ ID NO: 3535 - protein, 370 aa, Homo sapiens
MGLWALLPGWVSATLLLALAALPAALAANSSGRWWGIVNVASSTNLLTDSKSLQLVLEPSLQLLSRKQRRLIRQNPGILHSVSGGLQSAVRECKWQFRNRRWNCPTAPGPHLFGKIVNRGCRETAFIFAITSAGVTHSVARSCSEGSIESCTCDYRRRGPGGPDWHWGGCSDNIDFGRLFGREFVDSGEKGRDLRFLMNLHNNEAGRTTVFSEMRQECKCHGMSGSCTVRTCWMRLPTLRAVGDVLRDRFDGASRVLYGNRGSNRASRAELLRLEPEDPAHKPPSPHDLVYFEKSPNFCTYSGRLGTAGTAGRACNSSSPALDGCELLCCGRGHRTRTQRVTERCNCTFHWCCHVSCRNCTHTRVLHECL

SEQ ID NO: 3536 - protein, 395 aa, Homo sapiens
MTLRRLRKLQQKEEAAATPDPAARTPDSEVAPAAPVPTPGPPAAAATPGPPADELYAALEDYHPAELYRALAVSGGTLPRRKGSGFRWKNLSQSPEQQRKVLTLEKEDNQTFGFEIQTYGLHHREEQRVEMVTFVCRVHESSPAQLAGLTPGDTIASVNGLNVEGIRHREIVDIIKASGNVLRLETLYGTSIRKAELEARLQYLKQTLYEKWGEYRSLMVQEQRLVHGLVVKDPSIYDTLESVRSCLYGAGLLPGSLPFGPLLAVPGRPRGGARRARGDADDAVYHTCFFGDSEPPALPPPPPPARAFGPGPAETPAVGPGPGPRAALSRSASVRCAGPGGGGGGGAPGALWTEAREQALCGPGLRKTKYRSFRRRLLKFIPGLNRSLEEEESQL

SEQ ID NO: 3537 - protein, 860 aa, Homo sapiens
MARPRGLGRIPELQLVAFPVAVAAEDEAFLPEPLAPRAPRRPRSPPSSPVFFASPSPTFRRRLRLLRSCQDLGRQAWAGAGFEAENGPTPSPGRSPLDSQASPGLVLHAGAATSQRRESFLYRSDSDYDMSPKTMSRNSSVTSEAHAEDLIVTPFAQVLASLRSVRSNFSLLTNVPVPSNKRSPLGGPTPVCKATLSEETCQQLARETLEELDWCLEQLETMQTYRSVSEMASHKFKRMLNRELTHLSEMSRSGNQVSEYISTTFLDKQNEVEIPSPTMKEREKQQAPRPRPSQPPPPPVPHLQPMSQITGLKKLMHSNSLNNSNIPRFGVKTDQEELLAQELENLNKWGLNIFCVSDYAGGRSLTCIMYMIFQERDLLKKFRIPVDTMVTYMLTLEDHYHADVAYHNSLHAADVLQSTHVLLATPALDAVFTDLEILAALFAAAIHDVDHPGVSNQFLINTNSELALMYNDESVLENHHLAVGFKLLQEDNCDIFQNLSKRQRQSLRKMVIDMVLATDMSKHMTLLADLKTMVETKKVTSSGVLLLDNYSDRIQVLRNMVHCADLSNPTKPLELYRQWTDRIMAEFFQQGDRERERGMEISPMCDKHTASVEKSQVGFIDYIVHPLWETWADLVHPDAQEILDTLEDNRDWYYSAIRQSPSPPPEEESRGPGHPPLPDKFQFELTLEEEEEEEISMAQIPCTAQEALTAQGLSGVEEALDATIAWEASPAQESLEVMAQEASLEAELEAVYLTQQAQSTGSAPVAPDEFSSREEFVVAVSHSSPSALALQSPLLPAWRTLSVSEHAPGLPGLPSTAAEVEAQREHQAAKRACSACAGTFGEDTSALPAPGGGGSGGDPT

SEQ ID NO: 3538 - protein, 503 aa, Homo sapiens
MAGLSDLELRRELQALGFQPGPITDTTRDVYRNKLRRLRGEARLRDEERLREEARPRGEERLREEARLREDAPLRARPAAASPRAEPWLSQPASGSAYATPGAYGDIRPSAASWVGSRGLAYPARPAQLRRRASVRGSSEEDEDARTPDRATQGPGLAARRWWAASPAPARLPSSLLGPDPRPGLRATRAGPAGAARARPEVGRRLERWLSRLLLWASLGLLLVFLGILWVKMGKPSAPQEAEDNMKLLPVDCERKTDEFCQAKQKAALLELLHELYNFLAIQAGNFECGNPENLKSKCIPVMEAQEYIANVTSSSSAKFEAALTWILSSNKDVGIWLKGEDQSELVTTVDKVVCLESAHPRMGVGCRLSRALLTAVTNVLIFFWCLAFLWGLLILLKYRWRKLEEEEQAMYEMVKKIIDVVQDHYVDWEQDMERYPYVGILHVRDSLIPPQSRRRMKRVWDRAVEFLASNESRIQTESHRVAGEDMLVWRWTKPSSFSDSER

SEQ ID NO: 3539 - protein, 117 aa, Homo sapiens
MATYSLANERLRALEDIEREIGAILQNAGTVILELSKEKTNERLLDRQAAAFTASVQHVEAELSAQIRYLTQVATGQPHEGSSYSSRKDCQMALKRVDYARLKLSDVARTCEQMLEN

SEQ ID NO: 3540 - protein, 254 aa, Homo sapiens
MGRDLRPGSRVLLLLLLLLLVYLTQPGNGNEGSVTGSCYCGKRISSDSPPSVQFMNRLRKHLRAYHRCLYYTRFQLLSWSVCGGNKDPWVQELMSCLDLKECGHAYSGIVAHQKHLLPTSPPISQASEGASSDIHTPAQMLLSTLQSTQRPTLPVGSLSSDKELTRPNETTIHTAGHSLAAGPEAGENQKQPEKNAGPTARTSATVPVLCLLAIIFILTAALSYVLCKRRRGQSPQSSPDLPVHYIPVAPDSNT

SEQ ID NO: 3541 - protein, 249 aa, Homo sapiens
MAARRSQRRRGRRGEPGTALLVPLALGLGLALACLGLLLAVVSLGSRASLSAQEPAQEELVAEEDQDPSELNPQTEESQDPAPFLNRLVRPRRSAPKGRKTRARRAIAAHYEVHPRPGQDGAQAGVDGTVSGWEEARINSSSPLRYNRQIGEFIVTRAGLYYLYCQVHFDEGKAVYLKLDLLVDGVLALRCLEEFSATAASSLGPQLRLCQVSGLLALRPGSSLRIRTLPWAHLKAAPFLTYFGLFQVH

SEQ ID NO: 3542 - protein, 280 aa, Homo sapiens
MRGVSCLQVLLLLVLGAAGTQGRKSAACGQPRMSSRIVGGRDGRDGEWPWQASIQHRGAHVCGGSLIAPQWVLTAAHCFPRRALPAEYRVRLGALRLGSTSPRTLSVPVRRVLLPPDYSEDGARGDLALLQLRRPVPLSARVQPVCLPVPGARPPPGTPCRVTGWGSLRPGVPLPEWRPLQGVRVPLLDSRTCDGLYHVGADVPQAERIVLPGSLCAGYPQGHKDACQGDSGGPLTCLQSGSWVLVGVVSWGKGCALPNRPGVYTSVATYSPWIQARVSF

SEQ ID NO: 3543 - protein, 108 aa, Homo sapiens
MLLFCPGCGNGLIVEEGQRCHRFACNTCPYVHNITRKVTNRKYPKLKEVDDVLGGAAAWENVDSTAESCPKCEHPRAYFMQLQTRSADEPMTTFYKCCNAQCGHRWRD

SEQ ID NO: 3544 - protein, 371 aa, Homo sapiens
MSAQAQMRALLDQLMGTARDGDETRQRVKFTDDRVCKSHLLDCCPHDILAGTRMDLGECTKIHDLALRADYEIASKERDLFFELDAMDHLESFIAECDRRTELAKKRLAETQEEISAEVSAKAEKVHELNEEIGKLLAKAEQLGAEGNVDESQKILMEVEKVRAKKKEAEEEYRNSMPASSFQQQKLRVCEVCSAYLGLHDNDRRLADHFGGKLHLGFIQIREKLDQLRKTVAEKQEKRNQDRLRRREEREREERLSRRSGSRTRDRRRSRSRDRRRRRSRSTSRERRKLSRSRSRDRHRRHRSRSRSHSRGHRRASRDRSAKYKFSRERASREESWESGRSERGPPDWRLESSNGKMASRRSEEKEAGEI

SEQ ID NO: 3545 - protein, 1748 aa, Homo sapiens
MARAWQHPFLNVFRHFRVDEWKRSAKQGDVAVVTDKTLKGAVYRIRGSVSAANYIQLPKSSTQSLGLTGRYLYVLFRPLPSKHFVIHLDVSSKDNQVIRVSFSNLFKEFKSTATWLQFPLVLEARTPQRDLVGLAPSGARWTCLQLDLQDVLLVYLNRCYGHLKSIRLCASLLVRNLYTSDLCFEPAISGAQWAKLPVTPMPREMAFPVPKGESWHDRYIHVRFPSESLKVPSKPIEKSCSPPEAVLLGPGPQPLPCPVASSKPVRFSVSPVVQTPSPTASGRAALAPRPFPEVSLSQERSDASNADGPGFHSLEPWAQLEASDIHTAAAGTHVLTHESAEVPVARTGSCEGFLPDPVLRLKGVIGFGGHGTRQALWTPDGAAVVYPCHAVIVVLLVDTGEQRFFLGHTDKVSALALDGSSSLLASAQARAPSVMRLWDFQTGRCLCLFRSPMHVVCSLSFSDSGALLCGVGKDHHGRTMVVAWGTGQVGLGGEVVVLAKAHTDFDVQAFRVTFFDETRMASCGQGSVRLWRLRGGVLRSCPVDLGEHHALQFTDLAFKQARDGCPEPSAAMLFVCSRSGHILEIDCQRMVVRHARRLLPTRTPGGPHPQKQTFSSGPGIAISSLSVSPAMCAVGSEDGFLRLWPLDFSSVLLEAEHEGPVSSVCVSPDGLRVLSATSSGHLGFLDTLSRVYHMLARSHTAPVLALAMEQRRGQLATVSQDRTVRIWDLATLQQLYDFTSSEDAPCAVTFHPTRPTFFCGFSSGAVRSFSLEAAEVLVEHTCHRGAVTGLTATPDGRLLFSSCSQGSLAQYSCADPQWHVLRVAADMVCPDAPASPSALAVSRDGRLLAFVGPSRCTVTVMGSASLDELLRVDIGTLDLASSRLDSAMAVCFGPAALGHLLVSTSSNRVVVLDAVSGRIIRELPGVHPEPCPSLTLSEDARFLLIAAGRTIKVWDYATQASPGPQVYIGHSEPVQAVAFSPDQQQVLSAGDAVFLWDVLAPTESDQSFPGAPPACKTGPGAGPLEDAASRASELPRQQVPKPCQASPPRLGVCARPPEGGDGARDTRNSGAPRTTYLASCKAFTPARVSCSPHSAKGTCPPPASGGWLRLKAVVGYSGNGRANMVWRPDTGFFAYTCGRLVVVEDLHSGAQQHWSGHSAEISTLALSHSAQVLASASGRSSTTAHCQIRVWDVSGGLCQHLIFPHSTTVLALAFSPDDRLLVTLGDHDGRTLALWGTATYDLVSSTRLPEPVHGVAFNPWDAGELTCVGQGTVTFWLLQQRGADISLQVRREPVPEAVGAGELTSLCYGAPPLLYCGTSSGQVCVWDTRAGRCFLSWEADDGGIGLLLFSGSRLVSGSSTGRLRLWAVGAVSELRCKGSGASSVFMEHELVLDGAVVSASFDDSVDMGVVGTTAGTLWFVSWAEGTSTRLISGHRSKVNEVVFSPGESHCATCSEDGSVRVWALASMELVIQFQVLNQSCLCLAWSPPCCGRPEQQRLAAGYGDGSLRIFSVSRTAMELKMHPHPVALTTVAFSTDGQTVLSGDKDGLVAVSHPCTGTTFRVLSDHQGAPISTICVTCKECEDLGVEGTDLWLAASGDQRVSVWASDWLRNHCELVDWLSFPMPATTETQGHLPPSLAAFCPWDGALLMYVGPGVYKEVIIYNLCQKQVVEKIPLPFFAMSLSLSPGTHLLAVGFAECMLRLVDCAMGTAQDFAGHDNAVHLCRFTPSARLLFTAARNEILVWEVPGL

SEQ ID NO: 3546 - protein, 790 aa, Homo sapiens
MEKMSRVTTALGGSVLTGRTMHCHLDAPANAISVCRDAAQVVVAGRSIFKIYAIEEEQFVEKLNLRVGRKPSLNLSCADVVWHQMDENLLATAATNGVVVTWNLGRPSRNKQDQLFTEHKRTVNKVCFHPTEAHVLLSGSQDGFMKCFDLRRKDSVSTFSGQSESVRDVQFSIRDYFTFASTFENGNVQLWDIRRPDRCERMFTAHNGPVFCCDWHPEDRGWLATGGRDKMVKVWDMTTHRAKEMHCVQTIASVARVKWRPECRHHLATCSMMVDHNIYVWDVRRPFVPAAMFEEHRDVTTGIAWRHPHDPSFLLSGSKDSSLCQHLFRDASQPVERANPEGLCYGLFGDLAFAAKESLVAAESGRKPYTGDRRHPIFFKRKLDPAEPFAGLASSALSVFETEPGGGGMRWFVDTAERYALAGRPLAELCDHNAKVARELGRNQVAQTWTMLRIIYCSPGLVPTANLNHSVGKGGSCGLPLMNSFNLKDMAPGLGSETRLDRSKGDARSDTVLLDSSATLITNEDNEETEGSDVPADYLLGDVEGEEDELYLLDPEHAHPEDPECVLPQEAFPLRHEIVDTPPGPEHLQDKADSPHVSGSEADVASLAPVDSSFSLLSVSHALYDSRLPPDFFGVLVRDMLHFYAEQGDVQMAVSVLIVLGERVRKDIDEQTQEHWYTSYIDLLQRFRLWNVSNEVVKLSTSRAVSCLNQASTTLHVNCSHCKRPMSSRGWVCDRCHRCASMCAVCHHVVKGLFVWCQGCSHGGHLQHIMKWLEGSSHCPAGCGHLCEYS

SEQ ID NO: 3547 - protein, 1269 aa, Homo sapiens
MTVKLGDGGSGEDGLKKLGKRAADEESLEGEGAGGADAAEESSGTKRDEKTPRAGADGPPAPPGAPQAPSPPQGSPQDQHHFLRSSVRPQSKRPRKDPPSAVGSGNAGGSGPRGKGAEGGGSSSGNVSGVAPAAPAGGSRSSSRNLGSSGGEKEEGKKVRRQWESWSTEDKNTFFEGLYEHGKDFEAIQNNIALKYKKKGKPASMVKNKEQVRHFYYRTWHKITKYIDFDHVFSRGLKKSSQELYGLICYGELRKKIGGCMDDKNATKLNELIQVGATTVRYKGRNLRIKAPMCRALKKLCDPDGLSDEEDQKPVRLPLKVPIELQPRNNHAWARVQSLAQNPRLRMIVELHRKVSSLIEFLKQKWALHEVRVRKTLEERQLQDSCSAPMQEKVTLHLFPGENCTLTPLPGVARVVHSKAFCTVHWQEGGRCKQSAKDAHVLPPAQILGIQSGQGTARGQVKCPRSGAEGKGVGRPPPAADALQSSGESSPESAPGEGAALSLSSPDAPDRPPPRHQDTGPCLEKTPAEGRDSPTREPGALPCACGQLPDLEDELSLLDPLPRYLKSCQDLIVPEQCRCADTRPGSEQPPLGGAASPEVLAPVSKEAADLAPTGPSPRPGPGLLLDVCTKDLADAPAEELQEKGSPAGPPPSQGQPAARPPKEVPASRLAQQLREEGWNLQTSESLTLAEVYLMMGKPSKLQLEYDWLGPGRQDPRPGSLPTALHKQRLLSCLLKLISTEVNPKLALEANTISTASVRPAQEEQSMTPPGKVVTVSSRSPRCPRNQASLRSSKTFPPSSAPCSSGLRNPPRPLLVPGPSSTGSNDSDGGLFAVPTTLPPNSRHGKLFSPSKEAELTFRQHLNSISMQSDFFLPKPRKLRNRHLRKPLVVQRTLLPRPSENQSHNVCSFSILSNSSVTGRGSFRPIQSSLTKAALSRPIVPKVLPPQATSHLASAIDLAATSAGILSGNPLPALDTEGLSGISPLSSDEVTGAISGQDSTGTHQDGDTLPTVGGSDPFVSIPSRPEQEPVADSFQGSSVLSLSELPKAPLQNGLSIPLSSSESSSTRLSPPDVSALLDISLPGPPEDALSQGEPATHISDSIIEIAISSGQYGEGVPLSPAKLNGSDSSKSLPSPSSSPQPHWIASPTHDPQWYPSDSTDSSLSSLFASFISPEKSRKMLPTPIGTNSGTSLLGPSLLDGNSRDSFVSRSLADVAEVVDSQLVCMMNENSIDYISRFNDLAQELSIAEPGRREALFDGGGGGPAVSDLSQ

SEQ ID NO: 3548 - protein, 409 aa, Homo sapiens
MRGEQGAAGARVLQFTNCRILRGGKLLREDLWVRGGRILDPEKLFFEERRVADERRDCGGRILAPGFIDVQINGGFGVDFSQATEDVGSGVALVARRILSHGVTSFCPTLVTSPPEVYHKVVPQIPVKSGGPHGAGVLGLHLEGPFISREKRGAHPEAHLRSFEADAFQDLLATYGPLDNVRIVTLAPELGRSHEVIRALTARGICVSLGHSVADLRAAEDAVWSGATFITHLFNAMLPFHHRDPGIVGLLTSDRLPAGRCIFYGMIADGTHTNPAALRIAHRAHPQGLVLVTDAIPALGLGNGRHTLGQQEVEVDGLTAYVAGTKTLSGSIAPMDVCVRHFLQATGCSMESALEAASLHPAQLLGLEKSKGTLDFGADADFVVLDDSLHVQATYISGELVWQADAARQ

SEQ ID NO: 3549 - protein, 580 aa, Homo sapiens
MPGWPWGLLLTAGTLFAALSPGPPAPADPCHDEGGAPRGCVPGLVNAALGREVLASSTCGRPATRACDASDPRRAHSPALLTSPGGTASPLCWRSESLPRAPLNVTLTVPLGKAFELVFVSLRFCSAPPASVALLKSQDHGRSWAPLGFFSSHCDLDYGRLPAPANGPAGPGPEALCFPAPLAQPDGSGLLAFSMQDSSPPGLDLDSSPVLQDWVTATDVRVVLTRPSTAGDPRDMEAVVPYSYAATDLQVGGRCKCNGHASRCLLDTQGHLICDCRHGTEGPDCGRCKPFYCDRPWQRATARESHACLACSCNGHARRCRFNMELYRLSGRRSGGVCLNCRHNTAGRHCHYCREGFYRDPGRALSDRRACRACDCHPVGAAGKTCNQTTGQCPCKDGVTGLTCNRCAPGFQQSRSPVAPCVKTPIPGPTEDSSPVQPQDCDSHCKPARGSYRISLKKFCKKDYAVQVAVGARGEARGAWTRFPVAVLAVFRSGEERARRGSSALWVPAGDAACGCPRLLPGRRYLLLGGGPGAAAGGAGGRGPGLIAARGSLVLPWRDAWTRRLRRLQRRERRGRCSAA

SEQ ID NO: 3550 - protein, 140 aa, Homo sapiens
MPLPEPSEQEGESVKASQEPSPKPGTEVIPAAPRKPRKFSKLVLLTASKDSTKVAGAKRKGVHCVMSLGVPGPATLAKALLQTHPEAQRAIEAAPQEPEQKRSRQDPGTDRTEDSGLAAGPPEAAGENFAPCSVAPGKSL

SEQ ID NO: 3551 - protein, 1353 aa, Homo sapiens
MASPPHQQLLHHHSTEVSCDSSGDSNSVRVKINPKQLSSNSHPKHCKYSISSSCSSSGDSGGVPRRVGGGGRLRRQKKLPQLFERASSRWWDPKFDSVNLEEACLERCFPQTQRRFRYALFYIGFACLLWSIYFAVHMRSRLIVMVAPALCFLLVCVGFFLFTFTKLYARHYAWTSLALTLLVFALTLAAQFQVLTPVSGRGDSSNLTATARPTDTCLSQVGSFSMCIEVLFLLYTVMHLPLYLSLCLGVAYSVLFETFGYHFRDEACFPSPGAGALHWELLSRGLLHGCIHAIGVHLFVMSQVRSRSTFLKVGQSIMHGKDLEVEKALKERMIHSVMPRIIADDLMKQGDEESENSVKRHATSSPKNRKKKSSIQKAPIAFRPFKMQQIEEVSILFADIVGFTKMSANKSAHALVGLLNDLFGRFDRLCEETKCEKISTLGDCYYCVAGCPEPRADHAYCCIEMGLGMIKAIEQFCQEKKEMVNMRVGVHTGTVLCGILGMRRFKFDVWSNDVNLANLMEQLGVAGKVHISEATAKYLDDRYEMEDGKVIERLGQSVVADQLKGLKTYLISGQRAKESRCSCAEALLSGFEVIDGSQVSSGPRGQGTASSGNVSDLAQTVKTFDNLKTCPSCGITFAPKSEAGAEGGAPQNGCQDEHKNSTKASGGPNPKTQNGLLSPPQEEKLTNSQTSLCEILQEKGRWAGVSLDQSALLPLRFKNIREKTDAHFVDVIKEDSLMKDYFFKPPINQFSLNFLDQELERSYRTSYQEEVIKNSPVKTFASPTFSSLLDVFLSTTVFLTLSTTCFLKYEAATVPPPPAALAVFSAALLLEVLSLAVSIRMVFFLEDVMACTKRLLEWIAGWLPRHCIGAILVSLPALAVYSHVTSEYETNIHFPVFTGSAALIAVVHYCNFCQLSSWMRSSLATVVGAGPLLLLYVSLCPDSSVLTSPLDAVQNFSSERNPCNSSVPRDLRRPASLIGQEVVLVFFLLLLLVWFLNREFEVSYRLHYHGDVEADLHRTKIQSMRDQADWLLRNIIPYHVAEQLKVSQTYSKNHDSGGVIFASIVNFSEFYEENYEGGKECYRVLNELIGDFDELLSKPDYSSIEKIKTIGATYMAASGLNTAQAQDGSHPQEHLQILFEFAKEMMRVVDDFNNNMLWFNFKLRVGFNHGPLTAGVIGTTKLLYDIWGDTVNIASRMDTTGVECRIQVSEESYRVLSKMGYDFDYRGTVNVKGKGQMKTYLYPKCTDHRVIPQHQLSISPDIRVQVDGSIGRSPTDEIANLVPSVQYVDKTSLGSDSSTQAKDAHLSPKRPWKEPVKAEERGRFGKAIEKDDCDETGIEEANELTKLNVSKSV

SEQ ID NO: 3552 - protein, 461 aa, Homo sapiens
MRPADLPPRPMEESPASSSAPTETEEPGSSAEVMEEVTTCSFNSPLFRQEDDRGITYRIPALLYIPPTHTFLAFAEKRSTRRDEDALHLVLRRGLRIGQLVQWGPLKPLMEATLPGHRTMNPCPVWEQKSGCVFLFFICVRGHVTERQQIVSGRNAARLCFIYSQDAGCSWSEVRDLTEEVIGSELKHWATFAVGPGHGIQLQSGRLVIPAYTYYIPSWFFCFQLPCKTRPHSLMIYSDDLGVTWHHGRLIRPMVTVECEVAEVTGRAGHPVLYCSARTPNRCRAEALSTDHGEGFQRLALSRQLCEPPHGCQGSVVSFRPLEIPHRCQDSSSKDAPTIQQSSPGSSLRLEEEAGTPSESWLLYSHPTSRKQRVDLGIYLNQTPLEAACWSRPWILHCGPCGYSDLAALEEEGLFGCLFECGTKQECEQIAFRLFTHREILSHLQGDCTSPGRNPSQFKSN

SEQ ID NO: 3553 - protein, 820 aa, Homo sapiens
MALLRDVSLQDPRDRFELLQRVGAGTYGDVYKARDTVTSELAAVKIVKLDPGDDISSLQQEITILRECRHPNVVAYIGSYLRNDRLWICMEFCGGGSLQEIYHATGPLEERQIAYVCREALKGLHHLHSQGKIHRDIKGANLLLTLQGDVKLADFGVSGELTASVAKRRSFIGTPYWMAPEVAAVERKGGYNELCDVWALGITAIELGELQPPLFHLHPMRALMLMSKSSFQPPKLRDKTRWTQNFHHFLKLALTKNPKKRPTAEKLLQHPFTTQQLPRALLTQLLDKASDPHLGTPSPEDCELETYDMFPDTIHSRGQHGPAERTPSEIQFHQVKFGAPRRKETDPLNEPWEEEWTLLGKEELSGSLLQSVQEALEERSLTIRSASEFQELDSPDDTMGTIKRAPFLGPLPTDPPAEEPLSSPPGTLPPPPSGPNSSPLLPTAWATMKQREDPERSSCHGLPPTPKVHMGACFSKVFNGCPLRIHAAVTWIHPVTRDQFLVVGAEEGIYTLNLHELHEDTLEKLISHRCSWLYCVNNVLLSLSGKSTHIWAHDLPGLFEQRRLQQQVPLSIPTNRLTQRIIPRRFALSTKIPDTKGCLQCRVVRNPYTGATFLLAALPTSLLLLQWYEPLQKFLLLKNFSSPLPSPAGMLEPLVLDGKELPQVCVGAEGPEGPGCRVLFHVLPLEAGLTPDILIPPEGIPGSAQQVIQVDRDTILVSFERCVRIVNMQGEPTATLAPELTFDFPIETVVCLQDSVLAFWSHGMQGRSLDTNEVTQEITDETRIFRVLGAHRDIILESIPTDNPEAHSNLYILTGHQSTY

SEQ ID NO: 3554 - protein, 242 aa, Homo sapiens
MVSGRFYLSCLLLGSLGSMCILFTIYWMQYWRGGFAWNGSIYMFNWHPVLMVAGMVVFYGGASLVYRLPQSWVGPKLPWKLLHAALHLMAFVLTVVGLVAVFTFHNHGRTANLYSLHSWLGITTVFLFACQWFLGFAVFLLPWASMWLRSLLKPIHVFFGAAILSLSIASVISGINEKLFFSLKNTTRPYHSLPSEAVFANSTGMLVVAFGLLVLYILLASSWKRPEPGILTDRQPLLHDGE

SEQ ID NO: 3555 - protein, 722 aa, Homo sapiens
MYRALYAFRSAEPNALAFAAGETFLVLERSSAHWWLAARARSGETGYVPPAYLRRLQGLEQDVLQAIDRAIEAVHNTAMRDGGKYSLEQRGVLQKLIHHRKETLSRRGPSASSVAVMTSSTSDHHLDAAAARQPNGVCRAGFERQHSLPSSEHLGADGGLYQIPLPSSQIPPQPRRAAPTTPPPPVKRRDREALMASGSGGHNTMPSGGNSVSSGSSVSSTSLDTLYTSSSPSEPGSSCSPTPPPVPRRGTHTTVSQVQPPPSKASAPEPPAEEEVATGTTSASDDLEALGTLSLGTTEEKAAAEAAVPRTIGAELMELVRRNTGLSHELCRVAIGIIVGHIQASVPASSPVMEQVLLSLVEGKDLSMALPSGQVCHDQQRLEVIFADLARRKDDAQQRSWALYEDEGVIRCYLEELLHILTDADPEVCKKMCKRNEFESVLALVAYYQMEHRASLRLLLLKCFGAMCSLDAAIISTLVSSVLPVELARDMQTDTQDHQKLCYSALILAMVFSMGEAVPYAHYEHLGTPFAQFLLNIVEDGLPLDTTEQLPDLCVNLLLALNLHLPAADQNVIMAALSKHANVKIFSEKLLLLLNRGDDPVRIFKHEPQPPHSVLKFLQDVFGSPATAAIFYHTDMMALIDITVRHIADLSPGDKLRMEYLSLMHAIVRTTPYLQHRHRLPDLQAILRRILNEEETSPQCQMDRMIVREMCKEFLVLGEAPS

SEQ ID NO: 3556 - protein, 82 aa, Homo sapiens
MEKRLQEAQLYKEEGNQRYREGKYRDAVSRYHRALLQLRGLDPSLPSPLPNLGPQGPALTPEQENILHTTQTDCYNNLAVVK

SEQ ID NO: 3557 - protein, 622 aa, Homo sapiens
MSEREERRFVEIPRESVRLMAESTGLELSDEVAALLAEDVCYRLREATQNSSQFMKHTKRRKLTVEDFNRALRWSSVEAVCGYGSQEALPMRPAREGELYFPEDREVNLVELALATNIPKGCAETAVRVHVSYLDGKGNLAPQGSVPSAVSSLTDDLLKYYHQVTRAVLGDDPQLMKVALQDLQTNSKIGALLPYFVYVVSGVKSVSHDLEQLHRLLQVARSLFRNPHLCLGPYVRCLVGSVLYCVLEPLAASINPLNDHWTLRDGAALLLSHIFWTHGDLVSGLYQHILLSLQKILADPVRPLCCHYGAVVGLHALGWKAVERVLYPHLSTYWTNLQAVLDDYSVSNAQVKADGHKVYGAILVAVERLLKMKAQAAEPNRGGPGGRGCRRLDDLPWDSLLFQESSSGGGAEPSFGSGLPLPPGGAGPEDPSLSVTLADIYRELYAFFGDSLATRFGTGQPAPTAPRPPGDKKEPAAAPDSVRKMPQLTASAIVSPHGDESPRGSGGGGPASASGPAASESRPLPRVHRARGAPRQQGPGTGTRDVFQKSRFAPRGAPHFRFIIAGRQAGRRCRGRLFQTAFPAPYGPSPASRYVQKLPMIGRTSRPARRWALSDYSLYLPL

SEQ ID NO: 3558 - protein, 619 aa, Homo sapiens
MADEGKSYSEHDDERVNFPQRKKKGRGPFRWKYGEGNRRSGRGGSGIRSSRLEEDDGDVAMSDAQDGPRVRYNPYTTRPNRRGDTWHDRDRIHVTVRRDRAPPERGGAGTSQDGTSKNWFKITIPYGRKYDKAWLLSMIQSKCSVPFTPIEFHYENTRAQFFVEDASTASALKAVNYKILDRENRRISIIINSSAPPHTILNELKPEQVEQLKLIMSKRYDGSQQALDLKGLRSDPDLVAQNIDVVLNRRSCMAATLRIIEENIPELLSLNLSNNRLYRLDDMSSIVQKAPNLKILNLSGNELKSERELDKIKGLKLEELWLDGNSLCDTFRDQSTYISAIRERFPKLLRLDGHELPPPIAFDVEAPTTLPPCKGSYFGTENLKSLVLHFLQQYYAIYDSGDRQGLLDAYHDGACCSLSIPFIPQNPARSSLAEYFKDSRNVKKLKDPTLRFRLLKHTRLNVVAFLNELPKTQHDVNSFVVDISAQTSTLLCFSVNGVFKEVDGKSRDSLRAFTRTFIAVPASNSGLCIVNDELFVRNASSEEIQRAFAMPAPTPSSSPVPTLSPEQQEMLQAFSTQSGMNLEWSQKCLQDNNWDYTRSAQAFTHLKAKGEIPEVAFMK

SEQ ID NO: 3559 - protein, 355 aa, Homo sapiens
MIPRKRYGSKNTDQGVYLGLSKTQVLSPATAGSSSSDIAPLPPPVTLVPPPPDTMSCRDRTQEFLSACKSLQTRQNGIQTNKPALRAVRQRSEFTLMAKRIGKDLSNTFAKLEKLTILAKRKSLFDDKAVEIEELTYIIKQDINSLNKQIAQLQDFVRAKGSQSGRHLQTHSNTIVVSLQSKLASMSNDFKSVLEVRTENLKQQRSRREQFSRAPVSALPLAPNHLGGGAVVLGAESHASKDVAIDMMDSRTSQQLQLIDEQDSYIQSRADTMQNIESTIVELGSIFQQLAHMVKEQEETIQRIDENVLGAQLDVEAAHSEILKYFQSVTSNRWLMVKIFLILIVFFIIFVVFLA

SEQ ID NO: 3560 - protein, 159 aa, Homo sapiens [sequence omitted]

SEQ ID NO: 3561 - protein, 381 aa, Homo sapiens
MALKAEGAALDCFEVTLKCEEGEDEEEAMVVAVIPRPEPMLRVTQQEKTPPPRPSPLEAGSDGCEEPKQQVSWEQEFLVGSSPGGSGRALCMVCGAEIRAPSADTARSHILEQHPHTLDLSPSEKSNILEAWSEGVALLQDVRAEQPSPPNSDSGQDAHPDPDANPDAARMPAEIVVLLDSEDNPSLPKRSRPRGLRPLELPAVPATEPGNKKPRGQRWKEPPGEEPVRKKRGRPMTKNLDPDPEPPSPDSPTETFAAPAEVRHFTDGSFPAGFVLQLFSHTQLRGPDSKDSPKDREVAEGGLPRAESPSPAPPPGLRGTLDLQVIRVRMEEPPAVSLLQDWSRHPQGTKRVGAGDTSDWPTVLSESSTTVAGKPEKGNGV

SEQ ID NO: 3562 - protein, 616 aa, Homo sapiens
MFRTAVMMAASLALTGAVVAHAYYLKHQFYPTVVYLTKSSPSMAVLYIQAFVLVFLLGKVMGKVFFGQLRAAEMEHLLERSWYAVTETCLAFTVFRDDFSPRFVALFTLLLFLKCFHWLAEDRVDFMERSPNISWLFHCRIVSLMFLLGILDFLFVSHAYHSILTRGASVQLVFGFEYAILMTMVLTIFIKYVLHSVDLQSENPWDNKAVYMLYTELFTGFIKVLLYMAFMTIMIKVHTFPLFAIRPMYLAMRQFKKAVTDAIMSRRAIRNMNTLYPDATPEELQAMDNVCIICREEMVTGAKRLPCNHIFHTSCLRSWFQRQQTCPTCRMDVLRASLPAQSPPPPEPADQGPPPAPHPPPLLPQPPNFPQGLLPPFPPGMFPLWPPMGPFPPVPPPPSSGEAVAPPSTSAALSRPSGAATTTAAGTSATAASATASGPGSGSAPEAGPAPGFPFPPPWMGMPLPPPFAFPPMPVPPAGFAGLTPEELRALEGHERQHLEARLQSLRNIHTLLDAAMLQINQYLTVLASLGPPRPATSVNSTEETATTVVAAASSTSIPSSEATTPTPGASPPAPEMERPPAPESVGTEEMPEDGEPDAAELRRRRLQKLESPVAH

SEQ ID NO: 3563 - protein, 310 aa, Homo sapiens
MGLCKCPKRKVTNLFCFEHRVNVCEHCLVANHAKCIVQSYLQWLQDSDYNPNCRLCNIPLASRETTRLVCYDLFHWACLNERAAQLPRNTAPAGYQCPSCNGPIFPPTNLAGPVASALREKLATVNWARAGLGLPLIDEVVSPEPEPLNTSDFSDWSSFNASSTPGPEEVDSASAAPAFYSQAPRPPASPGRPEQHTVIHMGNPEPLTHAPRKVYDTRDDDRTPGLHGDCDDDKYRRRPALGWLARLLRSRAGSRKRPLTLLQRAGLLLLLGLLGFLALLALMSRLGRAAADSDPNLDPLMNPHIRVGPS

SEQ ID NO: 3564 - protein, 1615 aa, Homo sapiens
MEAAPPGPPWPLLLLLLLLLALCGCPAPAAASPLLLFANRRDVRLVDAGGVKLESTIVVSGLEDAAAVDFQFSKGAVYWTDVSEEAIKQTYLNQTGAAVQNVVISGLVSPDGLACDWVGKKLYWTDSETNRIEVANLNGTSRKVLFWQDLDQPRAIALDPAHGYMYWTDWGETPRIERAGMDGSTRKIIVDSDIYWPNGLTIDLEEQKLYWADAKLSFIHRANLDGSFRQKVVEGSLTHPFALTLSGDTLYWTDWQTRSIHACNKRTGGKRKEILSALYSPMDIQVLSQERQPFFHTRCEEDNGGCSHLCLLSPSEPFYTCACPTGVQLQDNGRTCKAGAEEVLLLARRTDLRRISLDTPDFTDIVLQVDDIRHAIAIDYDPLEGYVYWTDDEVRAIRRAYLDGSGAQTLVNTEINDPDGIAVDWVARNLYWTDTGTDRIEVTRLNGTSRKILVSEDLDEPRAIALHPVMGLMYWTDWGENPKIECANLDGQERRVLVNASLGWPNGLALDLQEGKLYWGDAKTDKIEVINVDGTKRRTLLEDKLPHIFGFTLLGDFIYWTDWQRRSIERVHKVKASRDVIIDQLPDLMGLKAVNVAKVVGTNPCADRNGGCSHLCFFTPHATRCGCPIGLELLSDMKTCIVPEAFLVFTSRAAIHRISLETNNNDVAIPLTGVKEASALDFDVSNNHIYWTDVSLKTISRAFMNGSSVEHVVEFGLDYPEGMAVDWMGKNLYWADTGTNRIEVARLDGQFRQVLVWRDLDNPRSLALDPTKGYIYWTEWGGKPRIVRAFMDGTNCMTLVDKVGRANDLTIDYADQRLYWTDLDTNMIESSNMLGQERVVIADDLPHPFGLTQYSDYIYWTDWNLHSIERADKTSGRNRTLIQGHLDFVMDILVFHSSRQDGLNDCMHNNGQCGQLCLAIPGGHRCGCASHYTLDPSSRNCSPPTTFLLFSQKSAISRMIPDDQHSPDLILPLHGLRNVKAIDYDPLDKFIYWVDGRQNIKRAKDDGTQPFVLTSLSQGQNPDRQPHDLSIDIYSRTLFWTCEATNTINVHRLSGEAMGVVLRGDRDKPRAIVVNAERGYLYFTNMQDRAAKIERAALDGTEREVLFTTGLIRPVALVVDNTLGKLFWVDADLKRIESCDLSGANRLTLEDANIVQPLGLTILGKHLYWIDRQQQMIERVEKTTGDKRTRIQGRVAHLTGIHAVEEVSLEEFSAHPCARDNGGCSHICIAKGDGTPRCSCPVHLVLLQNLLTCGEPPTCSPDQFACATGEIDCIPGAWRCDGFPECDDQSDEEGCPVCSAAQFPCARGQCVDLRLRCDGEADCQDRSDEADCDAICLPNQFRCASGQCVLIKQQCDSFPDCIDGSDELMCEITKPPSDDSPAHSSAIGPVIGIILSLFVMGGVYFVCQRVVCQRYAGANGPFPHEYVSGTPHVPLNFIAPGGSQHGPFTGIACGKSMMSSVSLMGGRGGVPLYDRNHVTGASSSSSSSTKATLYPPILNPPPSPATDPSLYNMDMFYSSNIPATARPYRPYIIRGMAPPTTPCSTDVCDSDYSASRWKASKYYLDLNSDSDPYPPPPTPHSQYLSAEDSCPPSPATERSYFHLFPPPPSPCTDSS

SEQ ID NO: 3565 - protein, 752 aa, Homo sapiens
MAEPQAESEPLLGGARGGGGDWPAGLTTYRSIQVGPGAAARWDLCIDQAVVFIEDAIQYRSINHRVDASSMWLYRRYYSNVCQRTLSFTIFLILFLAFIETPSSLTSTADVRYRAAPWEPPCGLTESVEVLCLLVFAADLSVKGYLFGWAHFQKNLWLLGYLVVLVVSLVDWTVSLSLVCHEPLRIRRLLRPFFLLQNSSMMKKTLKCIRWSLPEMASVGLLLAIHLCLFTMFGMLLFAGGKQDDGQDRERLTYFQNLPESLTSLLVLLTTANNPDVMIPAYSKNRAYAIFFIVFTVIGSLFLMNLLTAIIYSQFRGYLMKSLQTSLFRRRLGTRAAFEVLSSMVGEGGAFPQAVGVKPQNLLQVLQKVQLDSSHKQAMMEKVRSYGSVLLSAEEFQKLFNELDRSVVKEHPPRPEYQSPFLQSAQFLFGHYYFDYLGNLIALANLVSICVFLVLDADVLPAERDDFILGILNCVFIVYYLLEMLLKVFALGLRGYLSYPSNVFDGLLTVVLLVLEISTLAVYRLPHPGWRPEMVGLLSLWDMTRMLNMLIVFRFLRIIPSMKLMAVVASTVLGLVQNMRAFGGILVVVYYVFAIIGINLFRGVIVALPGNSSLAPANGSAPCGSFEQLEYWANNFDDFAAALVTLWNLMVVNNWQVFLDAYRRYSGPWSKIYFVLWWLVSSVIWVNLFLALILENFLHKWDPRSHLQPLAGTPEATYQMTVELLFRDILEEPGEDELTERLSQHPHLWLCR

SEQ ID NO: 3566 - protein, 216 aa, Homo sapiens
MRSGCVVVHVWILAGLWLAVAGRPLAFSDAGPHVHYGWGDPIRLRHLYTSGPHGLSSCFLRIRADGVVDCARGQSAHSLLEIKAVALRTVAIKGVHSVRYLCMGADGKMQGLLQYSEEDCAFEEEIRPDGYNVYRSEKHRLPVSLSSAKQRQLYKNRGFLPLSHFLPMLPMVPEEPEDLRGHLESDMFSSPLETDSMDPFGLVTGLEAVRSPSFEK

SEQ ID NO: 3567 - protein, 160 aa, Homo sapiens
MGKIALQLKATLENITNLRPVGEDFRWYLKMKCGNCGEISDKWQYIRLMDSVALKGGRGSASMVQKCKLCARENSIEILSSTIKPYNAEDNENFKTIVEFECRGLEPVDFQPQAGFAAEGVESGTAFSDINLQEKDWTDYDEKAQESVGIYEVTHQFVKC

SEQ ID NO: 3568 - protein, 349 aa, Homo sapiens
MAGPAIHTAPMLFLVLLLPLELSLAGALAPGTPARNLPENHIDLPGPALWTPQASHHRRRGPGKKEWGPGLPSQAQDGAVVTATRQASRLPEAEGLLPEQSPAGLLQDKDLLLGLALPYPEKENRPPGWERTRKRSREHKRRRDRLRLHQGRALVRGPSSLMKKAELSEAQVLDAAMEESSTSLAPTMFFLTTFEAAPATEESLILPVTSLRPQQAQPRSDGEVMPTLDMALFDWTDYEDLKPDGWPSAKKKEKHRGKLSSDGNETSPAEGEPCDHHQDCLPGTCCDLREHLCTPHNRGLNNKCFDDCMCVEGLRCYAKFHRNRRVTRRKGRCVEPETANGDQGSFINV

SEQ ID NO: 3569 - protein, 238 aa, Homo sapiens
MLTPLGKFSTAKFAVRLPRVWEARAPSLSGAPAPTPPAPPPSRSSRLGLWPRCFLIFPQLRILLLGPQESNNSTGTMWKVSALLFVLGSASLWVLAEGASTGQPEDDTETTGLEGGVAMPGAEDDVVTPGTSEDRYKSGLTTLVATSVNSVTGIRIEDLPTSESTVHAQEQSPSATASNVATSHSTEKVDGDTQTTVEKDGLSTVTLVGIIVGVLLAIGFIGAIIVVVMRKMSGRYSP

SEQ ID NO: 3570 - protein, 634 aa, Homo sapiens
MAMWNRPCQRLPQQPLVAEPTAEGEPHLPTGRELTEANRFAYAALCGISLSQLFPEPEHSSFCTEFMAGLVQWLELSEAVLPTMTAFASGLGGEGADVFVQILLKDPILKDDPTVITQDLLSFSLKDGHYDARARVLVCHMTSLLQVPLEELDVLEEMFLESLKEIKEEESEMAEASRKKKENRRKWKRYLLIGLATVGGGTVIGVTGGLAAPLVAAGAATIIGSAGAAALGSAAGIAIMTSLFGAAGAGLTGYKMKKRVGAIEEFTFLPLTEGRQLHITIAVTGWLASGKYRTFSAPWAALAHSREQYCLAWEAKYLMELGNALETILSGLANMVAQEALKYTVLSGIVAALTWPASLLSVANVIDNPWGVCLHRSAEVGKHLAHILLSRQQGRRPVTLIGFSLGARVIYFCLQEMAQEKDCQGIIEDVILLGAPVEGEAKHWEPFRKVVSGRIINGYCRGDWLLSFVYRTSSVQLRVAGLQPVLLQDRRVENVDLTSVVSGHLDYAKQMDAILKAVGIRTKPGWDEKGLLLAPGCLPSEEPRQAAAAASSGETPHQVGQTQGPISGDTSKLAMSTDPSQAQVPVGLDQSEGASLPAAASPERPPICSHGMDPNPLGCPDCACKTQGPSTGLD

SEQ ID NO: 3571 - protein, 1229 aa, Homo sapiens
MGASRDRGLAALWCLGLLGGLARVAGTHYRYLWRGCYPCHLGQAGYPVSAGDQRPDVDECRTHNGGCQHRCVNTPGSYLCECKPGFRLHTDSRTCLAINSCALGNGGCQHHCVQLTITRHRCQCRPGFQLQEDGRHCVRRSPCANRNGSCMHRCQVVRGLARCECHVGYQLAADGKACEDVDECAAGLAQCAHGCLNTQGSFKCVCHAGYELGADGRQCYRIEMEIVNSCEANNGGCSHGCSHTSAGPLCTCPRGYELDTDQRTCIDVDDCADSPCCQQVCTNNPGGYECGCYAGYRLSADGCGCEDVDECASSRGGCEHHCTNLAGSFQCSCEAGYRLHEDRRGCSPLEEPMVDLDGELPFVRPLPHIAVLQDELPQLFQDDDVGADEEEAELRGEHTLTEKFVCLDDSFGHDCSLTCDDCRNGGTCLLGLDGCDCPEGWTGLICNETCPPDTFGKNCSFSCSCQNGGTCDSVTGACRCPPGVSGTNCEDGCPKGYYGKHCRKKCNCANRGRCHRLYGACLCDPGLYGRFCHLTCPPWAFGPGCSEECQCVQPHTQSCDKRDGSCSCKAGFRGERCQAECELGYFGPGCWQACTCPVGVACDSVSGECGKRCPAGFQGEDCGQECPVGTFGVNCSSSCSCGGAPCHGVTGQCRCPPGRTGEDCEADCPEGRWGLGCQEICPACQHAARCDPETGACLCLPGFVGSRCQDVCPAGWYGPSCQTRCSCANDGHCHPATGHCSCAPGWTGFSCQRACDTGHWGPDCSHPCNCSAGHGSCDAISGLCLCEAGYVGPRCEQQCPQGHFGPGCEQRCQCQHGAACDHVSGACTCPAGWRGTFCEHACPAGFFGLDCRSACNCTAGAACDAVNGSCLCPAGRRGPRCAEKCLPRDVRAGCRHSGGCLNGGLCDPHTGRCLCPAGWTGDKCQSPCLRGWFGEACAQRCSCPPGAACHHVTGACRCPPGFTGSGCEQGCPPGRYGPGCEQLCGCLNGGSCDAATGACRCPTGFLGTDCNLTCPQGRFGPNCTHVCGCGQGAACDPVTGTCLCPPGRAGVRCERGCPQNRFGVGCEHTCSCRNGGLCHASNGSCSCGLGWTGRHCELACPPGRYGAACHLECSCHNNSTCEPATGTCRCGPGFYGQACEHRRSGATCNLDCRRGQFGPSCTLHCDCGGGADCDPVSGQCHCVDGYMGPTCREGGPLRLPENPSLAQGSAGTLPASSRPTSRSGGPARH

SEQ ID NO: 3572 - protein, 2047 aa, Homo sapiens
MAASERRAFAHKINRTVAAEVRKQVSRERSGSPHSSRRCSSSLGVPLTEVVEPLDFEDVLLSRPPDAEPGPLRDLVEFPADDLELLLQPRECRTTEPGIPKDEKLDAQVRAAVEMYIEDWVIVHRRYQYLSAAYSPVTTDTQRERQKGLPRQVFEQDASGDERSGPEDSNDSRRGSGSPEDTPRSSGASSIFDLRNLAADSLLPSLLERAAPEDVDRRNETLRRQHRPPALLTLYPAPDEDEAVERCSRPEPPREHFGQRILVKCLSLKFEIEIEPIFGILALYDVREKKKISENFYFDLNSDSMKGLLRAHGTHPAISTLARSAIFSVTYPSPDIFLVIKLEKVLQQGDISECCEPYMVLKEVDTAKNKEKLEKLRLAAEQFCTRLGRYRMPFAWTAVHLANIVSSAGQLDRDSDSEGERRPAWTDRRRRGPQDRASSGDDACSFSGFRPATLTVTNFFKQEAERLSDEDLFKFLADMRRPSSLLRRLRPVTAQLKIDISPAPENPHFCLSPELLHIKPYPDPRGRPTKEILEFPAREVYAPHTSYRNLLYVYPHSLNFSSRQGSVRNLAVRVQYMTGEDPSQALPVIFGKSSCSEFTREAFTPVVYHNKSPEFYEEFKLHLPACVTENHHLLFTFYHVSCQPRPGTALETPVGFTWIPLLQHGRLRTGPFCLPVSVDQPPPSYSVLTPDVALPGMRWVDGHKGVFSVELTAVSSVHPQDPYLDKFFTLVHVLEEGAFPFRLKDTVLSEGNVEQELRASLAALRLASPEPLVAFSHHVLDKLVRLVIRPPIISGQIVNLGRGAFEAMAHVVSLVHRSLEAAQDARGHCPQLAAYVHYAFRLPGTEPSLPDGAPPVTVQAATLARGSGRPASLYLARSKSISSSNPDLAVAPGSVDDEVSRILASKLLHEELALQWVVSSSAVREAILQHAWFFFQLMVKSMALHLLLGQRLDTPRKLRFPGRFLDDITALVGSVGLEVITRVHKDVELAEHLNASLAFFLSDLLSLVDRGFVFSLVRAHYKQVATRLQSSPNPAALLTLRMEFTRILCSHEHYVTLNLPCCPLSPPASPSPSVSSTTSQSSTFSSQAPDPKVTSMFELSGPFRQQHFLAGLLLTELALALEPEAEGAFLLHKKAISAVHSLLCGHDTDPRYAEATVKARVAELYLPLLSIARDTLPRLHDFAEGPGQRSRLASMLDSDTEGEGDIAGTINPSVAMAIAGGPLAPGSRASISQGPPTASRAGCALSAESSRTLLACVLWVLKNTEPALLQRWATDLTLPQLGRLLDLLYLCLAAFEYKGKKAFERINSLTFKKSLDMKARLEEAILGTIGARQEMVRRSRERSPFGNPENVRWRKSVTHWKQTSDRVDKTKDEMEHEALVEGNLATEASLVVLDTLEIIVQTVMLSEARESVLGAVLKVVLYSLGSAQSALFLQHGLATQRALVSKFPELLFEEDTELCADLCLRLLRHCGSRISTIRTHASASLYLLMRQNFEIGHNFARVKMQVTMSLSSLVGTTQNFSEEHLRRSLKTILTYAEEDMGLRDSTFAEQVQDLMFNLHMILTDTVKMKEHQEDPEMLIDLMYRIARGYQGSPDLRLTWLQNMAGKHAELGNHAEAAQCMVHAAALVAEYLALLEDHRHLPVGCVSFQNISSNVLEESAISDDILSPDEEGFCSGKHFTELGLVGLLEQAAGYFTMGGLYEAVNEVYKNLIPILEAHRDYKKLAAVHGKLQEAFTKIMHQSSGWERVFGTYFRVGFYGAHFGDLDEQEFVYKEPSITKLAEISHRLEEFYTERFGDDVVEIIKDSNPVDKSKLDSQKAYIQITYVEPYFDTYELKDRVTYFDRNYGLRTFLFCTPFTPDGRAHGELPEQHKRKTLLSTDHAFPYIKTRIRVCHREETVLTPVEVAIEDMQKKTRELAFATEQDPPDAKMLQMVLQGSVGPTVNQGPLEVAQVFLAEIPEDPKLFRHHNKLRLCFKDFCKKCEDALRKNKALIGPDQKEYHRELERNYCRLREALQPLLTQRLPQLMAPTPPGLRNSLNRASFRKADL

SEQ ID NO: 3573 - protein, 653 aa, Homo sapiens
MADYSTVPPPSSGSAGGGGGGGGGGGVNDAFKDALQRARQIAAKIGGDAGTSLNSNDYGYGGQKRPLEDGDQPDAKKVAPQNDSFGTQLPPMHQQQRSVMTEEYKVPDGMVGFIIGRGGEQISRIQQESGCKIQIAPDSGGLPERSCMLTGTPESVQSAKRLLDQIVEKGRPAPGFHHGDGPGNAVQEIMIPASKAGLVIGKGGETIKQLQERAGVKMVMIQDGPQNTGADKPLRITGDPYKVQQAKEMVLELIRDQGGFREVRNEYGSRIGGNEGIDVPIPRFAVGIVIGRNGEMIKKIQNDAGVRIQFKPDDGTTPERIAQITGPPDRCQHAAEIITDLLRSVQAGNPGGPGPGGRGRGRGQGNWNMGPPGGLQEFNFIVPTGKTGLIIGKGGETIKSISQQSGARIELQRNPPPNADPNMKLFTIRGTPQQIDYARQLIEEKIGGPVNPLGPPVPHGPHGVPGPHGPPGPPGPGTPMGPYNPAPYNPGPPGPAPHGPPAPYAPQGWGNAYPHWQQQAPPDPAKAGTDPNSAAWAAYYAHYYQQQAQPPPAAPAGAPTTTQTNGQGDQQNPAPAGQVDYTKAWEEYYKKMGQAVPAPTGAPPGGQPDYSAAWAEYYRQQAAYYAQTSPQGMPQHPPAPQCRFDPASIELAL

SEQ ID NO: 3574 - protein, 1532 aa, Homo sapiens
MGHSKQIRILLLNEMEKLEKTLFRLEQGYELQFRLGPTLQGKAVTVYTNYPFPGETFNREKFRSLDWENPTEREDDSDKYCKLNLQQSGSFQYYFLQGNEKSGGGYIVVDPILRVGADNHVLPLDCVTLQTFLAKCLGPFDEWESRLRVAKESGYNMIHFTPLQTLGLSRSCYSLANQLELNPDFSRPNRKYTWNDVGQLVEKLKKEWNVICITDVVYNHTAANSKWIQEHPECAYNLVNSPHLKPAWVLDRALWRFSCDVAEGKYKEKGIPALIENDHHMNSIRKIIWEDIFPKLKLWEFFQVDVNKAVEQFRRLLTQENRRVTKSDPNQHLTIIQDPEYRRFGCTVDMNIALTTFIPHDKGPAAIEECCNWFHKRMEELNSEKHRLINYHQEQAVNCLLGNVFYERLAGHGPKLGPVTRKHPLVTRYFTFPFEEIDFSMEESMIHLPNKACFLMAHNGWVMGDDPLRNFAEPGSEVYLRRELICWGDSVKLRYGNKPEDCPYLWAHMKKYTEITATYFQGVRLDNCHSTPLHVAEYMLDAARNLQPNLYVVAELFTGSEDLDNVFVTRLGISSLIREAMSAYNSHEEGRLVYRYGGEPVGSFVQPCLRPLMPAIAHALFMDITHDNECPIVHRSAYDALPSTTIVSMACCASGSTRGYDELVPHQISVVSEERFYTKWNPEALPSNTGEVNFQSGIIAARCAISKLHQELGAKGFIQVYVDQVDEDIVAVTRHSPSIHQSVVAVSRTAFRNPKTSFYSKEVPQMCIPGKIEEVVLEARTIERNTKPYRKDENSINGTPDITVEIREHIQLNESKIVKQAGVATKGPNEYIQEIEFENLSPGSVIIFRVSLDPHAQVAVGILRNHLTQFSPHFKSGSLAVDNADPILKIPFASLASRLTLAELNQILYRCESEEKEDGGGCYDIPNWSALKYAGLQGLMSVLAEIRPKNDLGHPFCNNLRSGDWMIDYVSNRLISRSGTIAEVGKWLQAMFFYLKQIPRYLIPCYFDAILIGAYTTLLDTAWKQMSSFVQNGSTFVKHLSLGSVQLCGVGKFPSLPILSPALMDVPYRLNEITKEKEQCCVSLAAGLPHFSSGIFRCWGRDTFIALRGILLITGRYVEARNIILAFAGTLRHGLIPNLLGEGIYARYNCRDAVWWWLQCIQDYCKMVPNGLDILKCPVSRMYPTDDSAPLPAGTLDQPLFEVIQEAMQKHMQGIQFRERNAGPQIDRNMKDEGFNITAGVDEETGFVYGGNRFNCGTWMDKMGESDRARNRGIPATPRDGSAVEIVGLSKSAVRWLLELSKKNIFPYHEVTVKRHGKAIKVSYDEWNRKIQDNFEKLFHVSEDPSDLNEKHPNLVHKRGIYKDSYGASSPWCDYQLRPNFTIAMVVAPELFTTEKAWKALEIAEKKLLGPLGMKTLDPDDMVYCGIYDNALDNDNYNLAKGFNYHQGPEWLWPIGYFLRAKLYFSRLMGPETTAKTIVLVKNVLSRHYVHLERSPWKGLPELTNENAQYCPFSCETQAWSIATILETLYDL

SEQ ID NO: 3575 - protein, 739 aa, Homo sapiens
MPGKMVVILGASNILWIMFAASQAFKIETTPESRYLAQIGDSVSLTCSTTGCESPFFSWRTQIDSPLNGKVTNEGTTSTLTMNPVSFGNEHSYLCTATCESRKLEKGIQVEIYSFPKDPEIHLSGPLEAGKPITVKCSVADVYPFDRLEIDLLKGDHLMKSQEFLEDADRKSLETKSLEVTFTPVIEDIGKVLVCRAKLHIDEMDSVPTVRQAVKELQVYISPKNTVISVNPSTKLQEGGSVTMTCSSEGLPAPEIFWSKKLDNGNLQHLSGNATLTLIAMRMEDSGIYVCEGVNLIGKNRKEVELIVQEKPFTVEISPGPRIAAQIGDSVMLTCSVMGCESPSFSWRTQIDSPLSGKVRSEGTNSTLTLSPVSFENEHSYLCTVTCGHKKLEKGIQVELYSFPRDPEIEMSGGLVNGSSVTVSCKVPSVYPLDRLEIELLKGETILENIEFLEDTDMKSLENKSLEMTFIPTIEDTGKALVCQAKLHIDDMEFEPKQRQSTQTLYVNVAPRDTTVLVSPSSILEEGSSVNMTCLSQGFPAPKILWSRQLPNGELQPLSENATLTLISTKMEDSGVYLCEGINQAGRSRKEVELIIQVTPKDIKLTAFPSESVKEGDTVIISCTCGNVPETWIILKKKAETGDTVLKSIDGAYTIRKAQLKDAGVYECESKNKVGSQLRSLTLDVQGRENNKDYFSPELLVLYFASSLIIPAIGMIIYFARKANMKGSYSLVEAQKSKV

SEQ ID NO: 3576 - protein, 895 aa, Homo sapiens
MKIGSGFLSGGGGTGSSGGSGSGGGGSGGGGGGGSSGRRAEMEPTFPQGMVMFNHRLPPVTSFTRPAGSAAPPPQCVLSSSTSAAPAAEPPPPPAPDMTFKKEPAASAAAFPSQRTSWGFLQSLVSIKQEKPADPEEQQSHHHHHHHHYGGLFAGAEERSPGLGGGEGGSHGVIQDLSILHQHVQQQPAQHHRDVLLSSSSRTDDHHGTEEPKQDTNVKKAKRPKPESQGIKAKRKPSASSKPSLVGDGEGAILSPSQKPHICDHCSAAFRSSYHLRRHVLIHTGERPFQCSQCSMGFIQKYLLQRHEKIHSREKPFGCDQCSMKFIQKYHMERHKRTHSGEKPYKCDTCQQYFSRTDRLLKHRRTCGEVIVKGATSAEPGSSNHTNMGNLAVLSQGNTSSSRRKTKSKSIAIENKEQKTGKTNESQISNNINMQSYSVEMPTVSSSGGIIGTGIDELQKRVPKLIFKKGSRKNTDKNYLNFVSPLPDIVGQKSLSGKPSGSLGIVSNNSVETIGLLQSTSGKQGQISSNYDDAMQFSKKRRYLPTASSNSAFSINVGHMVSQQSVIQSAGVSVLDNEAPLSLIDSSALNAEIKSCHDKSGIPDEVLQSILDQYSNKSESQKEDPFNIAEPRVDLHTSGEHSELVQEENLSPGTQTPSNDKASMLQEYSKYLQQAFEKSTNASFTLGHGFQFVSLSSPLHNHTLFPEKQIYTTSPLECGFGQSVTSVLPSSLPKPPFGMLFGSQPGLYLSALDATHQQLTPSQELDDLIDSQKNLETSSAFQSSSQKLTSQKEQKNLESSTGFQIPSQELASQIDPQKDIEPRTTYQIENFAQAFGSQFKSGSRVPMTFITNSNGEVDHRVRTSVSDFSGYTNMMSDVSEPCSTRVKTPTSQSYR

SEQ ID NO: 3577 - protein, 587 aa, Homo sapiens
MPTALCPRVLAPKESEEPRKMRSPPGENPSPQGELPSPESSRRLFRRFRYQEAAGPREALQRLWDLCGGWLRPERHTKEQILELLVLEQFLAILPREIQSWVRAQEPESGEQAVAAVEALEREPGRPWQWLKHCEDPVVIDDGDSPLDQEQEQLPVEPHSDLAKNQDAQPITLAQCLGLPSRPPSQLSGDPVLQDAFLLQEENVRDTQQVTTLQLPPSRVSPFKDMILCFSEEDWSLLDPAQTGFYGEFIIGEDYGVSMPPNDLAAQPDLSQGEENEPRVPELQDLQGKEVPQVSYLDSPSLQPFQVEERRKREELQVPEFQACPQTVVPQNTYPAGGNPRSLENSLDEEVTIEIVLSSSGDEDSQHGPYCTEELGSPTEKQRSLPASHRSSTEAGGEVQTSKKSYVCPNCGKIFRWRVNFIRHLRSRREQEKPHECSVCGELFSDSEDLDGHLESHEAQKPYRCGACGKSFRLNSHLLSHRRIHLQPDRLQPVEKREQAASEDADKGPKEPLENGKAKLSFQCCECGKAFQRHDHLARHRSHFHLKDKARPFQCRYCVKSFTQNYDLLRHERLHMKRRSKQALNSY

SEQ ID NO: 3578 - protein, 709 aa, Homo sapiens
MATAGGGSGADPGSRGLLRLLSFCVLLAGLCRGNSVERKIYIPLNKTAPCVRLLNATHQIGCQSSISGDTGVIHVVEKEEDLQWVLTDGPNPPYMVLLESKHFTRDLMEKLKGRTSRIAGLAVSLTKPSPASGFSPSVQCPNDGFGVYSNSYGPEFAHCREIQWNSLGNGLAYEDFSFPIFLLEDENETKVIKQCYQDHNLSQNGSAPTFPLCAMQLFSHMHAVISTATCMRRSSIQSTFSINPEIVCDPLSDYNVWSMLKPINTTGTLKPDDRVVVAATRLDSRSFFWNVAPGAESAVASFVTQLAAAEALQKAPDVTTLPRNVMFVFFQGETFDYIGSSRMVYDMEKGKFPVQLENVDSFVELGQVALRTSLELWMHTDPVSQKNESVRNQVEDLLATLEKSGAGVPAVILRRPNQSQPLPPSSLQRFLRARNISGVVLADHSGAFHNKYYQSIYDTAENINVSYPEWLSPEEDLNFVTDTAKALADVATVLGRALYELAGGTNFSDTVQADPQTVTRLLYGFLIKANNSWFQSILRQDLRSYLGDGPLQHYIAVSSPTNTTYVVQYALANLTGTVVNLTREQCQDPSKVPSENKDLYEYSWVQGPLHSNETDRLPRCVRSTARLARALSPAFELSQWSSTEYSTWTESRWKDIRARIFLIASKELELITLTVGFGILIFSLIVTYCINAKADVLFIAPREPGAVSY

SEQ ID NO: 3579 - protein, 750 aa, Homo sapiens
MAKPRLLVLYFALIVVPAWVSSIVLTGTSEPPDAQTVAPAEDETLQNEADNQENVLSQLLGDYDKVKAMSEGSDCQCKCVVRPLGRDACQRINAGASRKEDFYTVETITSGSSCKCACVAPPSALNPCEGDFRLQKLREADSQDLKLSTIIDMLEGAFYGLDLLKLHSVTTKLVGRVDKLEEEVSKNLTKENEQIKEDMEEIRTEMNKRGKENCSENILDSMPDIRSALQRDAAAAYAHPEYEERFLQEETVSQQINSIELLQTRPLALPEVVKSQRPLQRQVHLRGRPASQPTVIRGITYYKAKVSEEENDIEEQQDEFFSGDNGVDLLIEDQLLRHNGLMTSVTRRPAATRQGHSTAVTSDLNARTAPWSSALPQPSTSDPSIANHASVGPTLQTTSVSPDPTRESVLQPSPQVPATTVAHTATQQPAAPAPPAVSPREALMEAMHTVPVPPTTVRTDSLGKDAPAGWGTTPASPTLSPEEEDDIRNVIGRCKDTLSTITGPTTQNTYGRNEGAWMKDPLAKDERIYVTNYYYGNTLVEFRNLENFKQGRWSNSYKLPYSWIGTGHVVYNGAFYYNRAFTRNIIKYDLKQRYVAAWAMLHDVAYEEATPWRWQGHSDVDFAVDENGLWLIYPALDDEGFSQEVIVLSKLNAADLSTQKETTWRTGLRRNFYGNCFVICGVLYAVDSYNQRNANISYAFDTHTNTQIVPRLLFENEYSYTTQIDYNPKDRLLYAWDNGHQVTYHVIFAY

SEQ ID NO: 3580 - protein, 264 aa, Homo sapiens
MKLGCVLMAWALYLSLGVLWVAQMLLAASFETLQCEGPVCTEESSCHTEDDLTDAREAGFQVKAYTFSEPFHLIVSYDWLILQGPAKPVFEGDLLVLRCQAWQDWPLTQVTFYRDGSALGPPGPNREFSITVVQKADSGHYHCSGIFQSPGPGIPETASVVAITVQGASSSAAPPTLNPAPQKSAAPGTAPEEAPGPLPPPPTPSSEDPGFSSPLGMPDPHLYHQMGLLLKHMQDVRVLLGHLLMELRELSGHRKPGTTKATAE

SEQ ID NO: 3581 - protein, 406 aa, Homo sapiens
MGKVWKQQMYPQYATYYYPQYLQAKQSLVPAHPMAPPSPSTTSSNNNSSSSSNSGWDQLSKTNLYIRGLPPHTTDQDLVKLCQPYGKIVSTKAILDKTTNKCKGYGFVDFDSPAAAQKAVSALKASGVQAQMAKQQEQDPTNLYISNLPLSMDEQELENMLKPFGQVISTRILRDSSGTSRGVGFARMESTEKCEAVIGHFNGKFIKTPPGVSAPTEPLLCKFADGGQKKRQNPNKYIPNGRPWHREGEVRLAGMTLTYDPTTAAIQNGFYPSPYSIATNRMITQTSITPYIASPVSAYQVQSPSWMQPQPYILQHPGAVLTPSMEHTMSLQPASMISPLAQQMSHLSLGSTGTYMPATSAMQGAYLPQYAHMQTTAVPVEEASGQQQVAVETSNDHSPYTFQPNK

SEQ ID NO: 3582 - protein, 780 aa, Homo sapiens
MASAELQGKYQKLAQEYSKLRAQNQVLKKGVVDEQANSAALKEQLKMKDQSLRKLQQEMDSLTFRNLQLAKRVELLQDELALSEPRGKKNKKSGESSSQLSQEQKSVFDEDLQKKIEENERLHIQFFEADEQHKHVEAELRSRLATLETEAAQHQAVVDGLTRKYMETIEKLQNDKAKLEVKSQTLEKEAKECRLRTEECQLQLKTLHEDLSGRLEESLSIINEKVPFNDTKYSQYNALNVPLHNRRHQLKMRDIAGQALAFVQDLVTALLNFHTYTEQRIQIFPVDSAIDTISPLNQKFSQYLHENASYVRPLEEGMLHLFESITEDTVTVLETTVKLKTFSEHLTSYICFLRKILPYQLKSLEEECESSLCTSALRARNLELSQDMKKMTAVFEKLQTYIALLALPSTEPDGLLRTNYSSVLTNVGAALHGFHDVMKDISKHYSQKAAIEHELPTATQKLITTNDCILSSVVALTNGAGKIASFFSNNLDYFIASLSYGPKAASGFISPLSAECMLQYKKKAAAYMKSLRKPLLESVPYEEALANRRILLSSTESREGLAQQVQQSLEKISKLEQEKEHWMLEAQLAKIKLEKENQRIADKLKNTGSAQLVGLAQENAAVSNTAGQDEATAKAVLEPIQSTSLIGTLTRTSDSEVPDVESREDLIKNHYMARIVELTSQLQLADSKSVHFYAECRALSKRLALAEKSKEALTEEMKLASQNISRLQDELTTTKRSYEDQLSMMSDHLCSMNETLSKQREEIDTLKMSSKGNSKKNKSR

SEQ ID NO: 3583 - protein, 699 aa, Homo sapiens
MKQRFSALQLLKLLLLLQPPLPRALREALCPEPCNCVPDGALRCPGPTAGLTRLSLAYLPVKVIPSQAFRGLNEVIKIEISQIDSLERIEANAFDNLLNLSEILIQNTKNLRYIEPGAFINLPRLKYLSICNTGIRKFPDVTKVFSSESNFILEICDNLHITTIPGNAFQGMNNESVTLKLYGNGFEEVQSHAFNGTTLTSLELKENVHLEKMHNGAFRGATGPKTLDISSTKLQALPSYGLESIQRLIATSSYSLKKLPSRETFVNLLEATLTYPSHCCAFRNLPTKEQNFSHSISENFSKQCESTVRKVNNKTLYSSMLAESELSGWDYEYGFCLPKTPRCAPEPDAFNPCEDIMGYDFLRVLIWLINILAIMGNMTVLFVLLTSRYKLTVPRFLMCNLSFADFCMGLYLLLIASVDSQTKGQYYNHAIDWQTGSGCSTAGFFTVFASELSVYTLTVITLERWHTITYAIHLDQKLRLRHAILIMLGGWLFSSLIAMLPLVGVSNYMKVSICFPMDVETTLSQVYILTILILNVVAFFIICACYIKIYFAVRNPELMATNKDTKIAKKMAILIFTDFTCMAPISFFAISAAFKVPLITVTNSKVLLVLFYPINSCANPFLYAIFTKTFQRDFFLLLSKFGCCKRRAELYRRKDFSAYTSNCKNGFTGSNKPSQSTLKLSTLHCQGTALLDKTRYTEC

SEQ ID NO: 3584 - protein, 493 aa, Homo sapiens
MRRRRAAVAAGFCASFLLGSVLNVLFAPGSEPPRPGQSPEPSPAPGPGRRGGRGELARQIRARYEEVQRYSRGGPGPGAGRPERRRLMDLAPGGPGLPRPRPPWARPLSDGAPGWPPAPGPGSPGPGPRLGCAALRNVSGAQYMGSGYTKAVYRVRLPGGAAVALKAVDFSGHDLGSCVREFGVRRGCYRLAAHKLLKEMVLLERLRHPNVLQLYGYCYQDSEDIPDTLTTITELGAPVEMIQLLQTSWEDRFRICLSLGRLLHHLAHSPLGSVTLLDFRPRQFVLVDGELKVTDLDDARVEETPCAGSTDCILEFPARNFTLPCSAQGWCEGMNEKRNLYNAYRFFFTYLLPHSAPPSLRPLLDSIVNATGELAWGVDETLAQLEKVLHLYRSGQYLQNSTASSSTEYQCIPDSTIPQEDYRCWPSYHHGSCLLSVFNLAEAVDVCESHAQCRAFVVTNQTTWTGRQLVFFKTGWSQVVPDPNKTTYVKASG

SEQ ID NO: 3585 - protein, 370 aa, Homo sapiens
MLSNSQGQSPPVPFPAPAPPPQPPTPALPHPPAQPPPPPPQQFPQFHVKSGLQIKKNAIIDDYKVTSQVLGLGINGKVLQIFNKRTQEKFALKMLQDCPKARREVELHWRASQCPHIVRIVDVYENLYAGRKCLLIVMECLDGGELFSRIQDRGDQAFTEREASEIMKSIGEAIQYLHSINIAHRDVKPENLLYTSKRPNAILKLTDFGFAKETTSHNSLTTPCYTPYYVAPEVLGPEKYDKSCDMWSLGVIMYILLCGYPPFYSNHGLAISPGMKTRIRMGQYEFPNPEWSEVSEEVKMLIRNLLKTEPTQRMTITEFMNHPWIMQSTKVPQTPLHTSRVLKEDKERWEDVKGCLHDKNSDQATWLTRL

SEQ ID NO: 3586 - protein, 700 aa, Homo sapiens
MAGIAAKLAKDREAAEGLGSHDRAIKYLNQDYEALRNECLEAGTLFQDPSFPAIPSALGFKELGPYSSKTRGIEWKRPTEICADPQFIIGGATRTDICQGALGDCWLLAAIASLTLNEEILARVVPLNQSFQENYAGIFHFQFWQYGEWVEVVVDDRLPTKDGELLFVHSAEGSEFWSALLEKAYAKINGCYEALSGGATTEGFEDFTGGIAEWYELKKPPPNLFKIIQKALQKGSLLGCSIDITSAADSEAITFQKLVKGHAYSVTGAEEVESNGSLQKLIRIRNPWGEVEWTGRWNDNCPSWNTIDPEERERLTRRHEDGEFWMSFSDFLRHYSRLEICNLTPDTLTSDTYKKWKLTKMDGNWRRGSTAGGCRNYPNTFWMNPQYLIKLEEEDEDEEDGESGCTFLVGLIQKHRRRQRKMGEDMHTIGFGIYEVPEELSGQTNIHLSKNFFLTNRARERSDTFINLREVLNRFKLPPGEYILVPSTFEPNKDGDFCIRVFSEKKADYQAVDDEIEANLEEFDISEDDIDDGFRRLFAQLAGEDAEISAFELQTILRRVLAKRQDIKSDGFSIETCKIMVDMLDSDGSGKLGLKEFYILWTKIQKYQKIYREIDVDRSGTMNSYEMRKALEEAGFKMPCQLHQVIVARFADDQLIIDFDNFVRCLVRLETLFKIFKQLDPENTGTIELDLISWLCFSVL

SEQ ID NO: 3587 - protein, 128 aa, Homo sapiens
MAAVGSLLGRLRQSTVKATGPALRRLHTSSWRADSSRASLTRVHRQAYARLYPVLLVKQDGSTIHIRYREPRRMLAMPIDLDTLSPEERRARLRKREAQLQSRKEYEQELSDDLHVERYRQFWTRTKK

SEQ ID NO: 3588 - protein, 403 aa, Homo sapiens
MASQPPPPPKPWETRRIPGAGPGPGPGPTFQSADLGPTLMTRPGQPALTRVPPPILPRPSQQTGSSSVNTFRPAYSSFSSGYGAYGNSFYGGYSPYSYGYNGLGYNRLRVDDLPPSRFVQQAEESSRGAFQSIESIVHAFASVSMMMDATFSAVYNSFRAVLDVANHFSRLKIHFTKVFSAFALVRTIRYLYRRLQRMLGLRRGSENEDLWAESEGTVACLGAEDRAATSAKSWPIFLFFAVILGGPYLIWKLLSTHSDEVTDSINWASGEDDHVVARAEYDFAAVSEEEISFRAGDMLNLALKEQQPKVRGWLLASLDGQTTGLIPANYVKILGKRKGRKTVESSKVSKQQQSFTNPTLTKGATVADSLDEQEAAFESVFVETNKVPVAPDSIGKDGEKQDL

SEQ ID NO: 3589 - protein, 501 aa, Homo sapiens
MGCGLRKLEDPDDSSPGKIFSTLKRPQVETKTEFAYEYVLLDFTLQASSNPEVIKINSILDIVTKVENYYLKGYIVGAIHPVIQPVGQRKHLPASYLYRVVLLRLKLSPKNSAAPSGQRRPRLVIEECPLTSEAQTNDAAKELIEKINVAAKRGMKFVGFISQHYSPSKFCNGTNHDGDIESMLHVRHGSDENCRSWNEGTLSGQSSESGIEEELHHESGQYQMEQNGSPTSSKSRKGEASDNKLYTVFNAFDDDSTSWAYQEGILSMKVTRKGSVISTLDADWLELTTFYYKQGLSLIDSFVFWETSKGEHLPKSLEGFFIYEEEGSGVPGSSRKGNDAIVVEQWTVIEGCEIKTDYGPLLHTLAEFGWLLTSVLPTPVLRHDSEGNLATKQIVFLQRPVMWNSAAQTPDKKASRHIKGEDKNKATSRSIGLDTTSSQPAESRHLPEECRLSPSRECWTKEGRLAQHNSFSGFSSSDNVLRELDDGQFDQEDGVTQVTCM

SEQ ID NO: 3590 - protein, 489 aa, Homo sapiens
MDDDLMLALRLQEEWNLQEAERDHAQESLSLVDASWELVDPTPDLQALFVQFNDQFFWGQLEAVEVKWSVRMTLCAGICSYEGKGGMCSIRLSEPLLKLRPRKDLVETLLHEMIHAYLFVTNNDKDREGHGPEFCKHMHRINSLTGANITVYHTFHDEVDEYRRHWWRCNGPCQHRPPYYGYVKRATNREPSAHDYWWAEHQKTCGGTYIKIKEPENYSKKGKGKAKLGKEPVLAAENKDKPNRGEAQLVIPFSGKGYVLGETSNLPSPGKLITSHAINKTQDLLNQNHSANAVRPNSKIKVKFEQNGSSKNSHLVSPAVSNSHQNVLSNYFPRVSFANQKAFRGVNGSPRISVTVGNIPKNSVSSSSQRRVSSSKISLRNSSKVTESASVMPSQDVSGSEDTFPNKRPRLEDKTVFDNFFIKKEQIKSSGNDPKYSTTTAQNSSSSSSQSKMVNCPVCQNEVLESQINEHLDWCLEGDSIKVKSEESL

SEQ ID NO: 3591 - protein, 99 aa, Homo sapiens
MEPEQMLEGQTQVAENPHSEYGLTDNVERIVENEKINAEKSSKQKVDLQSLPTRAYLDQTVVPILLQGLAVLAKERPPNPIEFLASYLLKNKAQFEDRN

SEQ ID NO: 3592 - protein, 291 aa, Homo sapiens
MALAARLLPQFLHSRSLPCGAVRLRTPAVAEVRLPSATLCYFCRCRLGLGAALFPRSARALAASALPAQGSRWPVLSSPGLPAAFASFPACPQRSYSTEEKPQQHQKTKMIVLGFSNPINWVRTRIKAFLIWAYFDKEFSITEFSEGAKQAFAHVSKLLSQCKFDLLEELVAKEVLHALKEKVTSLPDNHKNALAANIDEIVFTSTGDISIYYDEKGRKFVNILMCFWYLTSANIPSETLRGASVFQVKLGNQNVETKQLLSASYEFQREFTQGVKPDWTIARIEHSKLLE

SEQ ID NO: 3593 - protein, 202 aa, Homo sapiens
MEAALLGLCNWSTLGVCAALKLPQISAVLAARSARGLSLPSLLLELAGFLVFLRYQCYYGYPPLTYLEYPILIAQDVILLLCIFHFNGNVKQATPYIAVLVSSWFILALQKWIIDLAMNLCTFISAASKFAQLQCLWKTRDSGTVSALTWSLSSYTCATRIITTLMTTNDFTILLRFVIMLALNIWVTVTVLRYRKTAIKAE

SEQ ID NO: 3594 - protein, 179 aa, Homo sapiens
MGILFTRIWRLFNHQEHKVIIVGLDNAGKTTILYQFSMNEVVHTSPTIGSNVEEIVINNTRFLMWDIGGQESLRSSWNTYYTNTEFVIVVVDSTDRERISVTREELYKMLAHEDLRKAGLLIFANKQDVKECMTVAEISQFLKLTSIKDHQWHIQACCALTGEGLCQGLEWMMSRLKIR

SEQ ID NO: 3595 - protein, 325 aa, Homo sapiens
MVCGSPGGMLLLRAGLLALAALCLLRVPGARAAACEPVRIPLCKSLPWNMTKMPNHLHHSTQANAILAIEQFEGLLGTHCSPDLLFFLCAMYAPICTIDFQHEPIKPCKSVCERARQGCEPILIKYRHSWPENLACEELPVYDRGVCISPEAIVTADGADFPMDSSNGNCRGASSERCKCKPIRATQKTYFRNNYNYVIRAKVKEIKTKCHDVTAVVEVKEILKSSLVNIPRDTVNLYTSSGCLCPPLNVNEEYIIMGYEDEERSRLLLVEGSIAEKWKDRLGKKVKRWDMKLRHLGLSKSDSSNSDSTQSQKSGRNSNPRQARN

SEQ ID NO: 3596 - protein, 342 aa, Homo sapiens
MAAEEEDEVEWVVESIAGFLRGPDWSIPILDFVEQKCEVFDDEEESKLTYTEIHQEYKELVEKLLEGYLKEIGINEDQFQEACTSPLAKTHTSQAILQPVLAAEDFTIFKAMMVQKNIEMQLQAIRIIQERNGVLPDCLTDGSDVVSDLEHEEMKILREVLRKSKEEYDQEEERKRKKQLSEAKTEEPTVHSSEAAIMNNSQGDGEHFAHPPSEVKMHFANQSIEPLGRKVERSETSSLPQKDLKIPGLEHASIEGPIANLSVLGTEELRQREHYLKQKRDKLMSMRKDMRTKQIQNMEQKGKPTGEVEEMTEKPEMTAEEKQTLLKRRLLAEKLKEEVINK

SEQ ID NO: 3597 - protein, 326 aa, Homo sapiens
MAAFAVEPQGPALGSEPMMLGSPTSPKPGVNAQFLPGFLMGDLPAPVTPQPRSISGPSVGVMEMRSPLLAGGSPPQPVVPAHKDKSGAPPVRSIYDDISSPGLGSTPLTSRRQPNISVMQSPLVGVTSTPGTGQSMFSPASIGQPRKTTLSPAQLDPFYTQGDSLTSEDHLDDSWVTVFGFPQASASYILLQFAQYGNILKHVMSNTGNWMHIRYQSKLQARKALSKDGRIFGESIMIGVKPCIDKSVMESSDRCALSSPSLAFTPPIKTLGTPTQPGSTPRISTMRPLATAYKASTSDYQVISDRQTPKKDESLVSKAMEYMFGW

SEQ ID NO: 3598 - protein, 357 aa, Homo sapiens
MSAFEKPQIIAHIQKGFNYTVFDCKWVPCSAKFVTMGNFARGTGVIQLYEIQHGDLKLLREIEKAKPIKCGTFGATSLQQRYLATGDFGGNLHIWNLEAPEMPVYSVKGHKEIINAIDGIGGLGIGEGAPEIVTGSRDGTVKVWDPRQKDDPVANMEPVQGENKRDCWTVAFGNAYNQEERVVCAGYDNGDIKLFDLRNMALRWETNIKNGVCSLEFDRKDISMNKLVATSLEGKFHVFDMRTQHPTKGFASVSEKAHKSTVWQVRHLPQNRELFLTAGGAGGLHLWKYEYPIQRSKKDSEGIEMGVAGSVSLLQNVTLSTQPISSLDWSPDKRGLCVCSSFDQTVRVLIVTKLNKI

SEQ ID NO: 3599 - protein, 665 aa, Homo sapiens
MEPRVVKPPGQDLVVESLKSRYGLGGSCPDEYDFSNFYQSKYKRRTLTSPGDLDIYSGDKVGSSLKYSDESKHCRTPLGSLFKHVNVNCLDDELDSFHDLKKQETEEELIENDYRVSTSKITKQSFKEIEKVALPTNTTSSRPRTECCSDAGDSPLKPVSCPKSKASDKRSLLPHQISQIYDELFQIHLKLQCETAAQQKFAEELQKRERFLLEREQLLFRHENALSKIKGVEEEVLTRFQIIKEQHDAEVEHLTEVLKEKNKETKRLRSSFDALKELNDTLKKQLNEASEENRKIDIQAKRVQARLDNLQRKYEFMTIQRLKGSSHAVHEMKSLKQEKAPVSKTYKVPLNGQVYELLTVFMDWISDHHLSKVKHEESGMDGKKPQLKFASQRNDIQEKCVKLLPLMTEQLQWMPFVNIKLHEPFVKFIYWSLRQLDAGAQHSTMTSTLRRLGEDIFKGVVTKGIQDNSPQHSVENKPKTAAFFKSSNLPLRFLSTLIVLKTVTQADYLAQAFDSLCLDLKTEEGKTLFLEYQAVPVILSHLRISSKGLLSNVIDSLLQMTVESKSLQPFLEACSNSLFFRTCSVLLRAPKLDLQILEKLSIILQKLSKIKSNKKLFELFTIHLMLQEIQRTTNPEHAFLCINLNSTLFNLGLTKCNSLVSSASP

SEQ ID NO: 3600 - protein, 721 aa, Homo sapiens
MELGKGKLLRTGLNALHQAVHPIHGLAWTDGNQVVLTDLRLHSGEVKFGDSKVIGQFECVCGLSWAPPVADDTPVLLAVQHEKHVTVWQLCPSPMESSKWLTSQTCEIRGSLPILPQGCVWHPKCAILTVLTAQDVSIFPNVHSDDSQVKADINTQGRIHCACWTQDGLRLVVAVGSSLHSYIWDSAQKTLHRCSSCLVFDVDSHVCSITATVDSQVAIATELPLDKICGLNASETFNIPPNSKDMTPYALPVIGEVRSMDKEATDSETNSEVSVSSSYLEPLDLTHIHFNQHKSEGNSLICLRKKDYLTGTGQDSSHLVLVTFKKAVTMTRKVTIPGILVPDLIAFNLKAHVVAVASNTCNIILIYSVIPSSVPNIQQIRLENTERPKGICFLTDQLLLILVGKQKLTDTTFLPSSKSDQYAISLIVREIMLEEEPSITSGESQTTYSTFSAPLNKANRKKLIESLSPDFCHQNKGLLLTVNTSSQNGRPGRTLIKEIQSPLSSICDGSIALDAEPVTQPASLPRHSSTPDHTSTLEPPRLPQRKNLQSEKETYQLSKEVEILSRNLVEMQRCLSELTNRLHNGKKSSSVYPLSQDLPYVHIIYQKPYYLGPVVEKRAVLLCDGKLRLSTVQQTFGLSLIEMLHDSHWILLSADSEGFIPLTFTATQEIIIRDGSLSRSDVFRDSFSHSPGAVSSLKVFTGLAAPSLDTTGCCNHVDGMA

SEQ ID NO: 3601 - protein, 392 aa, Homo sapiens
MEEQQPEPKSQRDSALGAAAAATPGGLSLSLSPGASGSSGSGSDGDSVPVSPQPAPPSPPAAPCLPPLAHHPHLPPHPPPPPPQHLAAPAHQPQPAAQLHRTTNFFIDNILRPDFGCKKEQPPPQLLVAAAARGGAGGGGRVERDRGQTAAGRDPVHPLGTRAPGAASLLCAPDANCGPPDGSQPAAAGAGASKAGNPAAAAAAAAAAVAAAAAAAAAKPSDTGGGGSGGGAGSPGAQGTKYPEHGNPAILLMGSANGGPVVKTDSQQPLVWPAWVYCTRYSDRPSSGPRTRKLKKKKNEKEDKRPRTAFTAEQLQRLKAEFQANRYITEQRRQTLAQELSLNESQIKIWFQNKRAKIKKATGIKNGLALHLMAQGLYNHSTTTVQDKDESE

SEQ ID NO: 3602 - protein, 538 aa, Homo sapiens
MAENLKRLVSNETLRTLQEKLDFWLKEYNTNTCDQNLNHCLELIEQVAKVQGQLFGILTAAAQEGGRNDGVETIKSRLLPWLEASFTAASLGKSVDSKVPSLQDTFDRERHKDPSPRDRDMQQLDSNLNSTRSQCNQVQDDLVETEKNLEESKNRSAISLLAAEEEINQLKKQLKSLQAQEDARHRNTDQRSSENRRSEPWSLEERKREQWNSLKQNADQQDTEAMSDYKKQLRNLKEEIAVLSAEKSALQGRSSRSRSPSPAPRSRSCSRSRSASPSTAVKVRRPSPNRSKLSNVARKAALLSRFSDSYSQARLDAQCLLRRCIDKAETVQRIIYIATVEAFHVAKMAFRHFKIHVRKSLTPSYVGSNDFENAVLDYVICHLDLYDSQSSVNDVIRAMNVNPKISFPPVVDFCLLSDFIQEICCIAFAMQALEPPLDIAYGADGEVFNDCKYRRSYDSDFTAPLVLYHVWPALMENDCVIMKGEAVTRRGAFWNSVRSVSRCRSRSLSPICPRSQIGLNTMSRSRSPSPIRCGLPRF

SEQ ID NO: 3603 - protein, 407 aa, Homo sapiens
MDGLPGRALGAACLLLLAAGWLGPEAWGSPTPPPTPAAPPPPPPPGSPGGSQDTCTSCGGFRRPEELGRVDGDFLEAVKRHILSRLQMRGRPNITHAVPKAAMVTALRKLHAGKVREDGRVEIPHLDGHASPGADGQERVSEIISFAETDGLASSRVRLYFFISNEGNQNLFVVQASLWLYLKLLPYVLEKGSRRKVRVKVYFQEQGHGDRWNMVEKRVDLKRSGWHTFPLTEAIQALFERGERRLNLDVQCDSCQELAVVPVFVDPGEESHRPFVVVQARLGDSRHRIRKRGLECDGRTNLCCRQQFFIDFRLIGWNDWIIAPTGYYGNYCEGSCPAYLAGVPGSASSFHTAVVNQYRMRGLNPGTVNSCCIPTKLSTMSMLYFDDEYNIVKRDVPNMIVEECGCA

SEQ ID NO: 3604 - protein, 341 aa, Homo sapiens
MSVLDALWEDRDVRFDLSAQQMKTRPGEVLIDCLDSIEDTKGNNGDRGRLLVTNLRILWHSLALSRVNVSVGYNCILNITTRTANSKLRGQTEALYILTKCNSTRFEFIFTNLVPGSPRLFTSVMAVHRAYETSKMYRDFKLRSALIQNKQLRLLPQEHVYDKINGVWNLSSDQGNLGTFFITNVRIVWHANMNDSFNVSIPYLQIRSIKIRDSKFGLALVIESSQQSGGYVLGFKIDPVEKLQESVKEINSLHKVYSASPIFGVDYEMEEKPQPLEALTVEQIQDDVEIDSDGHTDAFVAYFADGNKQQDREPVFSEELGLAIEKLKDGFTLQGLWEVMS

SEQ ID NO: 3605 - protein, 798 aa, Homo sapiens
MALQMFVTYSPWNCLLLLVALECSEASSDLNESANSTAQYASNAWFAAASSEPEEGISVFELDYDYVQIPYEVTLWILLASLAKIGFHLYHRLPGLMPESCLLILVGALVGGIIFGTDHKSPPVMDSSIYFLYLLPPIVLEGGYFMPTRPFFENIGSILWWAVLGALINALGIGLSLYLICQVKAFGLGDVNLLQNLLFGSLISAVDPVAVLAVFEEARVNEQLYMMIFGEALLNDGITVVLYNMLIAFTKMHKFEDIETVDILAGCARFIVVGLGGVLFGIVFGFISAFITRFTQNISAIEPLIVFMFSYLSYLAAETLYLSGILAITACAVTMKKYVEENVSQTSYTTIKYFMKMLSSVSETLIFIFMGVSTVGKNHEWNWAFICFTLAFCQIWRAISVFALFYISNQFRTFPFSIKDQCIIFYSGVRGAGSFSLAFLLPLSLFPRKKMFVTATLVVIYFTVFIQGITVGPLVRYLDVKKTNKKESINEELHIRLMDHLKAGIEDVCGHWSHYQVRDKFKKFDHRYLRKILIRKNLPKSSIVSLYKKLEMKQAIEMVETGILSSTAFSIPHQAQRIQGIKRLSPEDVESIRDILTSNMYQVRQRTLSYNKYNLKPQTSEKQAKEILIRRQNTLRESMRKGHSLPWGKPAGTKNIRYLSYPYGNPQSAGRDTRAAGFSDDDSSDPGSPSITFSACSRIGSLQKQEAQEIIPMKSLHRGRKAFSFGYQRNTSQEEYLGGVRRVALRPKPLFHAVDEEGESGGESEGKASLVEVRSRWTADHGHGRDHHRSHSPLLQKK

SEQ ID NO: 3606 - protein, 221 aa, Homo sapiens
MQKSEGSGGTQLKNRATGNYDQRTSSSTQLKHRNAVQGSKSSLSTSSPESARKLHPRPSDKLNPKTINPFGEQSRVPSAFAAIYSKGGIPCRLVHGSVKHRLQWECPPESLSFDPLLITLAEGLRETKHPYTFVSKEGFRELLLVKGAPEKAIPLLPRLIPVLKAALVHSDDEVFERGLNALVQLSVVVGPSLNDHLKHLLTSGSLSIIKSKIPTYCSICC

SEQ ID NO: 3607 - protein, 296 aa, Homo sapiens
MSRQEPKMFVLLYVTSFAICASGQPRGNQLKGENYSPRYICSIPGLPGPPGPPGANGSPGPHGRIGLPGRDGRDGRKGEKGEKGTAGLRGKTGPLGLAGEKGDQGETGKKGPIGPEGEKGEVGPIGPPGPKGDRGEQGDPGLPGVCRCGSIVLKSAFSVGITTSYPEERLPIIFNKVLFNEGEHYNPATGKFICAFPGIYYFSYDITLANKHLAIGLVHNGQYRIKTFDANTGNHDVASGSTVIYLQPEDEVWLEIFFTDQNGLFSDPGWADSLFSGFLLYVDTDYLDSISEDDEL

SEQ ID NO: 3608 - protein, 400 aa, Homo sapiens
MAWRRREASVGARGVLALALLALALCVPGARGRALEWFSAVVNIEYVDPQTNLTVWSVSESGRFGDSSPKEGAHGLVGVPWAPGGDLEGCAPDTRFFVPEPGGRGAAPWVALVARGGCTFKDKVLVAARRNASAVVLYNEERYGNITLPMSHAGTGNIVVIMISYPKGREILELVQKGIPVTMTIGVGTRHVQEFISGQSVVFVAIAFITMMIISLAWLIFYYIQRFLYTGSQIGSQSHRKETKKVIGQLLLHTVKHGEKGIDVDAENCAVCIENFKVKDIIRILPCKHIFHRICIDPWLLDHRTCPMCKLDVIKALGYWGEPGDVQEMPAPESPPGRDPAANLSLALPDDDGSDDSSPPSASPAESEPQCDPSFKGDAGENTALLEAGRSDSRHGGPIS

SEQ ID NO: 3609 - protein, 819 aa, Homo sapiens
MDSEYYSGDQSDDGGATPVQDERDSGSDGEDDVNEQHSGSDTGSVERHSENETSDREDGLPKGHHVTDSENDEPLNLNASDSESEELHRQKDSDSESEERAEPPASDSENEDVNQHGSDSESEETRKLPGSDSENEELLNGHASDSENEDVGKHPASDSEIEELQKSPASDSETEDALKPQISDSESEEPPRHQASDSENEEPPKPRMSDSESEELPKPQVSDSESEEPPRHQASDSENEELPKPRISDSESEDPPRHQASDSENEELPKPRISDSESEDPPRNQASDSENEELPKPRVSDSESEGPQKGPASDSETEDASRHKQKPESDDDSDRENKGEDTEMQNDSFHSDSHMDRKKFHSSDSEEEEHKKQKMDSDEDEKEGEEEKVAKRKAAVLSDSEDEEKASAKKSRVVSDADDSDSDAVSDKSGKREKTIASDSEEEAGKELSDKKNEEKDLFGSDSESGNEEENLIADIFGESGDEEEEEFTGFNQEDLEEEKGETQVKEAEDSDSDDNIKRGKHMDFLSDFEMMLQRKKSMSGKRRRNRDGGTFISDADDVVSAMIVKMNEAAEEDRQLNNQKKPALKKLTLLPAVVMHLKKQDLKETFIDSGVMSAIKEWLSPLPDRSLPALKIREELLKILQELPSVSQETLKHSGIGRAVMYLYKHPKESRSNKDMAGKLINEWSRPIFGLTSNYKGMTREEREQRDLEQMPQRRRMNSTGGQTPRRDLEKVLTGEEKALRPGDPGFCARARVPMPSNKDYVVRPKWNVEMESSRFQATSKKGISRLDKQMRKFTDIRKKSRSAHAVKISIEGNKMPL

SEQ ID NO: 3610 - protein, 254 aa, Homo sapiens
MPAKTPIYLKAANNKKGKKFKLRDILSPDMISPPLGDFRHTIHIGKEGQHDVFGDISFLQGNYELLPGNQEKAHLGQFPGHNEFFRANSTSDSVFTETPSPVLKNAISLPTIGGSQALMLPLLSPVTFNSKQESFGPAKLPRLSCEPVMEEKAQEKSSLLENGTVHQGDTSWGSSGSASQSSQGRDSHSSSLSEQYPDWPAEDMFDHPTPCELIKGKTKSEESLSDLTGSLLSLQLDLGPSLLDEVLNVMDKNK

SEQ ID NO: 3611 - protein, 424 aa, Homo sapiens
MGSLVLTLCALFCLAAYLVSGSPIMNLEQSPLEEDMSLFGDVFSEQDGVDFNTLLQSMKDEFLKTLNLSDIPTQDSAKVDPPEYMLELYNKFATDRTSMPSANIIRSFKNEDLFSQPVSFNGLRKYPLLFNVSIPHHEEVIMAELRLYTLVQRDRMIYDGVDRKITIFEVLESKGDNEGERNMLVLVSGEIYGTNSEWETFDVTDAIRRWQKSGSSTHQLEVHIESKHDEAEDASSGRLEIDTSAQNKHNPLLIVFSDDQSSDKERKEELNEMISHEQLPELDNLGLDSFSSGPGEEALLQMRSNIIYDSTARIRRNAKGNYCKRTPLYIDFKEIGWDSWIIAPPGYEAYECRGVCNYPLAEHLTPTKHAIIQALVHLKNSQKASKACCVPTKLEPISILYLDKGVVTYKFKYEGMAVSECGCR

SEQ ID NO: 3612 - protein, 160 aa, Homo sapiens
MVPSAGQLALFALGIVLAACQALENSTSPLSADPPVAAAVVSHFNDCPDSHTQFCFHGTCRFLVQEDKPACVCHSGYVGARCEHADLLAVVAASQKKQAITALVVVSIVALAVLIITCVLIHCCQVRKHCEWCRALICRHEKPSALLKGRTACCHSETVV

SEQ ID NO: 3613 - protein, 999 aa, Homo sapiens
MGPAPLPLLLGLFLPALWRRAITEAREEAKPYPLFPGPFPGSLQTDHTPLLSLPHASGYQPALMFSPTQPGRPHTGNVAIPQVTSVESKPLPPLAFKHTVGHIILSEHKGVKFNCSISVPNIYQDTTISWWKDGKELLGAHHAITQFYPDDEVTAIIASFSITSVQRSDNGSYICKMKINNEEIVSDPIYIEVQGLPHFTKQPESMNVTRNTAFNLTCQAVGPPEPVNIFWVQNSSRVNEQPEKSPSVLTVPGLTEMAVFSCEAHNDKGLTVSKGVQINIKAIPSPPTEVSIRNSTAHSILISWVPGFDGYSPFRNCSIQVKEADPLSNGSVMIFNTSALPHLYQIKQLQALANYSIGVSCMNEIGWSAVSPWILASTTEGAPSVAPLNVTVFLNESSDNVDIRWMKPPTKQQDGELVGYRISHVWQSAGISKELLEEVGQNGSRARISVQVHNATCTVRIAAVTRGGVGPFSDPVKIFIPAHGWVDYAPSSTPAPGNADPVLIIFGCFCGFILIGLILYISLAIRKRVQETKFGNAFTEEDSELVVNYIAKKSFCRRAIELTLHSLGVSEELQNKLEDVVIDRNLLILGKILGEGEFGSVMEGNLKQEDGTSLKVAVKTMKLDNSSQREIEEFLSEAACMKDFSHPNVIRLLGVCIEMSSQGIPKPMVILPFMKYGDLHTYLLYSRLETGPKHIPLQTLLKFMVDIALGMEYLSNRNFLHRDLAARNCMLRDDMTVCVADFGLSKKIYSGDYYRQGRIAKMPVKWIAIESLADRVYTSKSDVWAFGVTMWEIATRGMTPYPGVQNHEMYDYLLHGHRLKQPEDCLDELYEIMYSCWRTDPLDRPTFSVLRLQLEKLLESLPDVRNQADVIYVNTQLLESSEGLAQGSTLAPLDLNIDPDSIIASCTPRAAISVVTAEVHDSKPHEGRYILNGGSEEWEDLTSAPSAAVTAEKNSVLPGERLVRNGVSWSHSSMLPLGSSLPDELLFADDSSEGSEVLM

SEQ ID NO: 3614 - protein, 359 aa, Homo sapiens
MGNTLTCCVSPNASPKLGRRAGSAELYCASDIYEAVSGDAVAVAPAVVEPAELDFGEGEGHHLQHISDREMPEDLALESNPSDHPRASTIFLSKSQTDVREKRKSNHLNHVSPGQLTKKYSSCSTIFLDDSTVSQPNLRTTVKCVTLAIYYHIKNRDANRSLDIFDERSHPLTREKVPEEYFKHDPEHKFIYRFVRTLFSAAQLTAECAIVTLVYLERLLTYAEIDICPTNWKRIVLGAILLASKVWDDQAVWNVDYCQILKDITVEDMNEMERHFLELLQFNINVPASVYAKYYFDLRSLADDNNLNFLFAPLSKERAQNLEAISRLCEDKDLCRAAMRRSFSADNFIGIQRSKAILS

SEQ ID NO: 3615 - protein, 126 aa, Homo sapiens
MHLSQLLACALLLTLLSLRPSEAKPGAPPKVPRTPPAEELAEPQAAGGGQKKGDKAPGGGGANLKGDRSRLLRDLRVDTKSRAAWARLLQEHPNARKYKGANKKGLSKGCFGLKLDRIGSMSGLGC

SEQ ID NO: 3616 - protein, 465 aa, Homo sapiens
MGPLKAFLFSPFLLRSQSRGVRLVFLLLTLHLGNCVDKADDEDDEDLTVNKTWVLAPKIHEGDITQILNSLLQGYDNKLRPDIGVRPTVIETDVYVNSIGPVDPINMEYTIDIIFAQTWFDSRLKFNSTMKVLMLNSNMVGKIWIPDTFFRNSRKSDAHWITTPNRLLRIWNDGRVLYTLRLTINAECYLQLHNFPMDEHSCPLEFSSYGYPKNEIEYKWKKPSVEVADPKYWRLYQFAFVGLRNSTEITHTISGDYVIMTIFFDLSRRMGYFTIQTYIPCILTVVLSWVSFWINKDAVPARTSLGITTVLTMTTLSTIARKSLPKVSYVTAMDLFVSVCFIFVFAALMEYGTLHYFTSNQKGKTATKDRKLKNKASMTPGLHPGSTLIPMNNISVPQEDDYGYQCLEGKDCASFFCCFEDCRTGSWREGRIHIRIAKIDSYSRIFFPTAFALFNLVYWVGYLYL

SEQ ID NO: 3617 - protein, 532 aa, Homo sapiens
MQGPWVLLLLGLRLQLSLGIIPVEEENPDFWNRQAAEALGAAKKLQPAQTAAKNLIIFLGDGMGVSTVTAARILKGQKKDKLGPETFLAMDRFPYVALSKTYSVDKHVPDSGATATAYLCGVKGNFQTIGLSAAARFNQCNTTRGNEVISVMNRAKKAGKSVGVVTTTRVQHASPAGAYAHTVNRNWYSDADVPASARQEGCQDIATQLISNMDIDVILGGGRKYMFPMGTPDPEYPDDYSQGGTRLDGKNLVQEWLAKHQGARYVWNRTELLQASLDPSVTHLMGLFEPGDMKYEIHRDSTLDPSLMEMTEAALLLLSRNPRGFFLFVEGGRIDHGHHESRAYRALTETIMFDDAIERAGQLTSEEDTLSLVTADHSHVFSFGGYPLRGSSIFGLAPGKARDRKAYTVLLYGNGPGYVLKDGARPDVTESESGSPEYRQQSAVPLDGETHAGEDVAVFARGPQAHLVHGVQEQTFIAHVMAFAACLEPYTACDLAPRAGTTDAAHPGPSVVPALLPLLAGTLLLLGTATAP

SEQ ID NO: 3618 - protein, 474 aa, Homo sapiens
MWTVQNRESLGLLSFPVMITMVCCAHSTNEPSNMSYVKETVDRLLKGYDIRLRPDFGGPPVDVGMRIDVASIDMVSEVNMDYTLTMYFQQSWKDKRLSYSGIPLNLTLDNRVADQLWVPDTYFLNDKKSFVHGVTVKNRMIRLHPDGTVLYGLRITTTAACMMDLRRYPLDEQNCTLEIESYGYTTDDIEFYWNGGEGAVTGVNKIELPQFSIVDYKMVSKKVEFTTGAYPRLSLSFRLKRNIGYFILQTYMPSTLITILSWVSFWINYDASAARVALGITTVLTMTTISTHLRETLPKIPYVKAIDIYLMGCFVFVFLALLEYAFVNYIFFGKGPQKKGASKQDQSANEKNKLEMNKVQVDAHGNILLSTLEIRNETSGSEVLTSVSDPKATMYSYDSASIQYRKPLSSREAYGRALDRHGVPSKGRIRRRASQLKVKIPDLTDVNSIDKWSRMFFPITFSLFNVVYWLYYVH

SEQ ID NO: 3619 - protein, 528 aa, Homo sapiens
MQGPWVLLLLGLRLQLSLGVIPAEEENPAFWNRQAAEALDAAKKLQPIQKVAKNLILFLGDGLGVPTVTATRILKGQKNGKLGPETPLAMDRFPYLALSKTYNVDRQVPDSAATATAYLCGVKANFQTIGLSAAARFNQCNTTRGNEVISVMNRAKQAGKSVGVVTTTRVQHASPAGTYAHTVNRNWYSDADMPASARQEGCQDIATQLISNMDIDVILGGGRKYMFPMGTPDPEYPADASQNGIRLDGKNLVQEWLAKHQGAWYVWNRTELMQASLDQSVTHLMGLFEPGDTKYEIHRDPTLDPSLMEMTEAALRLLSRNPRGFYLFVEGGRIDHGHHEGVAYQALTEAVMFDDAIERAGQLTSEEDTLTLVTADHSHVFSFGGYTLRGSSIFGLAPSKAQDSKAYTSILYGNGPGYVFNSGVRPDVNESESGSPDYQQQAAVPLSSETHGGEDVAVFARGPQAHLVHGVQEQSFVAHVMAFAACLEPYTACDLAPPACTTDAAHPVAASLPLLAGTLLLLGASAAP

SEQ ID NO: 3620 - protein, 1101 aa, Homo sapiens
MDECGSRIRRRVSLPKRNRPSLGCIFGAPTAAELVPGDEGKEEEEMVAENRRRKTAGVLPVEVQPLLLSDSPECLVLGGGDTNPDLLRHMPTDRGVGDQPNDSEVDMFGDYDSFTENSFIAQVDDLEQKYMQLPEHKKHATDFATENLCSESIKNKLSITTIGNLTELQTDKHTENQSGYEGVTIEPGADLLYDVPSSQAIYFENLQNSSNDLGDHSMKERDWKSSSHNTVNEELPHNCIEQPQQNDESSSKVRTSSDMNRRKSIKDHLKNAMTGNAKAQTPIFSRSKQLKDTLLSEEINVAKKTVESSSNDLGPFYSLPSKVRDLYAQFKGIEKLYEWQHTCLTLNSVQERKNLIYSLPTSGGKTLVAEILMLQELLCCRKDVLMILPYVAIVQEKISGLSSFGIELGFFVEEYAGSKGRFPPTKRREKKSLYIATIEKGHSLVNSLIETGRIDSLGLVVVDELHMIGEGSRGATLEMTLAKILYTSKTTQIIGMSATLNNVEDLQKFLQAEYYTSQFRPVELKEYLKINDTIYEVDSKAENGMTFSRLLNYKYSDTLKKMDPDHLVALVTEVIPNYSCLVFCPSKKNCENVAEMICKFLSKEYLKHKEKEKCEVIKNLKNIGNGNLCPVLKRTIPFGVAYHHSGLTSDERKLLEEAYSTGVLCLFTCTSTLAAGVNLPARRVILRAPYVAKEFLKRNQYKQMIGRAGRAGIDTIGESILILQEKDKQQVLELITKPLENCYSHLVQEFTKGIQTLFLSLIGLKIATNLDDIYHFMNGTFFGVQQKVLLKEKSLWEITVESLRYLTEKGLLQKDTIYKSEEEVQYNFHITKLGRASFKGTIDLAYCDILYRDLKKGLEGLVLESLLHLIYLTTPYDLVSQCNPDWMIYFRQFSQLSPAEQNVAAILGVSESFIGKKASGQAIGKKVDKNVVNRLYLSFVLYTLLKETNIWTVSEKFNMPRGYIQNLLTGTASFSSCVLHFCEELEEFWVYRALLVELTKKLTYCVKAELIPLMEVTGVLEGRAKQLYSAGYKSLMHLANANPEVLVRTIDHLSRRQAKQIVSSAKMLLHEKAEALQEEVEELLRLPSDFPGAVASSTDKA

SEQ ID NO: 3621 - protein, 142 aa, Homo sapiens
MAAVVAVCGGLGRKKLTHLVTAAVSLTHPGTHTVLWRRGCSQQVSSNEDLPISMENPYKEPLKKCILCGKHVDYKNVQLLSQFVSPFTGCIYGRHITGLCGKKQKEITKAIKRAQIMGFMPVTYKDPAYLKDPKVCNIRYRE

SEQ ID NO: 3622 - protein, 334 aa, Homo sapiens
MPSKESWSGRKTNRAAVHKSKQEGRQQDLLIAALGMKLGSPKSSVTIWQPLKLFAYSQLTSLVRRATLKENEQIPKYEKIHNFKVHTFRGPHWCEYCANFMWGLIAQGVKCADCGLNVHKQCSKMVPNDCKPDLKHVKKVYSCDLTTLVKAHTTKRPMVVDMCIREIESRGLNSEGLYRVSGFSDLIEDVKMAFDRDGEKADISVNMYEDINIITGALKLYFRDLPIPLITYDAYPKFIESAKIMDPDEQLETLHEALKLLPPAHCETLRYLMAHLKRVTLHEKENLMNAENLGIVFGPTLMRSPELDAMAALNDIRYQRLVVELLIKNEDILF

SEQ ID NO: 3623 - protein, 870 aa, Homo sapiens
MNSNLPAENLTIAVNMTKTLPTAVTHGFNSTNDPPSMSITRLFPALLECFGIVLCGYIAGRANVITSTQAKGLGNFVSRFALPALLFKNMVVLNFSNVDWSFLYSILIAKASVFFIVCVLTLLVASPDSRFSKAGLFPIFATQSNDFALGYPIVEALYQTTYPEYLQYIYLVAPISLMMLNPIGFIFCEIQKWKDTQNASQNKIKIVGLGLLRVLQNPIVFMVFIGIAFNFILDRKVPVYVENFLDGLGNSFSGSALFYLGLTMVGKIKRLKKSAFVVLILLITAKLLVLPLLCREMVELLDKGDSVVNHTSLSNYAFLYGVFPVAPGVAIFATQFNMEVEIITSGMVISTFVSAPIMYVSAWLLTFPTMDPKPLAYAIQNVSFDISIVSLISLIWSLAILLLSKKYKQLPHMLTTNLLIAQSIVCAGMMIWNFVKEKNFVGQILVFVLLYSSLYSTYLWTGLLAISLFLLKKRERVQIPVGIIIISGWGIPALLVGVLLITGKHNGDSIDSAFFYGKEQMITTAVTLFCSILIAGISLMCMNQTAQAGSYEGFDQSQSHKVVEPGNTAFEESPAPVNEPELFTSSIPETSCCSCSMGNGELHCPSIEPIANTSTSEPVIPSFEKNNHCVSRCNSQSCILAQEEEQYLQSGDQQLTRHVLLCLLLIIGLFANLSSCLWWLFNQEPGRLYVELQFFCAVFNFGQGFISFGIFGLDKHLIILPFKRRLEFLWNNKDTAENRDSPVSEEIKMTCQQFIHYHRDLCIRNIVKERRCGAKTSAGTFCGCDLVSWLIEVGLASDRGEAVIYGDRLVQGGVIQHITNEYEFRDEYLFYRFLQKSPEQSPPAINANTLQQERYKEIEHSSPPSHSPKT

SEQ ID NO: 3624 - protein, 211 aa, Homo sapiens
MANAGLQLLGFILAFLGWIGAIVSTALPQWRIYSYAGDNIVTAQAMYEGLWMSCVSQSTGQIQCKVFDSLLNLSSTLQATRALMVVGILLGVIAIFVATVGMKCMKCLEDDEVQKMRMAVIGGAIFLLAGLAILVATAWYGNRIVQEFYDPMTPVNARYEFGQALFTGWAAASLCLLGGALLCCSCPRKTTSYPTPRPYPKPAPSSGKDYV

SEQ ID NO: 3625 - protein, 3177 aa, Homo sapiens
MRKHRHLPLVAVFCLFLSGFPTTHAQQQQADVKNGAAADIIFLVDSSWTIGEEHFQLVREFLYDVVKSLAVGENDFHFALVQFNGNPHTEFLLNTYRTKQEVLSHISNMSYIGGTNQTGKGLEYIMQSHLTKAAGSRAGDGVPQVIVVLTDGHSKDGLALPSAELKSADVNVFAIGVEDADEGALKEIASEPLNMHMFNLENFTSLHDIVGNLVSCVHSSVSPERAGDTETLKDITAQDSADIIFLIDGSNNTGSVNFAVILDFLVNLLEKLPIGTQQIRVGVVQFSDEPRTMFSLDTYSTKAQVLGAVKALGFAGGELANIGLALDFVVENHFTRAGGSRVEEGVPQVLVLISAGPSSDEIRYGVVALKQASVFSFGLGAQAASRAELQHIATDDNLVFTVPEFRSFGDLQEKLLPYIVGVAQRHIVLKPPTIVTQVIEVNKRDIVFLVDGSSALGLANFNAIRDFIAKVIQRLEIGQDLIQVAVAQYADTVRPEFYFNTHPTKREVITAVRKMKPLDGSALYTGSALDFVRNNLFTSSAGYRAAEGIPKLLVLITGGKSLDEISQPAQELKRSSIMAFAIGNKGADQAELEEIAFDSSLVFIPAEFRAAPLQGMLPGLLAPLRTLSGTPEVHSNKRDIIFLLDGSANVGKTNFPYVRDFVMNLVNSLDIGNDNIRVGLVQFSDTPVTEFSLNTYQTKSDILGHLRQLQLQGGSGLNTGSALSYVYANHFTEAGGSRIREHVPQLLLLLTAGQSEDSYLQAANALTRAGILTFCVGASQANKAELEQIAFNPSLVYLMDDFSSLPALPQQLIQPLTTYVSGGVEEVPLAQPESKRDILFLFDGSANLVGQFPVVRDFLYKIIDELNVKPEGTRIAVAQYSDDVKVESRFDEHQSKPEILNLVKRMKIKTGKALNLGYALDYAQRYIFVKSAGSRIEDGVLQFLVLLVAGRSSDRVDGPASNLKQSGVVPFIFQAKNADPAELEQIVLSPAFILAAESLPKIGDLHPQIVNLLKSVHNGAPAPVSGEKDVVFLLDGSEGVRSGFPLLKEFVQRVVESLDVGQDRVRVAVVQYSDRTRPEFYLNSYMNKQDVVNAVRQLTLLGGPTPNTGAALEFVLRNILVSSAGSRITEGVPQLLIVLTADRSGDDVRNPSVVVKRGGAVPIGIGIGNADITEMQTISFIPDFAVAIPTFRQLGTVQQVISERVTQLTREELSRLQPVLQPLPSPGVGGKRDVVFLIDGSQSAGPEFQYVRTLIERLVDYLDVGFDTTRVAVIQFSDDPKVEFLLNAHSSKDEVQNAVQRLRPKGGRQINVGNALEYVSRNIFKRPLGSRIEEGVPQFLVLISSGKSDDEVDDPAVELKQFGVAPFTIARNADQEELVKISLSPEYVFSVSTFRELPSLEQKLLTPITTLTSEQIQKLLASTRYPPPAVESDAADIVFLIDSSEGVRPDGFAHIRDFVSRIVRRLNIGPSKVRVGVVQFSNDVFPEFYLKTYRSQAPVLDAIRRLRLRGGSPLNTGKALEFVARNLFVKSAGSRIEDGVPQHLVLVLGGKSQDDVSRFAQVIRSSGIVSLGVGDRNIDRTELQTITNDPRLVFTVREFRELPNIEERIMNSFGPSAATPAPPGVDTPPPSRPEKKKADIVFLLDGSINFRRDSFQEVLRFVSEIVDTVYEDGDSIQVGLVQYNSDPTDEFFLKDFSTKRQIIDAINKVVYKGGRHANTKVGLEHLRVNHFVPEAGSRLDQRVPQIAFVITGGKSVEDAQDVSLALTQRGVKVFAVGVRNIDSEEVGKIASNSATAFRVGNVQELSELSEQVLETLHDAMHETLCPGVTDAAKACNLDVILGFDGSRDQNVFVAQKGFESKVDAILNRISQMHRVSCSGGRSPTVRVSVVANTPSGPVEAFDFDEYQPEMLEKFRNMRSQHPYVLTEDTLKVYLNKFRQSSPDSVKVVIHFTDGADGDLADLHRASENLRQEGVRALILVGLERVVNLERLMHLEFGRGFMYDRPLRLNLLDLDYELAEQLDNIAEKACCGVPCKCSGQRGDRGPIGSIGPKGIPGEDGYRGYPGDEGGPGERGPPGVNGTQGFQGCPGQRGVKGSRGFPGEKGEVGEIGLDGLDGEDGDKGLPGSSGEKGNPGRRGDKGPRGEKGERGDVGIRGDPGNPGQDSQERGPKGETGDLGPMGVPGRDGVPGGPGETGKNGGFGRRGPPGAKGNKGGPGQPGFEGEQGTRGAQGPAGPAGPPGLIGEQGISGPRGSGGAAGAPGERGRTGPLGRKGEPGEPGPKGGIGNRGPRGETGDDGRDGVGSEGRRGKKGERGFPGYPGPKGNPGEPGLNGTTGPKGIRGRRGNSGPPGIVGQKGDPGYPGPAGPKGNRGDSIDQCALIQSIKDKCPCCYGPLECPVFPTELAFALDTSEGVNQDTFGRMRDVVLSIVNDLTIAESNCPRGARVAVVTYNNEVTTEIRFADSKRKSVLLDKIKNLQVALTSKQQSLETAMSFVARNTFKRVRNGFLMRKVAVFFSNTPTRASPQLREAVLKLSDAGITPLFLTRQEDRQLINALQINNTAVGHALVLPAGRDLTDFLENVLTCHVCLDICNIDPSCGFGSWRPSFRDRRAAGSDVDIDMAFILDSAETTTLFQFNEMKKYIAYLVRQLDMSPDPKASQHFARVAVVQHAPSESVDNASMPPVKVEFSLTDYGSKEKLVDFLSRGMTQLQGTRALGSAIEYTIENVFESAPNPRDLKIVVLMLTGEVPEQQLEEAQRVILQAKCKGYFFVVLGIGRKVNIKEVYTFASEPNDVFFKLVDKSTELNEEPLMRFGRLLPSFVSSENAFYLSPDIRKQCDWFQGDQPTKNLVKFGHKQVNVPNNVTSSPTSNPVTTTKPVTTTKPVTTTTKPVTTTTKPVTIINQPSVKPAAAKPAPAKPVAAKPVATKMATVRPPVAVKPATAAKPVAAKPAAVRPPAAAAAKPVATKPEVPRPQAAKPAATKPATTKPMVKMSREVQVFEITENSAKLHWERAEPPGPYFYDLTVTSAHDQSLVLKQNLTVTDRVIGGLLAGQTYHVAVVCYLRSQVRATYHGSFSTKKSQPPPPQPARSASSSTINLMVSTEPLALTETDICKLPKDEGTCRDFILKWYYDPNTKSCARFWYGGCGGNENKFGSQKECEKVCAPVLAKPGVISVMGT

SEQ ID NO: 3626 - protein, 443 aa, Homo sapiens
MLMLFVFGVLLHEVSLSGQNEAPPNTHSIPGEPLYNYASIRLPEEHIPFFLHNNRHIATVCRKDSLCPYKKHLEKLKYCWGYEKSCKPEFRFGYPVCSYVDMGWTDTLESAEDIFWKQADFGYARERLEEMHVLCQPKETSDSSLVCSRYLQYCRATNLYLDLRNIKRNHDRFKEDFFQSGEIGGHCKLDIRTLTSEGQRKSPLQSWFAELQSYTQLNFRPIEDAKCDIVIEKPTYFMKLDAGVNMYHHFCDFINLYITQHVNNSFSTDVYIVMWDTDGKIRVTILARSTEYRKILNQNELVNALKTVSTFEVQIVDYKYRELGFLDQLRITHNTDIFIGMHGAGLTHLLFLPDWAAVFELYNCEDERCYLDLARLRGVHYITWRRQNKVFPQDKGHHPTLGEHPKFTNYSFDVEEFMYLVLQAADHVLQHPKWPFKKKHDEL

SEQ ID NO: 3627 - protein, 392 aa, Homo sapiens
MEWWASSPLRLWLLLFLLPSAQGRQKESGSKWKVFIDQINRSLENYEPCSSQNCSCYHGVIEEDLTPFRGGISRKMMAEVVRRKLGTHYQITKNRLYRENDCMFPSRCSGVEHFILEVIGRLPDMEMVINVRDYPQVPKWMEPAIPVFSFSKTSEYHDIMYPAWTFWEGGPAVWPIYPTGLGRWDLFREDLVRSAAQWPWKKKNSTAYFRGSRTSPERDPLILLSRKNPKLVDAEYTKNQAWKSMKDTLGKPAAKDVHLVDHCKYKYLFNFRGVAASFRFKHLFLCGSLVFHVGDEWLEFFYPQLKPWVHYIPVKTDLSNVQELLQFVKANDDVAQEIAERGSQFIRNHLQMDDITCYWENLLSEYSKFLSYNVTRRKGYDQIIPKMLKTEL

SEQ ID NO: 3628 - protein, 1023 aa, Homo sapiens
MGKGVGRDKYEPAAVSEQGDKKGKKGKKDRDMDELKKEVSMDDHKLSLDELHRKYGTDLSRGLTSARAAEILARDGPNALTPPPTTPEWIKFCRQLFGGFSMLLWIGAILCFLAYSIQAATEEEPQNDNLYLGVVLSAVVIITGCFSYYQEAKSSKIMESFKNMVPQQALVIRNGEKMSINAEEVVVGDLVEVKGGDRIPADLRIISANGCKVDNSSLTGESEPQTRSPDFTNENPLETRNIAFFSTNCVEGTARGIVVYTGDRTVMGRIATLASGLEGGQTPIAAEIEHFIHIITGVAVFLGVSFFILSLILEYTWLEAVIFLIGIIVANVPEGLLATVTVCLTLTAKRMARKNCLVKNLEAVETLGSTSTICSDKTGTLTQNRMTVAHMWFDNQIHEADTTENQSGVSFDKTSATWLALSRIAGLCNRAVFQANQENLPILKRAVAGDASESALLKCIELCCGSVKEMRERYAKIVEIPFNSTNKYQLSIHKNPNTSEPQHLLVMKGAPERILDRCSSILLHGKEQPLDEELKDAFQNAYLELGGLGERVLGFCHLFLPDEQFPEGFQFDTDDVNFPIDNLCFVGLISMIDPPRAAVPDAVGKCRSAGIKVIMVTGDHPITAKAIAKGVGIISEGNETVEDIAARLNIPVSQVNPRDAKACVVHGSDLKDMTSEQLDDILKYHTEIVFARTSPQQKLIIVEGCQRQGAIVAVTGDGVNDSPALKKADIGVAMGIAGSDVSKQAADMILLDDNFASIVTGVEEGRLIFDNLKKSIAYTLTSNIPEITPFLIFIIANIPLPLGTVTILCIDLGTDMVPAISLAYEQAESDIMKRQPRNPKTDKLVNERLISMAYGQIGMIQALGGFFTYFVILAENGFLPIHLLGLRVDWDDRWINDVEDSYGQQWTYEQRKIVEFTCHTAFFVSIVVVQWADLVICKTRRNSVFQQGMKNKILIFGLFEETALAAFLSYCPGMGVALRMYPLKPTWWFCAFPYSLLIFVYDEVRKLIIRRRPGGWVEKETYY

SEQ ID NO: 3629 - protein, 520 aa, Homo sapiens
MQSESGIVPDFEVGEEFHEEPKTYYELKSQPLKSSSSAEHPGASKPPISSSSMTSRILLRQQLMREQMQEQERREQQQKLQAAQFMQQRVPVSQTPAINVSVPTTLPSATQVPMEVLKVQTHLENPTKYHIQQAQRQQVKQYLSTTLANKHANQVLSLPCPNQPGDHVMPPVPGSSAPNSPMAMLTLNSNCEKEGFYKFEEQNRAESECPGMNTHSRASCMQMDDVIDDIISLESSYNEEILGLMDPALQMANTLPVSGNLIDLYGNQGLPPPGLTISNSCPANLPNIKRELTESEARALAKERQKKDNHNLIERRRRFNINDRIKELGTLIPKSNDPDMRWNKGTILKASVDYIRKLQREQQRAKELENRQKKLEHANRHLLLRIQELEMQARAHGLSLIPSTGLCSPDLVNRIIKQEPVLENCSQDLLQHHADLTCTTTLDLTDGTITFNNNLGTGTEANQAYSVPTKMGSKLEDILMDDTLSPVGVTDPLLSSVSPGASKTSSRRSSMSMEETEHTC

SEQ ID NO: 3630 - protein, 108 aa, Homo sapiens
MRSLCCAPLLLLLLLPPLLLTPRAGDAAVITGACDKDSQCGGGMCCAVSIWVKSIRICTPMGKLGDSCHPLTRKVPFFGRRMHHTCPCLPGLACLRTSFNRFICLAQK

SEQ ID NO: 3631 - protein, 129 aa, Homo sapiens
MRSLCCAPLLLLLLLPPLLLTPRAGDAAVITGACDKDSQCGGGMCCAVSIWVKSIRICTPMGKLGDSCHPLTRKNNFGNGRQERRKRKRSKRKKEVPFFGRRMHHTCPCLPGLACLRTSFNRFICLAQK

SEQ ID NO: 3632 - protein, 371 aa, Homo sapiens
MEEAGAAVVTAGEAELNWSRLSVSTETLESELEARGEERRGAREALLRLLLPHNRLVSLPRALGSGFPHLQLLDVSGNALTALGPELLALRGLRTLLAKNNRLGGPSALPKGLAQSPLCRSLQVLNLSGNCFQEVPASLLELRALQTLSLGGNQLQSIPAEIENLQSLECLYLGGNFIKEIPPELGNLPSLNYLVLCDNKIQSIPPQLSQLHSLRSLSLHNNLLTYLPREILNLIHLEELSLRGNPLVVRFVRDLTYDPPTLLELAARTIKIRNISYTPYDLPGNLLRYLGSASNCPNPKCGGVYFDCCVRQIKFVDFCGKYRLPLMHYLCSPECSSPCSSASHSSTSQSESDSEDEASVAARRMQKVLLG

SEQ ID NO: 3633 - protein, 308 aa, Homo sapiens
MWKRWLALALALVAVAWVRAEEELRSKSKICANVFCGAGRECAVTEKGEPTCLCIEQCKPHKRPVCGSNGKTYLNHCELHRDACLTGSKIQVDYDGHCKEKKSVSPSASPVVCYQSNRDELRRRIIQWLEAEIIPDGWFSKGSNYSEILDKYFKNFDNGDSRLDSSEFLKFVEQNETAINITTYPDQENNKLLRGLCVDALIELSDENADWKLSFQEFLKCLNPSFNPPEKKCALEDETYADGAETEVDCNRCVCACGNWVCTAMTCDGKNQKGAQTQTEEEMTRYVQELQKHQETAEKTKRVSTKEI

SEQ ID NO: 3634 - protein, 650 aa, Homo sapiens
MASGEHSPGSGAARRPLHSAQAVDVASASNFRAFELLHLHLDLRAEFGPPGPGAGSRGLSGTAVLDLRCLEPEGAAELRLDSHPCLEVTAAALRRERPGSEEPPAEPVSFYTQPFSHYGQALCVSFPQPCRAAERLQVLLTYRVGEGPGVCWLAPEQTAGKKKPFVYTQGQAVLNRAFFPCFDTPAVKYKYSALIEVPDGFTAVMSASTWEKRGPNKFFFQMCQPIPSYLIALAIGDLVSAEVGPRSRVWAEPCLIDAAKEEYNGVIEEFLATGEKLFGPYVWGRYDLLFMPPSFPFGGMENPCLTFVTPCLLAGDRSLADVIIHEISHSWFGNLVTNANWGEFWLNEGFTMYAQRRISTILFGAAYTCLEAATGRALLRQHMDITGEENPLNKLRVKIEPGVDPDDTYNETPYEKGFCFVSYLAHLVGDQDQFDSFLKAYVHEFKFRSILADDFLDFYLEYFPELKKKRVDIIPGFEFDRWLNTPGWPPYLPDLSPGDSLMKPAEELAQLWAAEELDMKAIEAVAISPWKTYQLVYFLDKILQKSPLPPGNVKKLGDTYPSISNARNAELRLRWGQIVLKNDHQEDFWKVKEFLHNQGKQKYTLPLYHAMMGGSEVAQTLAKETFASTASQLHSNVVNYVQQIVAPKGS

SEQ ID NO: 3635 - protein, 282 aa, Homo sapiens
MERPSLRALLLGAAGLLLLLLPLSSSSSSDTCGPCEPASCPPLPPLGCLLGETRDACGCCPMCARGEGEPCGGGGAGRGYCAPGMECVKSRKRRKGKAGAAAGGPGVSGVCVCKSRYPVCGSDGTTYPSGCQLRAASQRAESRGEKAITQVSKGTCEQGPSIVTPPKDIWNVTGAQVYLSCEVIGIPTPVLIWNKVKRGHYGVQRTELLPGDRDNLAIQTRGGPEKHEVTGWVLVSPLSKEDAGEYECHASNSQGQASASAKITVVDALHEIPVKKGEGAEL

SEQ ID NO: 3636 - protein, 136 aa, Homo sapiens
MVVGTGTSLALSSLLSLLLFAGMQMYSRQLASTEWLTIQGGLLGSGLFVFSLTAFNNLENLVFGKGFQAKIFPEILLCLLLALFASGLIHRVCVTTCFIFSMVGLYYINKISSTLYQAAAPVLTPAKVTGKSKKRN

SEQ ID NO: 3637 - protein, 300 aa, Homo sapiens
MILLEVNNRIIEETLALKFENAAAGNKPEAVEVTFADFDGVLYHISNPNGDKTKVMVSISLKFYKELQAHGADELLKRVYGSFLVNPESGYNVSLLYDLENLPASKDSIVHQAGMLKRNCFASVFEKYFQFQEEGKEGENRAVIHYRDDETMYVESKKDRVTVVFSTVFKDDDDVVIGKVFMQEFKEGRRASHTAPQVLFSHREPPLELKDTDAAVGDNIGYITFVLFPRHTNASARDNTINLIHTFRDYLHYHIKCSKAYIHTRMRAKTSDFLKVLNRARPDAEKKEMKTITGKTFSSR

SEQ ID NO: 3638 - protein, 545 aa, Homo sapiens
MMGHRPVLVLSQNTKRESGRKVQSGNINAAKTIADIIRTCLGPKSMMKMLLDPMGGIVMTNDGNAILREIQVQHPAAKSMIEISRTQDEEVGDGTTSVIILAGEMLSVAEHFLEQQMHPTVVISAYRKALDDMISTLKKISIPVDISDSDMMLNIINSSITTKAISRWSSLACNIALDAVKMVQFEENGRKEIDIKKYARVEKIPGGIIEDSCVLRGVMINKDVTHPRMRRYIKNPRIVLLDSSLEYKKGESQTDIEITREEDFTRILQMEEEYIQQLCEDIIQLKPDVVITEKGISDLAQHYLMRANITAIRRVRKTDNNRIARACGARIVSRPEELREDDVGTGAGLLEIKKIGDEYFTFITDCKDPKACTILLRGASKEILSEVERNLQDAMQVCRNVLLDPQLVPGGGASEMAVAHALTEKSKAMTGVEQWPYRAVAQALEVIPRTLIQNCGASTIRLLTSLRAKHTQENCETWGVNGETGTLVDMKELGIWEPLAVKLQTYKTAVETAVLLLRIDDIVSGHKKKGDDQSRQGGAPDAGQE

SEQ ID NO: 3639 - protein, 183 aa, Homo sapiens
MRLLSFVVLALFAVTQAEEGARLLASKSLLNRYAVEGRDLTLQYNIYNVGSSAALDVELSDDSFPPEDFGIVSGMLNVKWDRIAPASNVSHTVVLRPLKAGYFNFTSATITYLAQEDGPVVIGSTSAPGQGGILAQREFDRRFSPHFLDWAAFGVMTLPSIGIPLLLWYSSKRKYDTPKTKKN

SEQ ID NO: 3640 - protein, 459 aa, Homo sapiens
MAASASAAAGEEDWVLPSEVEVLESIYLDELQVIKGNGRTSPWEIYITLHPATAEDQDSQYVCFTLVLQVPAEYPHEVPQISIRNPRGLSDEQIHTILQVLGHVAKAGLGTAMLYELIEKGKEILTDNNIPHGQCVICLYGFQEKEAFTKTPCYHYFHCHCLARYIQHMEQELKAQGQEQEQERQHATTKQKAVGVQCPVCREPLVYDLASLKAAPEPQQPMELYQPSAESLRQQEERKRLYQRQQERGGIIDLEAERNRYFISLQQPPAPAEPESAVDVSKGSQPPSTLAAELSTSPAVQSTLPPPLPVATQHICEKIPGTRSNQQRLGETQKAMLDPPKPSRGPWRQPERRHPKGGECHAPKGTRDTQELPPPEGPLKEPMDLKPEPHSQGVEGPPQEKGPGSWQGPPPRRTRDCVRWERSKGRTPGSSYPRLPRGQGAYRPGTRRESLGLESKDGS

SEQ ID NO: 3641 - protein, 979 aa, Homo sapiens
MRRPRRPGGLGGSGGLRLLLCLLLLSSRPGGCSAVSAHGCLFDRRLCSHLEVCIQDGLFGQCQVGVGQARPLLQVTSPVLQRLQGVLRQLMSQGLSWHDDLTQYVISQEMERIPRLRPPEPRPRDRSGLAPKRPGPAGELLLQDIPTGSAPAAQHRLPQPPVGKGGAGASSSLSPLQAELLPPLLEHLLLPPQPPHPSLSYEPALLQPYLFHQFGSRDGSRVSEGSPGMVSVGPLPKAEAPALFSRTASKGIFGDHPGHSYGDLPGPSPAQLFQDSGLLYLAQELPAPSRARVPRLPEQGSSSRAEDSPEGYEKEGLGDRGEKPASPAVQPDAALQRLAAVLAGYGVELRQLTPEQLSTLLTLLQLLPKGAGRNPGGVVNVGADIKKTMEGPVEGRDTAELPARTSPMPGHPTASPTSSEVQQVPSPVSSEPPKAARPPVTPVLLEKKSPLGQSQPTVAGQPSARPAAEEYGYIVTDQKPLSLAAGVKLLEILAEHVHMSSGSFINISVVGPALTFRIRHNEQNLSLADVTQQAGLVKSELEAQTGLQILQTGVGQREEAAAVLPQTAHSTSPMRSVLLTLVALAGVAGLLVALAVALCVRQHARQQDKERLAALGPEGAHGDTTFEYQDLCRQHMATKSLFNRAEGPPEPSRVSSVSSQFSDAAQASPSSHSSTPSWCEEPAQANMDISTGHMILAYMEDHLRNRDRLAKEWQALCAYQAEPNTCATAQGEGNIKKNRHPDFLPYDHARIKLKVESSPSRSDYINASPIIEHDPRMPAYIATQGPLSHTIADFWQMVWESGCTVIVMLTPLVEDGVKQCDRYWPDEGASLYHVYEVNLVSEHIWCEDFLVRSFYLKNVQTQETRTLTQFHFLSWPAEGTPASTRPLLDFRRKVNKCYRGRSCPIIVHCSDGAGRTGTYILIDMVLNRMAKGVKEIDIAATLEHVRDQRPGLVRSKDQFEFALTAVAEEVNAILKALPQ

SEQ ID NO: 3642 - protein, 411 aa, Homo sapiens
MSPARLRPRLHFCLVLLLLLVVPAAWGCGPGRVVGSRRRPPRKLVPLAYKQFSPNVPEKTLGASGRYEGKIARSSERFKELTPNYNPDIIFKDEENTGADRLMTQRCKDRLNSLAISVMNQWPGVKLRVTEGWDEDGHHSEESLHYEGRAVDITTSDRDRNKYGLLARLAVEAGFDWVYYESKAHVHCSVKSEHSAAAKTGGCFPAGAQVRLESGARVALSAVRPGDRVLAMGEDGSPTFSDVLIFLDREPHRLRAFQVIETQDPPRRLALTPAHLLFTADNHTEPAARFRATFASHVQPGQYVLVAGVPGLQPARVAAVSTHVALGAYAPLTKHGTLVVEDVVASCFAAVADHHLAQLAFWPLRLFHSLAWGSWTPGEGVHWYPQLLYRLGRLLLEEGSFHPLGMSGAGS

SEQ ID NO: 3643 - protein, 905 aa, Homo sapiens [sequence omitted]

SEQ ID NO: 3644 - protein, 567 aa, Homo sapiens
MGRGLLRGLWPLHIVLWTRIASTIPPHVQKSVNNDMIVTDNNGAVKFPQLCKFCDVRFSTCDNQKSCMSNCSITSICEKPQEVCVAVWRKNDENITLETVCHDPKLPYHDFILEDAASPKCIMKEKKKPGETFFMCSCSSDECNDNIIFSEEYNTSNPDLLLVIFQVTGISLLPPLGVAISVIIIFYCYRVNRQQKLSSTWETGKTRKLMEFSEHCAIILEDDRSDISSTCANNINHNTELLPIELDTLVGKGRFAEVYKAKLKQNTSEQFETVAVKIFPYEEYASWKTEKDIFSDINLKHENILQFLTAEERKTELGKQYWLITAFHAKGNLQEYLTRHVISWEDLRKLGSSLARGIAHLHSDHTPCGRPKMPIVHRDLKSSNILVKNDLTCCLCDFGLSLRLDPTLSVDDLANSGQVGTARYMAPEVLESRMNLENVESFKQTDVYSMALVLWEMTSRCNAVGEVKDYEPPFGSKVREHPCVESMKDNVLRDRGRPEIPSFWLNHQGIQMVCETLTECWDHDPEARLTAQCVAERFSELEHLDRLSGRSCSEEKIPEDGSLNTTK

SEQ ID NO: 3645 - protein, 111 aa, Homo sapiens
MGPSSCLLLILIPLLQLINPGSTQCSLDSVMDKKIKDVLNSLEYSPSPISKKLSCASVKSQGRPSSCPAGMAVTGCACGYGCGSWDVQLETTCHCQCSVVDWTTARCCHLT

SEQ ID NO: 3646 - protein, 347 aa, Homo sapiens
MLHTTQLYQHVPETRWPIVYSPRYNITFMGLEKLHPFDAGKWGKVINFLKEEKLLSDSMLVEAREASEEDLLVVHTRRYLNELKWSFAVATITEIPPVIFLPNFLVQRKVLRPLRTQTGGTIMAGKLAVERGWAINVGGGFHHCSSDRGGGFCAYADITLAIKFLFERVEGISRATIIDLDAHQGNGHERDFMDDKRVYIMDVYNRHIYPGDRFAKQAIRRKVELEWGTEDDEYLDKVERNIKKSLQEHLPDVVVYNAGTDILEGDRLGGLSISPAGIVKRDELVFRMVRGRRVPILMVTSGGYQKRTARIIADSILNLFGLGLIGPESPSVSAQNSDTPLLPPAVP

SEQ ID NO: 3647 - protein, 654 aa, Homo sapiens
MAPKKLSCLRSLLLPLSLTLLLPQADTRSFVVDRGHDRFLLDGAPFRYVSGSLHYFRVPRVLWADRLLKMRWSGLNAIQFYVPWNYHEPQPGVYNFNGSRDLIAFLNEAALANLLVILRPGPYICAEWEMGGLPSWLLRKPEIHLRTSDPDFLAAVDSWFKVLLPKIYPWLYHNGGNIISIQVENEYGSYRACDFSYMRHLAGLFRALLGEKILLFTTDGPEGLKCGSLRGLYTTVDFGPADNMTKIFTLLRKYEPHGPLVNSEYYTGWLDYWGQNHSTRSVSAVTKGLENMLKLGASVNMYMFHGGTNFGYWNGADKKGRFLPITTSYDYDAPISEAGDPTPKLFALRDVISKFQEVPLGPLPPPSPKMMLGPVTLHLVGHLLAFLDLLCPRGPIHSILPMTFEAVKQDHGFMLYRTYMTHTIFEPTPFWVPNNGVHDRAYVMVDGVFQGVVERNMRDKLFLTGKLGSKLDILVENMGRLSFGSNSSDFKGLLKPPILGQTILTQWMMFPLKIDNLVKWWFPLQLPKWPYPQAPSGPTFYSKTFPILGSVGDTFLYLPGWTKGQVWINGFNLGRYWTKQGPQQTLYVPRFLLFPRGALNKITLLELEDVPLQPQVQFLDKPILNSTSTLHRTHINSLSADTLSASEPMELSGH

SEQ ID NO: 3648 - protein, 1184 aa, Homo sapiens
MVLLWEPAGAWLALGLALALGPSVAAAAPRQDCTGVECPPLENCIEEALEPGACCATCVQQGCACEGYQYYDCLQGGFVRGRVPAGQSYFVDFGSTECSCPPGGGKISCQFMLCPELPPNCIEAVVVADSCPQCGQVGCVHAGHKYAAGHTVHLPPCRACHCPDAGGELICYQLPGCHGNFSDAEEGDPERHYEDPYSYDQEVAEVEAATALGGEVQAGAVQAGAGGPPAALGGGSQPLSTIQAPPWPAVLPRPTAAAALGPPAPVQAKARRVTEDSEEEEEEEEEREEMAVTEQLAAGGHRGLDGLPTTAPAGPSLPIQEERAEAGARAEAGARPEENLILDAQATSRSTGPEGVTHAPSLGKAALVPTQAVPGSPRDPVKPSPHNILSTSLPDAAWIPPTREVPRKPQVLPHSHVEEDTDPNSVHSIPRSSPEGSTKDLIETCCAAGQQWAIDNDECLEIPESGTEDNVCRTAQRHCCVSYLQEKSCMAGVLGAKEGETCGAEDNDSCGISLYKQCCDCCGLGLRVRAEGQSCESNPNLGYPCNHVMLSCCEGEEPLIVPEVRRPPEPAAAPRRVSEAEMAGREALSLGTEAELPNSLPGDDQDECLLLPGELCQHLCINTVGSYHCACFPGFSLQDDGRTCRPEGHPPQPEAPQEPALKSEFSQVASNTIPLPLPQPNTCKDNGPCKQVCSTVGGSAICSCFPGYAIMADGVSCEDINECVTDLHTCSRGEHCVNTLGSFHCYKALTCEPGYALKDGECEDVDECAMGTHTCQPGFLCQNTKGSFYCQARQRCMDGFLQDPEGNCVDINECTSLSEPCRPGFSCINTVGSYTCQRNPLICARGYHASDDGTKCVDVNECETGVHRCGEGQVCHNLPGSYRCDCKAGFQRDAFGRGCIDVNECWASPGRLCQHTCENTLGSYRCSCASGFLLAADGKRCEDVNECEAQRCSQECANIYGSYQCYCRQGYQLAEDGHTCTDIDECAQGAGILCTFRCLNVPGSYQCACPEQGYTMTANGRSCKDVDECALGTHNCSEAETCHNIQGSFRCLRFECPPNYVQVSKTKCERTTCHDFLECQNSPARITHYQLNFQTGLLVPAHIFRIGPAPAFTGDTIALNIIKGNEEGYFGTRRLNAYTGVVYLQRAVLEPRDFALDVEMKLWRQGSVTTFLAKMHIFFTTFAL

SEQ ID NO: 3649 - protein, 155 aa, Homo sapiens
MPVSYSSVTTRYYHRAGAEEGKDRIIFVTKEDHETPSSAELVADDPNDPYEEHGLILPNGNINWNCPCLGGMASGPCGEQFKSAFSCFHYSTEEIKGSDCVDQFRAMQECMQKYPDLYPQEDEDEEEEREKKPAEQAEETAPIEATATKEEEGSS

SEQ ID NO: 3650 - protein, 826 aa, Homo sapiens
MAEPSAPESKHKSSLNSSPWSGLMALGNSRHGHHGPGAQCAHKAAGGAAPPKPAPAGLSGGLSQPAGWQSLLSFTILFLAWLAGFSSRLFAVIRFESIIHEFDPWFNYRSTHHLASHGFYEFLNWFDERAWYPLGRIVGGTVYPGLMITAGLIHWILNTLNITVHIRDVCVFLAPTFSGLTSISTFLLTRELWNQGAGLLAACFIAIVPGYISRSVAGSFDNEGIAIFALQFTYYLWVKSVKTGSVFWTMCCCLSYFYMVSAWGGYVFIINLIPLHVFVLLLMQRYSKRVYIAYSTFYIVGLILSMQIPFVGFQPIRTSEHMAAAGVFALLQAYAFLQYLRDRLTKQEFQTLFFLGVSLAAGAVFLSVIYLTYTGYIAPWSGRFYSLWDTGYAKIHIPIIASVSEHQPTTWVSFFFDLHILVCTFPAGLWFCIKNINDERVFVALYAISAVYFAGVMVRLMLTLTPVVCMLSAIAFSNVFEHYLGDDMKRENPPVEDSSDEDDKRNQGNLYDKAGKVRKHATEQEKTEEGLGPNIKSIVTMLMLMLLMMFAVHCTWVTSNAYSSPSVVLASYNHDGTRNILDDFREAYFWLRQNTDEHARVMSWWDYGYQIAGMANRTTLVDNNTWNNSHIALVGKAMSSNETAAYKIMRTLDVDYVLVIFGGVIGYSGDDINKFLWMVRIAEGEHPKDIRESDYFTPQGEFRVDKAGSPTLLNCLMYKMSYYRFGEMQLDFRTPPGFDRTRNAEIGNKDIKFKHLEEAFTSEHWLVRIYKVKAPDNRETLDHKPRVTNIFPKQKYLSKKTTKRKRGYIKNKLVFKKGKKISKKTV

SEQ ID NO: 3651 - protein, 410 aa, Homo sapiens
MAFLGLFSLLVLQSMATGATFPEEAIADLSVNMYNRLRATGEDENILFSPLSIALAMGMMELGAQGSTQKEIRHSMGYDSLKNGEEFSFLKEFSNMVTAKESQYVMKIANSLFVQNGFHVNEEFLQMMKKYFNAAVNHVDFSQNVAVANYINKWVENNTNNLVKDLVSPRDFDAATYLALINAVYFKGNWKSQFRPENTRTFSFTKDDESEVQIPMMYQQGEFYYGEFSDGSNEAGGIYQVLEIPYEGDEISMMLVLSRQEVPLATLEPLVKAQLVEEWANSVKKQKVEVYLPRFTVEQEIDLKDVLKALGITEIFIKDANLTGLSDNKEIFLSKAIHKSFLEVNEEGSEAAAVSGMIAISRMAVLYPQVIVDHPFFFLIRNRRTGTILFMGRVMHPETMNTSGHDFEEL

SEQ ID NO: 3652 - protein, 596 aa, Homo sapiens
MPTQRDSSTMSHTVAGGGSGDHSHQVRVKAYYRGDIMITHFEPSISFEGLCNEVRDMCSFDNEQLFTMKWIDEEGDPCTVSSQLELEEAFRLYELNKDSELLIHVFPCVPERPGMPCPGEDKSIYRRGARRWRKLYCANGHTFQAKRFNRRAHCAICTDRIWGLGRQGYKCINCKLLVHKKCHKLVTIECGRHSLPQEPVMPMDQSSMHSDHAQTVIPYNPSSHESLDQVGEEKEAMNTRESGKASSSLGLQDFDLLRVIGRGSYAKVLLVRLKKTDRIYAMKVVKKELVNDDEDIDWVQTEKHVFEQASNHPFLVGLHSCFQTESRLFFVIEYVNGGDLMFHMQRQRKLPEEHARFYSAEISLALNYLHERGIIYRDLKLDNVLLDSEGHIKLTDYGMCKEGLRPGDTTSTFCGTPNYIAPEILRGEDYGFSVDWWALGVLMFEMMAGRSPFDIVGSSDNPDQNTEDYLFQVILEKQIRIPRSLSVKAASVLKSFLNKDPKERLGCHPQTGFADIQGHPFFRNVDWDMMEQKQVVPPFKPNISGEFGLDNFDSQFTNEPVQLTPDDDDIVRKIDQSEFEGFEYINPLLMSAEECV

SEQ ID NO: 3653 - protein, 610 aa, Homo sapiens
MWLPLVLLLAVLLLAVLCKVYLGLFSGSSPNPFSEDVKRPPAPLVTDKEARKKVLKQAFSANQVPEKLDVVVIGSGFGGLAAAAILAKAGKRVLVLEQHTKAGGCCHTFGKNGLEFDTGIHYIGRMEEGSIGRFILDQITEGQLDWAPLSSPFDIMVLEGPNGRKEYPMYSGEKAYIQGLKEKFPQEEAIIDKYIKLVKVVSSGAPHAILLKFLPLPVVQLLDRCGLLTRFSPFLQASTQSLAEVLQQLGASSELQAVLSYIFPTYGVTPNHSAFSMHALLVNHYMKGGFYPRGGSSEIAFHTIPVIQRAGGAVLTKATVQSVLLDSAGKACGVSVKKGHELVNIYCPIVVSNAGLFNTYEHLLPGNARCLPGVKQQLGTVRPGLGMTSVFICLRGTKEDLHLPSTNYYVYYDTDMDQAMERYVSMPREEAAEHIPLLFFAFPSAKDPTWEDRFPGRSTMIMLIPTAYEWFEEWQAELKGKRGSDYETFKNSFVEASMSVVLKLFPQLEGKVESVTAGSPLTNQFYLAAPRGACYGADHDLGRLHPCVMASLRAQSPIPNLYLTGQDIFTCGLVGALQGALLCSSAILKRNLYSDLKNLDSRIRAQKKKN

SEQ ID NO: 3654 - protein, 153 aa, Homo sapiens
MADEIDFTTGDAGASSTYPMQCSALRKNGFVVLKGRPCKIVEMSTSKTGKHGHAKVHLVGIDIFTGKKYEDICPSTHNMDVPNIKRNDYQLICIQDGYLSLLTETGEVREDLKLPEGELGKEIEGKYNAGEDVQVSVMCAMSEEYAVAIKPCK

SEQ ID NO: 3655 - protein, 127 aa, Homo sapiens
MSFSGKYQLQSQENFEAFMKAIGLPEELIQKGKDIKGVSEIVQNGKHFKFTITAGSKVIQNEFTVGEECELETMTGEKVKTVVQLEGDNKLVTTFKNIKSVTELNGDIITNTMTLGDIVFKRISKRI

SEQ ID NO: 3656 - protein, 855 aa, Homo sapiens
MSFVRVNRCGPRVGVRKTPKVKKKKTSVKQEWDNTVTDLTVHRATPEDLVRRHEIHKSKNRALVHWELQEKALKRKWRKQKPETLNLEKRRLSIMKEILSDQYQMQDVLEKSDHLIAAAKELFPRRRTGFPNVTVAPDSSQGPIVVNQDPITQSIFNESVIEPQALNDVDGEEEGTVNSQSGESENENELDNSLNSQSNTNTDRFLQQLTEENFELISKLWTDIQQKIATQSQITPPGTPSSALSSGEQRAALNATNAVKRLQTRLQPEESTETLDSSYVVGHVLNSRKQKQLLNKVKRKPNLHALSKPKKNISSGSTTSADLPNRTNSNLDVLKHMIHEVEHEMEEYERWTGREVKGLQSSQGLTGFTLSLVSSLCRLVRYLKESEIQLRKEVETRQQLEQVLGDHRELIDALTAEILRLREENAATQARLQQYMVTTDEQLISLTHAIKNCPVINNRQEIQASESGATGRRVMDSPERPVVNANVSVPLMFREEVAEFPQEELPVKLSQVPDPPDNMNLAKNFPAHIFEPAVLLTPPRQKSNLKFSPLQDVLRRTVQTRPAPRLPPTVEIIEKEQNWEEKTLPIDTDIQNSSEENRLFTQRWRVSHMGEDLENKTQAPFVNLSQPLCNSHSNTQQSRSPTFSEELPVLGDGQQLRTNESLIQRKDIMTRIADLTLQNSAIKAHMNNIIEPRGEQGDGLRELNKQESASDMTSTFPVAQSLTPGSMEERIAELNRQSMEARGKLLQLIEQQKLVGLNLSPPMSPVQLPLRAWTEGAKRTIEVSIPGAEAPESSKCSTVSPVSGINTRRSSGATGNSCSPLNATSGSGRFTPLNPRAKIEKQNEEGWFALSTHVS

SEQ ID NO: 3657 - protein, 1416 aa, Homo sapiens
MRRLLEPCWWILFLKITSSVLHYVVCFPALTEGYVGALHENRHGSAVQIRRRKASGDPYWAYSGAYGPEHWVTSSVSCGGRHQSPIDILDQYARVGEEYQELQLDGFDNESSNKTWMKNTGKTVAILLKDDYFVSGAGLPGRFKAEKVEFHWGHSNGSAGSEHSINGRRFPVEMQIFFYNPDDFDSFQTAISENRIIGAMAIFFQVSPRDNSALDPIIHGLKGVVHHEKETFLDPFVLRDLLPASLGSYYRYTGSLTTPPCSEIVEWIVFRRPVPISYHQLEAFYSIFTTEQQDHVKSVEYLRNNFRPQQRLHDRVVSKSAVRDSWNHDMTDFLENPLGTEASKVCSSPPIHMKVQPLNQTALQVSWSQPETIYHPPIMNYMISYSWTKNEDEKEKTFTKDSDKDLKATISHVSPDSLYLFRVQAVCRNDMRSDFSQTMLFQANTTRIFQGTRIVKTGVPTASPASSADMAPISSGSSTWTSSGIPFSFVSMATGMGPSSSGSQATVASVVTSTLLAGLGFGGGGISSFPSTVWPTRLPTAASASKQAARPVLATTEALASPGPDGDSSPTKDGEGTEEGEKDEKSESEDGEREHEEDGEKDSEKKEKSGVTHAAEERNQTEPSPTPSSPNRTAEGGHQTIPGHEQDHTAVPTDQTGGRRDAGPGLDPDMVTSTQVPPTATEEQYAGSDPKRPEMPSKKPMSRGDRFSEDSRFITVNPAEKNTSGMISRPAPGRMEWIIPLIVVSALTFVCLILLIAVLVYWRKCFQTAHFYVEDSSSPRVVPNESIPIIPIPDDMEAIPVKQFVKHIGELYSNNQHGFSEDFEEVQRCTADMNITAEHSNHPENKHKNRYINILAYDHSRVKLRPLPGKDSKHSDYINANYVDGYNKAKAYIATQGPLKSTFEDFWRMIWEQNTGIIVMITNLVEKGRRKCDQYWPTENSEEYGNIIVTLKSTKIHACYTVRRFSIRNTKVKKGQKGNPKGRQNERVVIQYHYTQWPDMGVPEYALPVLTFVRRSSAARMPETGPVLVHCSAGVGRTGTYIVIDSMLQQIKDKSTVNVLGFLKHIRTQRNYLVQTEEQYIFIHDALLEAILGKETEVSSNQLHSYVNSILIPGVGGKTRLEKQFKLVTQCNAKYVECFSAQKECNKEKNRNSSVVPSERARVGLAPLPGMKGTDYINASYIMGYYRSNEFIITQHPLPHTTKDFWRMIWDHNAQIIVMLPDNQSLAEDEFVYWPSREESMNCEAFTVTLISKDRLCLSNEEQIIIHDFILEATQDDYVLEVRHFQCPKWPNPDAPISSTFELINVIKEEALTRDGPTIVHDEYGAVSAGMLCALTTLSQQLENENAVDVFQVAKMINLMRPGVFTDIEQYQFIYKAMLSLVSTKENGNGPMTVDKNGAVLIADESDPAESMESLV

SEQ ID NO: 3658 - protein, 3526 aa, Homo sapiens
MNMVKRIMGRPRQEECSPQDNALGLMHLRRLFTELCHPPRHMTQKEQEEKLYMMLPVFNRVFGNAPPNTMTEKFSDLLQFTTQVSRLMVTEIRRRASNKSTEAASRAIVQFLEINQSEEASRGWMLLTTINLLASSGQKTVDCMTTMSVPSTLVKCLYLFFDLPHVPEAVGGAQNELPLAERRGLLQKVFVQILVKLCSFVSPAEELAQKDDLQLLFSAITSWCPPYNLPWRKSAGEVLMTISRHGLSVNVVKYIHEKECLSTCVQNMQQSDDLSPLEIVEMFAGLSCFLKDSSDVSQTLLDDFRIWQGYNFLCDLLLRLEQAKEAESKDALKDLVNLITSLTTYGVSELKPAGITTGAPFLLPGFAVPQPAGKGHSVRNVQAFAVLQNAFLKAKTSFLAQIILDAITNIYMADNANYFILESQHTLSQFAEKISKLPEVQNKYFEMLEFVVFSLNYIPCKELISVSILLKSSSSYHCSIIAMKTLLKFTRHDYIFKDVFREVGLLEVMVNLLHKYAALLKDPTQALNEQGDSRNNSSVEDQKHLALLVMETLTVLLQGSNTNAGIFREFGGARCAHNIVKYPQCRQHALMTIQQLVLSPNGDDDMGTLLGLMHSAPPTELQLKTDILRALLSVLRESHRSRTVFRKVGGFVYITSLLVAMERSLSCPPKNGWEKVNQNQVFELLHTVFCTLTAAMRYEPANSHFFKTEIQYEKLADAVRFLGCFSDLRKISAMNVFPSNTQPFQRLLEEDVISIESVSPTLRHCSKLFIYLYKVATDSFDSRAEQIPPCLTSESSLPSPWGTPALSRKRHAYHSVSTPPVYPPKNVADLKLHVTTSSLQSSDAVIIHPGAMLAMLDLLASVGSVTQPEHALDLQLAVANILQSLVHTERNQQVMCEAGLHARLLQRCSAALADEDHSLHPPLQRMFERLASQALEPMVLREFLRLASPLNCGAWDKKLLKQYRVHKPSSLSYEPEMRSSMITSLEGLGTDNVFSLHEDNHYRISKSLVKSAEGSTVPLTRVKCLVSMTTPHDIRLHGSSVTPAFVEFDTSLEGFGCLFLPSLAPHNAPTNNTVTTGLIDGAVVSGIGSGERFFPPPSGLSYSSWFCIEHFSSPPNNHPVRLLTVVRRANSSEQHYVCLAIVLSAKDRSLIVSTKEELLQNYVDDFSEESSFYEILPCCARFRCGELIIEGQWHHLVLVMSKGMLKNSTAALYIDGQLVNTVKLHYVHSTPGGSGSANPPVVSTVYAYIGTPPAQRQIASLVWRLGPTHFLEEVLPSSNVTTIYELGPNYVGSFQAVCMPCKDAKSEGVVPSPVSLVPEEKVSFGLYALSVSSLTVARIRKVYNKLDSKAIAKQLGISSHENATPVKLIHNSAGHLNGSARTIGAALIGYLGVRTFVPKPVATTLQYVGGAAAILGLVAMASDVEGLYAAVKALVCVVKSNPLASKEMERIKGYQLLAMLLKKKRSLLNSHILHLTFSLVGTVDSGHETSIIPNSTAFQDLLCDFEVWLHAPYELHLSLFEHFIELLTESSEASKNAKLMREFQLIPKLLLTLRDMSLSQPTIAAISNVLSFLLQGFPSSNDLLRFGQFISSTLPTFAVCEKFVVMEINNEEKLDTGTEEEFGGLVSANLILLRNRLLDILLKLIYTSKEKTSINLQACEELVKTLGFDWIMMFMEEHLHSTTVTAAMRILVVLLSNQSILIKFKEGLSGGGWLEQTDSVLTNKIGTVLGFNVGRSAGGRSTVREINRDACHFPGFPVLQSFLPKHTNVPALYFLLMALFLQQPVSELPENLQVSVPVISCRSKQGCQFDLDSIWTFIFGVPASSGTVVSSIHNVCTEAVFLLLGMLRSMLTSPWQSEEEGSWLREYPVTLMQFFRYLYHNVPDLASMWMSPDFLCALAATVFPFNIRPYSEMVTDLDDEVGSPAEEFKAFAADTGMNRSQSEYCNVGTKTYLTNHPAKKFVFDFMRVLIIDNLCLTPASKQTPLIDLLLEASPERSTRTQQKEFQTYILDSVMDHLLAADVLLGEDASLPITSGGSYQVLVNNVFYFTQRVVDKLWQGMFNKESKLLIDFIIQLIAQSKRRSQGLSLDAVYHCLNRTILYQFSRAHKTVPQQVALLDSLRVLTVNRNLILGPGNHDQEFISCLAHCLINLHVGSNVDGFGLEAEARMTTWHIMIPSDIEPDGSYSQDISEGRQLLIKAVNRVWTELIHSKKQVLEELFKVTLPVNERGHVDIATARPLIEEAALKCWQNHLAHEKKCISRGEALAPTTQSKLSRVSSGFGLSKLTGSRRNRKESGLNKHSLSTQEISQWMFTHIAVVRDLVDTQYKEYQERQQNALKYVTEEWCQIECELLRERGLWGPPIGSHLDKWMLEMTEGPCRMRKKMVRNDMFYNHYPYVPETEQETNVASEIPSKQPETPDDIPQKKPARYRRAVSYDSKEYYMRLASGNPAIVQDAIVESSEGEAAQQEPEHGEDTIAKVKGLVKPPLKRSRSAPDGGDEENQEQLQDQIAEGSSIEEEEKTDNATLLRLLEEGEKIQHMYRCARVQGLDTSEGLLLFGKEHFYVIDGFTMTATREIRDIETLPPNMHEPIIPRGARQGPSQLKRTCSIFAYEDIKEVHKRRYLLQPIAVEVFSGDGRNYLLAFQKGIRNKVYQRFLAVVPSLTDSSESVSGQRPNTSVEQGSGLLSTLVGEKSVTQRWERGEISNFQYLMHLNTLAGRSYNDLMQYPVFPWILADYDSEEVDLTNPKTFRNLAKPMGAQTDERLAQYKKRYKDWEDPNGETPAYHYGTHYSSAMIVASYLVRMEPFTQIFLRLQGGHFDLADRMFHSVREAWYSASKHNMADVKELIPEFFYLPEFLFNSNNFDLGCKQNGTKLGDVILPPWAKGDPREFIRVHREALECDYVSAHLHEWIDLIFGYKQQGPAAVEAVNVFHHLFYEGQVDIYNINDPLKETATIGFINNFGQIPKQLFKKPHPPKRVRSRLNGDNAGISVLPGSTSDKIFFHHLDNLRPSLTPVKELKEPVGQIVCTDKGILAVEQNKVLIPPTWNKTFAWGYADLSCRLGTYESDKAMTVYECLSEWGQILCAICPNPKLVITGGTSTVVCVWEMGTSKEKAKTVTLKQALLGHTDTVTCATASLAYHIIVSGSRDRTCIIWDLNKLSFLTQLRGHRAPVSALCINELTGDIVSCAGTYIHVWSINGNPIVSVNTFTGRSQQIICCCMSEMNEWDTQNVIVTGHSDGVVRFWRMEFLQVPETPAPEPAEVLEMQEDCPEAQIGQEAQDEDSSDSEADEQSISQDPKDTPSQPSSTSHRPRAASCRATAAWCTDSGSDDSRRWSDQLSLDEKDGFIFVNYSEGQTRAHLQGPLSHPHPNPIEVRNYSRLKPGYRWERQLVFRSKLTMHTAFDRKDNAHPAEVTALGISKDHSRILVGDSRGRVFSWSVSDQPGRSAADHWVKDEGGDSCSGCSVRFSLTERRHHCRNCGQLFCQKCSRFQSEIKRLKISSPVRVCQNCYYNLQHERGSEDGPRNC

SEQ ID NO: 3659 - protein, 333 aa, Homo sapiens
MLCRLGGRWLRPLPALQLWARDLPLAPVPTSGAKRPTLPVWAVAPVSAVHANGWYEALAASSPVRVAEEVLLGVHAATGLPWWGSILLSTVALRGAVTLPLAAYQHYILAKVENLQPEIKTIARHLNQEVAVRANQLGWSKRDARLTYLKNMRRLISELYVRDNCHPFKATVLVWIQLPMWIFMSFALRNLSTGAAHSEGFSVQEQLATGGILWFPDLTAPDSTWILPISVGVINLLIVEICALQKIGMSRFQTYITYFVRAMSVLMIPIAATVPSSIVLYWLCSSFVGLSQNLLLRSPGFRQLCRIPSTKSDSETPYKDIFAAFNTKFISRK

SEQ ID NO: 3660 - protein, 609 aa, Homo sapiens [sequence omitted]

SEQ ID NO: 3661 - protein, 204 aa, Homo sapiens
MGAVTDDEVIRKRLLIDGDGAGDDRRINLLVKSFIKWCNSGSQEEGYSQYQRMLSTLSQCEFSMGKTLLVYDMNLREMENYEKIYKEIECSIAGAHEKIAECKKQILQAKRIRKNRQEYDALAKVIQHHPDRHETLKELEALGKELEHLSHIKESVEDKLELRRKQFHVLLSTIHELQQTLENDEKLSEVEEAQEASMETDPKP

SEQ ID NO: 3662 - protein, 389 aa, Homo sapiens
MPLENLEEEGLPKNPDLRIAQLRFLLSLPEHRGDAAVRDELMAAVRDNNMAPYYEALCKSLDWQIDVDLLNKMKKANEDELKRLDEELEDAEKNLGESEIRDAMMAKAEYLCRIGDKEGALTAFRKTYDKTVALGHRLDIVFYLLRIGLFYMDNDLITRNTEKAKSLIEEGGDWDRRNRLKVYQGLYCVAIRDFKQAAELFLDTVSTFTSYELMDYKTFVTYTVYVSMIALERPDLREKVIKGAEILEVLHSLPAVRQYLFSLYECRYSVFFQSLAVVEQEMKKDWLFAPHYRYYVREMRIHAYSQLLESYRSLTLGYMAEAFGVGVEFIDQELSRFIAAGRLHCKIDKVNEIVETNRPDSKNWQYQETIKKGDLLLNRVQKLSRVINM

SEQ ID NO: 3663 - protein, 1907 aa, Homo sapiens
MQFVSWATLLTLLVRDLAEMGSPDAAAAVRKDRLHPRQVKLLETLSEYEIVSPIRVNALGEPFPTNVHFKRTRRSINSATDPWPAFASSSSSSTSSQAHYRLSAFGQQFLFNLTANAGFIAPLFTVTLLGTPGVNQTKFYSEEEAELKHCFYKGYVNTNSEHTAVISLCSGMLGTFRSHDGDYFIEPLQSMDEQEDEEEQNKPHIIYRRSAPQREPSTGRHACDTSEHKNRHSKDKKKTRARKWGERINLAGDVAALNSGLATEAFSAYGNKTDNTREKRTHRRTKRFLSYPRFVEVLVVADNRMVSYHGENLQHYILTLMSIDGPSISFNAQTTLKNFCQWQHSKNSPGGIHHDTAVLLTRQDICRAHDKCDTLGLAELGTICDPYRSCSISEDSGLSTAFTIAHELGHVFNMPHDDNNKCKEEGVKSPQHVMAPTLNFYTNPWMWSKCSRKYITEFLDTGYGECLLNEPESRPYPLPVQLPGILYNVNKQCELIFGPGSQVCPYMMQCRRLWCNNVNGVHKGCRTQHTPWADGTECEPGKHCKYGFCVPKEMDVPVTDGSWGSWSPFGTCSRTCGGGIKTAIRECNRPEPKNGGKYCVGRRMKFKSCNTEPCLKQKRDFRDEQCAHFDGKHFNINGLLPNVRWVPKYSGILMKDRCKLFCRVAGNTAYYQLRDRVIDGTPCGQDTNDICVQGLCRQAGCDHVLNSKARRDKCGVCGGDNSSCKTVAGTFNTVHYGYNTVVRIPAGATNIDVRQHSFSGETDDDNYLALSSSKGEFLLNGNFVVTMAKREIRIGNAVVEYSGSETAVERINSTDRIEQELLLQVLSVGKLYNPDVRYSFNIPIEDKPQQFYWNSHGPWQACSKPCQGERKRKLVCTRESDQLTVSDQRCDRLPQPGHITEPCGTDCDLRWHVASRSECSAQCGLGYRTLDIYCAKYSRLDGKTEKVDDGFCSSHPKPSNREKCSGECNTGGWRYSAWTECSKSCDGGTQRRRAICVNTRNDVLDDSKCTHQEKVTIQRCSEFPCPQWKSGDWSECLVTCGKGHKHRQVWCQFGEDRLNDRMCDPETKPTSMQTCQQPECASWQAGPWGQCSVTCGQGYQLRAVKCIIGTYMSVVDDNDCNAATRPTDTQDCELPSCHPPPAAPETRRSTYSAPRTQWRFGSWTPCSATCGKGTRMRYVSCRDENGSVADESACATLPRPVAKEECSVTPCGQWKALDWSSCSVTCGQGRATRQVMCVNYSDHVIDRSECDQDYIPETDQDCSMSPCPQRTPDSGLAQHPFQNEDYRPRSASPSRTHVLGGNQWRTGPWGACSSTCAGGSQRRVVVCQDENGYTANDCVERIKPDEQRACESGPCPQWAYGNWGECTKLCGGGIRTRLVVCQRSNGERFPDLSCEILDKPPDREQCNTHACPHDAAWSTGPWSSCSVSCGRGHKQRNVYCMAKDGSHLESDYCKHLAKPHGHRKCRGGRCPKWKAGAWSQCSVSCGRGVQQRHVGCQIGTHKIARETECNPYTRPESERDCQGPRCPLYTWRAEEWQECTKTCGEGSRYRKVVCVDDNKNEVHGARCDVSKRPVDRESCSLQPCEYVWITGEWSECSVTCGKGYKQRLVSCSEIYTGKENYEYSYQTTINCPGTQPPSVHPCYLRDCPVSATWRVGNWGSCSVSCGVGVMQRSVQCLTNEDQPSHLCHTDLKPEERKTCRNVYNCELPQNCKEVKRLKGASEDGEYFLMIRGKLLKIFCAGMHSDHPKEYVTLVHGDSENFSEVYGHRLHNPTECPYNGSRRDDCQCRKDYTAAGFSSFQKIRIDLTSMQIITTDLQFARTSEGHPVPFATAGDCYSAAKCPQGRFSINLYGTGLSLTESARWISQGNYAVSDIKKSPDGTRVVGKCGGYCGKCTPSSGTGLEVRVL

SEQ ID NO: 3664 - protein, 657 aa, Homo sapiens
MEMETTEPEPDCVVQPPSPPDDFSCQMRLSEKITPLKTCFKKKDQKRLGTGTLRSLRPILNTLLESGSLDGVFRSRNQSTDENSLHEPMMKKAMEINSSCPPAENNMSVLIPDRTNVGDQIPEAHPSTEAPERVVPIQDHSFPSETLSGTVADSTPAHFQTDLLHPVSSDVPTSPDCLDKVIDYVPGIFQENSFTIQYILDTSDKLSTELFQDKSEEASLDLVFELVNQLQYHTHQENGIEICMDFLQGTCIYGRDCLKHHTVLPYHWQIKRTTTQKWQSVFNDSQEHLERFYCNPENDRMRMKYGGQEFWADLNAMNVYETTEFDQLRRLSTPPSSNVNSIYHTVWKFFCRDHFGWREYPESVIRLIEEANSRGLKEVRFMMWNNHYILHNSFFRREIKRRPLFRSCFILLPYLQTLGGVPTQAPPPLEATSSSQIICPDGVTSANFYPETWVYMHPSQDFIQVPVSAEDKSYRIIYNLFHKTVPEFKYRILQILRVQNQFLWEKYKRKKEYMNRKMFGRDRIINERHLFHGTSQDVVDGICKHNFDPRVCGKHATMFGQGSYFAKKASYSHNFSKKSSKGVHFMFLAKVLTGRYTMGSHGMRRPPPVNPGSVTSDLYDSCVDNFFEPQIFVIFNDDQSYPYFVIQYEEVSNTVSI

SEQ ID NO: 3665 - protein, 172 aa, Homo sapiens
MASGPHSTATAAAAASSAAPSAGGSSSGTTTTTTTTTGGILIGDRLYSEVSLTIDHSLIPEERLSPTPSMQDGLDLPSETDLRILGCELIQAAGILLRLPQVAMATGQVLFHRFFYSKSFVKHSFEIVAMACINLASKIEEAPRRIRDVINVFHHLRQLRGKSDQLHLPKPG

SEQ ID NO: 3666 - protein, 526 aa, Homo sapiens
MASGPHSTATAAAAASSAAPSAGGSSSGTTTTTTTTTGGILIGDRLYSEVSLTIDHSLIPEERLSPTPSMQDGLDLPSETDLRILGCELIQAAGILLRLPQVAMATGQVLFHRFFYSKSFVKHSFEIVAMACINLASKIEEAPRRIRDVINVFHHLRQLRGKRTPSPLILDQNYINTKNQVIKAERRVLKELGFCVHVKHPHKIIVMYLQVLECERNQTLVQTAWNYMNDSLRTNVFVRFQPETIACACIYLAARALQIPLPTRPHWFLLFGTTEEEIQEICIETLRLYTRKKPNYELLEKEVEKRKVALQEAKLKAKGLNPDGTPALSTLGGFSPASKPSSPREVKAEEKSPISINVKTVKKEPEDRQQASKSPYNGVRKDSKRSRNSRSASRSRSRTRSRSRSHTPRRHYNNRRSRSGTYSSRSRSRSRSHSESPRRHHNHGSPHLKAKHTRDDLKSSNRHGHKRKKSRSRSQSKSRDHSDAAKKHRHERGHHRDRRERSRSFERSHKSKHHGGSRSGHGRHRR

SEQ ID NO: 3667 - protein, 381 aa, Homo sapiens
MHLLAILFCALWSAVLAENSDDYDLMYVNLDNEIDNGLHPTEDPTPCACGQEHSEWDKLFIMLENSQMRERMLLQATDDVLRGELQRLREELGRLAESLARPCAPGAPAEARLTSALDELLQATRDAGRRLARMEGAEAQRPEEAGRALAAVLEELRQTRADLHAVQGWAARSWLPAGCETAILFPMRSKKIFGSVHPVRPMRLESFSACIWVKATDVLNKTILFSYGTKRNPYEIQLYLSYQSIVFVVGGEENKLVAEAMVSLGRWTHLCGTWNSEEGLTSLWVNGELAATTVEMATGHIVPEGGILQIGQEKNGCCVGGGFDETLAFSGRLTGFNIWDSVLSNEEIRETGGAESCHIRGNIVGWGVTEIQPHGGAQYVS

SEQ ID NO: 3668 - protein, 334 aa, Homo sapiens
MGRRSSDTEEESRSKRKKKHRRRSSSSSSSDSRTYSRKKGGRKSRSKSRSWSRDLQPRSHSYDRRRRHRSSSSSSYGSRRKRSRSRSRGRGKSYRVQRSRSKSRTRRSRSRPRLRSHSRSSERSSHRRTRSRSRDRERRKGRDKEKREKEKDKGKDKELHNIKRGESGNIKAGLEHLPPAEQAKARLQLVLEAAAKADEALKAKERNEEEAKRRKEEDQATLVEQVKRVKEIEAIESDSFVQQTFRSSKEVKKSVEPSEVKQATSTSGPASAVADPPSTEKEIDPTSIPTAIKYQDDNSLAHPNLFIEKADAEEKWFKRLIALRQERLMGSPVA

SEQ ID NO: 3669 - protein, 2602 aa, Homo sapiens
MPVTEKDLAEDAPWKKIQQNTFTRWCNEHLKCVNKRIGNLQTDLSDGLRLIALLEVLSQKRMYRKYHQRPTFRQMQLENVSVALEFLDRESIKLVSIDSKAIVDGNLKLILGLVWTLILHYSISMPVWEDEGDDDAKKQTPKQRLLGWIQNKIPYLPITNFNQNWQDGKALGALVDSCAPGLCPDWESWDPQKPVDNAREAMQQADDWLGVPQVITPEEIIHPDVDEHSVMTYLSQFPKAKLKPGAPLKPKLNPKKARAYGRGIEPTGNMVKQPAKFTVDTISAGQGDVMVFVEDPEGNKEEAQVTPDSDKNKTYSVEYLPKVTGLHKVTVLFAGQHISKSPFEVSVDKAQGDASKVTAKGPGLEAVGNIANKPTYFDIYTAGAGVGDIGVEVEDPQGKNTVELLVEDKGNQVYRCVYKPMQPGPHVVKIFFAGDTIPKSPFVVQVGEACNPNACRASGRGLQPKGVRIRETTDFKVDTKAAGSGELGVTMKGPKGLEELVKQKDFLDGVYAFEYYPSTPGRYSIAITWGGHHIPKSPFEVQVGPEAGMQKVRAWGPGLHGGIVGRSADFVVESIGSEVGSLGFAIEGPSQAKIEYNDQNDGSCDVKYWPKEPGEYAVHIMCDDEDIKDSPYMAFIHPATGGYNPDLVRAYGPGLEKSGCIVNNLAEFTVDPKDAGKAPLKIFAQDGEGQRIDIQMKNRMDGTYACSYTPVKAIKHTIAVVWGGVNIPHSPYRVNIGQGSHPQKVKVFGPGVERSGLKANEPTHFTVDCTEAGEGDVSVGIKCDARVLSEDEEDVDFDIIHNANDTFTVKYVPPAAGRYTIKVLFASQEIPASPFRVKVDPSHDASKVKAEGPGLSKAGVENGKPTHFTVYTKGAGKAPLNVQFNSPLPGDAVKDLDIIDNYDYSHTVKYTPTQQGNMQVLVTYGGDPIPKSPFTVGVAAPLDLSKIKLNGLENRVEVGKDQEFTVDTRGAGGQGKLDVTILSPSRKVVPCLVTPVTGRENSTAKFIPREEGLYAVDVTYDGHPVPGSPYTVEASLPPDPSKVKAHGPGLEGGLVGKPAEFTIDTKGAGTGGLGLTVEGPCEAKIECSDNGDGTCSVSYLPTKPGEYFVNILFEEVHIPGSPFKADIEMPFDPSKVVASGPGLEHGKVGEAGLLSVDCSEAGPGALGLEAVSDSGTKAEVSIQNNKDGTYAVTYVPLTAGMYTLTMKYGGELVPHFPARVKVEPAVDTSRIKVFGPGIEGKDVFREATTDFTVDSRPLTQVGGDHIKAHIANPSGASTECFVTDNADGTYQVEYTPFEKGLHVVEVTYDDVPIPNSPFKVAVTEGCQPSRVQAQGPGLKEAFTNKPNVFTVVTRGAGIGGLGITVEGPSESKINCRDNKDGSCSAEYIPFAPGDYDVNITYGGAHIPGSPFRVPVKDVVDPSKVKIAGPGLGSGVRARVLQSFTVDSSKAGLAPLEVRVLGPRGLVEPVNVVDNGDGTHTVTYTPSQEGPYMVSVKYADEEIPRSPFKVKVLPTYDASKVTASGPGLSSYGVPASLPVDFAIDARDAGEGLLAVQITDQEGKPKRAIVHDNKDGTYAVTYIPDKTGRYMIGVTYGGDDIPLSPYRIRATQTGDASKCLATGPGIASTVKTGEEVGFVVDAKTAGKGKVTCTVLTPDGTEAEADVIENEDGTYDIFYTAAKPGTYVIYVRFGGVDIPNSPFTVMATDGEVTAVEEAPVNACPPGFRPWVTEEAYVPVSDMNGLGFKPFDLVIPFAVRKGEITGEVHMPSGKTATPEIVDNKDGTVTVRYAPTEVGLHEMHIKYMGSHIPESPLQFYVNYPNSGSVSAYGPGLVYGVANKTATFTIVTEDAGEGGLDLAIEGPSKAEISCIDNKDGTCTVTYLPTLPGDYSILVKYNDKHIPGSPFTAKITDDSRRCSQVKLGSAADFLLDISETDLSSLTASIKAPSGRDEPCLLKRLPNNHIGISFIPREVGEHLVSIKKNGNHVANSPVSIMVVQSEIGDARRAKVYGRGLSEGRTFEMSDFIVDTRDAGYGGISLAVEGPSKVDIQTEDLEDGTCKVSYFPTVPGVYIVSTKFADEHVPGSPFTVKISGEGRVKESITRTSRAPSVATVGSICDLNLKIPEINSSDMSAHVTSPSGRVTEAEIVPMGKNSHCVRFVPQEMGVHTVSVKYRGQHVTGSPFQFTVGPLGEGGAHKVRAGGPGLERGEAGVPAEFSIWTREAGAGGLSIAVEGPSKAEITFDDHKNGSCGVSYIAQEPGNYEVSIKFNDEHIPESPYLVPVIAPSDDARRLTVMSLQESGLKVNQPASFAIRLNGAKGKIDAKVHSPSGAVEECHVSELEPDKYAVRFIPHENGVHTIDVKFNGSHVVGSPFKVRVGEPGQAGNPALVSAYGTGLEGGTTGIQSEFFINTTRAGPGTLSVTIEGPSKVKMDCQETPEGYKVMYTPMAPGNYLISVKYGGPNHIVGSPFKAKVTGQRLVSPGSANETSSILVESVTRSSTETCYSAIPKASSDASKVTSKGAGLSKAFVGQKSSFLVDCSKAGSNMLLIGVHGPTTPCEEVSMKHVGNQQYNVTYVVKERGDYVLAVKWGEEHIPGSPFHVTVP

SEQ ID NO: 3670 - protein, 337 aa, Homo sapiens
MDLDVVNMFVIAGGTLAIPILAFVASFLLWPSALIRIYYWYWRRTLGMQVRYVHHEDYQFCYSFRGRPGHKPSILMLHGFSAHKDMWLSVVKFLPKNLHLVCVDMPGHEGTTRSSLDDLSIDGQVKRIHQFVECLKLNKKPFHLVGTSMGGQVAGVYAAYYPSDVSSLCLVCPAGLQYSTDNQFVQRLKELQGSAAVEKIPLIPSTPEEMSEMLQLCSYVRFKVPQQILQGLVDVRIPHNNFYRKLFLEIVSEKSRYSLHQNMDKIKVPTQIIWGKQDQVLDVSGADMLAKSIANCQVELLENCGHSVVMERPRKTAKLIIDFLASVHNTDNNKKLD

SEQ ID NO: 3671 - protein, 758 aa, Homo sapiens
MSEVLPADSGVDTLAVFMASSGTTDVTNRNSPATPPNTLNLRSSHNELLNAEIKHTETKNSTPPKCRKKYALTNIQAAMGLSDPAAQPLLGNGSANIKLVKNGENQLRKAAEQGQQDPNKNLSPTAVINITSEKLEGKEPHPQDSSSCEILPSQPRRTKSFLNYYADLETSARELEQNRGNHHGTAEEKSQPVQGQASTIIGNGDLLLQKPNRPQSSPEDGQVATVSSSPETKKDHPKTGAKTDCALHRIQNLAPSDEESSWTTLSQDSASPSSPDETDIWSDHSFQTDPDLPPGWKRVSDIAGTYYWHIPTGTTQWERPVSIPADLQGSRKGSLSSVTPSPTPENEKQPWSDFAVLNGGKINSDIWKDLHAATVNPDPSLKEFEGATLRYASLKLRNAPHPDDDDSCSINSDPEAKCFAVRSLGWVEMAEEDLAPGKSSVAVNNCIRQLSYCKNDIRDTVGIWGEGKDMYLILENDMLSLVDPMDRSVLHSQPIVSIRVWGVGRDNGRDFAYVARDKDTRILKCHVFRCDTPAKAIATSLHEICSKIMAERKNAKALACSSLQERANVNLDVPLQVDFPTPKTELVQKFHVQYLGMLPVDKPVGMDILNSAIENLMTSSNKEDWLSVNMNVADATVTVISEKNEEEVLVECRVRFLSFMGVGKDVHTFAFIMDTGNQRFECHVFWCEPNAGNVSEAVQAACMLRYQKCLVARPPSQKVRPPPPPADSVTRRVTTNVKRGVLSLIDTLKQKRPVTEMP

SEQ ID NO: 3672 - protein, 791 aa, Homo sapiens
MPVPWFLLSLALGRSPVVLSLERLVGPQDATHCSPVSLEPWGDEERLRVQFLAQQSLSLAPVTAATARTALSGLSGADGRREERGRGKSWVCLSLGGSGNTEPQKKGLSCRLWDSDILCLPGDIVPAPGPVLAPTHLQTELVLRCQKETDCDLCLRVAVHLAVHGHWEEPEDEEKFGGAADSGVEEPRNASLQAQVVLSFQAYPTARCVLLEVQVPAALVQFGQSVGSVVYDCFEAALGSEVRIWSYTQPRYEKELNHTQQLPDCRGLEVWNSIPSCWALPWLNVSADGDNVHLVLNVSEEQHFGLSLYWNQVQGPPKPRWHKNLTGPQIITLNHTDLVPCLCIQVWPLEPDSVRTNICPFREDPRAHQNLWQAARLQLLTLQSWLLDAPCSLPAEAALCWRAPGGDPCQPLVPPLSWENVTVDKVLEFPLLKGHPNLCVQVNSSEKLQLQECLWADSLGPLKDDVLLLETRGPQDNRSLCALEPSGCTSLPSKASTRAARLGEYLLQDLQSGQCLQLWDDDLGALWACPMDKYIHKRWALVWLACLLFAAALSLILLLKKDHAKGWLRLLKQDVRSGAAARGRAALLLYSADDSGFERLVGALASALCQLPLRVAVDLWSRRELSAQGPVAWFHAQRRQTLQEGGVVVLLFSPGAVALCSEWLQDGVSGPGAHGPHDAFRASLSCVLPDFLQGRAPGSYVGACFDRLLHPDAVPALFRTVPVFTLPSQLPDFLGALQQPRAPRSGRLQERAEQVSRALQPALDSYFHPPGTPAPGRGVGPGAGPGAGDGT

SEQ ID NO: 3673 - protein, 981 aa, Homo sapiens
MASSPWGCVCGLLLLLLPLLGTGPALGRGFPRPLENSEIPMIPGAHPKGSVGSEPQAFDVFPENPRADSHRNSDVRHAPAEEMPEKPVASPLGPALYGPKAAQGAQRERLPVTDDLQMAQGPSSHGWTGPLDSQELLQQEAVAPHPVGHPHLTFIPTTPRRQLRVATVPPSLQHEGQEGQWPPRDEGLKAKTKSRVPPTSPSDHQGPPHTLVSHSGTVKRPVLEGQGGFEEHLQEAAQGPHFTQQDPAAPDVGSVPPVEVVYSQEPGAQPDLALARSLPPAEELPVETPKRAGAEVSWEVSSPGPPPKQADLPDAKDSPGPQPTDPPASEAPDRPSKPERAAMNGADPISPQRVRGAVEAPGTPKSLIPGPSDPGPAVNRTESPMGALQPDEAEEWPGRPQSHPPAPPVQAPSTSRRGLIRVTTQRALGQPPPPEPTASSMASAPASSPPANATAPPLRWGPLRRVLSFSWELHVYGVGVLFLLPALLALAALAAAPAGPRLALVAAVLVLVASALRSAYMLTDPYGSQARLGVRGGLVLYNLPFPLLLTALAALTLLGLGAGLPPPLQNPLLLGAVALVHGVGLLATDLLSTWSVLNLLTQGLSCAWGAAVALGTLCLCRRRLLDGPRGWDASPGPRLLAVAGALGLLASGLQLAAALWLYPGPGRVGRFSWAWWGVHFWLRLLELTWALALALAAVAAARPRPPTEHACWAKLMRLACPAPSGKSEVPERPNNCYAGPSNVGAGSLDISKSLIRNPAESGQLATPSSGAWGSAASLGRGPQGGPGLSRNGVGPAPSLSELDLRPPSPINLSRSIDAALFREHLVRDSVFQRCGLRGLASPPPGGALRPRRGSHPKAELDDAGSSLLRGRCRSLSDVRVRGPVPQHVVEAPDGAAAAASGSSLDSFSRGSLKISWNPWRHGLSSVDSLPLDELPSTVQLLPAPTPAPDSTAARQGDGQGEVQPRGKPGESRSASSDTIEL

SEQ ID NO: 3674 - protein, 415 aa, Homo sapiens
MRGANAWAPLCLLLAAATQLSRQQSPERPVFTCGGILTGESGFIGSEGFPGVYPPNSKCTWKITVPEGKVVVLNFRFIDLESDNLCRYDFVDVYNGHANGQRIGRFCGTFRPGALVSSGNKMMVQMISDANTAGNGFMAMFSAAEPNERGDQYCGGLLDRPSGSFKTPNWPDRDYPAGVTCVWHIVAPKNQLIELKFEKFDVERDNYCRYDYVAVFNGGEVNDARRIGKYCGDSPPAPIVSERNELLIQFLSDLSLTADGFIGHYIFRPKKLPTTTEQPVTTTFPVTTGLKPTVALCQQKCRRTGTLEGNYCSSDFVLAGTVITTITRDGSLHATVSIINIYKEGNLAIQQAGKNMSARLTVVCKQCPLLRRGLNYIIMGQVGEDGRGKIMPNSFIMMFKTKNQKLLDALKNKQC

SEQ ID NO: 3675 - protein, 650 aa, Homo sapiens
MAGARAAAAAASAGSSASSGNQPPQELGLGELLEEFSRTQYRAKDGSGTGGSKVERIEKRCLELFGRDYCFSVIPNTNGDICGHYPRHIVFLEYESSEKEKDTFESTVQVSKLQDLIHRSKMARCRGRFVCPVILFKGKHICRSATLAGWGELYGRSGYNYFFSGGADDAWADVEDVTEEDCALRSGDTHLFDKVRGYDIKLLRYLSVKYICDLMVENKKVKFGMNVTSSEKVDKAQRYADFTLLSIPYPGCEFFKEYKDRDYMAEGLIFNWKQDYVDAPLSIPDFLTHSLNIDWSQYQCWDLVQQTQNYLKLLLSLVNSDDDSGLLVHCISGWDRTPLFISLLRLSLWADGLIHTSLKPTEILYLTVAYDWFLFGHMLVDRLSKGEEIFFFCFNFLKHITSEEFSALKTQRRKSLPARDGGFTLEDICMLRRKDRGSTTSLGSDFSLVMESSPGATGSFTYEAVELVPAGAPTQAAWRKSHSSSPQSVLWNRPQPSEDRLPSQQGLAEARSSSSSSSNHSDNFFRMGSSPLEVPKPRSVDHPLPGSSLSTDYGSWQMVTGCGSIQERAVLHTDSSLPFSFPDELPNSCLLAALSDRETRLQEVRSAFLAAYSSTVGLRAVAPSPSGAIGGLLEQFARGVGLRSISSNAL

SEQ ID NO: 3676 - protein, 107 aa, Homo sapiens
MAHATLSAAPSNPRLLRVALLLLLLVAASRRAAGASVVTELRCQCLQTLQGIHLKNIQSVNVRSPGPHCAQTEVIATLKNGKKACLNPASPMVQKIIEKILNKGSTN

SEQ ID NO: 3677 - protein, 114 aa, Homo sapiens
MSLLSSRAARVPGPSSSLCALLVLLLLLTQPGPIASAGPAAAVLRELRCVCLQTTQGVHPKMISNLQVFAIGPQCSKVEVVASLKNGKEICLDPEAPFLKKVIQKILDGGNKEN

SEQ ID NO: 3678 - protein, 101 aa, Homo sapiens
MSSAAGFCASRPGLLFLGLLLLPLVVAFASAEAEEDGDLQCLCVKTTSQVRPRHITSLEVIKAGPHCPTAQLIATLKNGRKICLDLQAPLYKKIIKKLLES

SEQ ID NO: 3679 - protein, 417 aa, Homo sapiens
MRLILPVGLIATTLAIAPVRFDREKVFRVKPQDEKQADIIKDLAKTNELDFWYPGATHHVAANMMVDFRVSEKESQAIQSALDQNKMHYEILIHDLQEEIEKQFDVKEDIPGRHSYAKYNNWEKIVAWTEKMMDKYPEMVSRIKIGSTVEDNPLYVLKIGEKNERRKAIFTDCGIHAREWVSPAFCQWFVYQATKTYGRNKIMTKLLDRMNFYILPVFNVDGYIWSWTKNRMWRKNRSKNQNSKCIGTDLNRNFNASWNSIPNTNDPCADNYRGSAPESEKETKAVTNFIRSHLNEIKVYITFHSYSQMLLFPYGYTSKLPPNHEDLAKVAKIGTDVLSTRYETRYIYGPIESTIYPISGSSLDWAYDLGIKHTFAFELRDKGKFGFLLPESRIKPTCRETMLAVKFIAKYILKHTS

SEQ ID NO: 3680 - protein, 333 aa, Homo sapiens
MTDQAFVTLTTNDAYAKGALVLGSSLKQHRTTRRLVVLATPQVSDSMRKVLETVFDEVIMVDVLDSGDSAHLTLMKRPELGVTLTKLHCWSLTQYSKCVFMDADTLVLANIDDLFDREELSAAPDPGWPDCFNSGVFVYQPSVETYNQLLHLASEQGSFDGGDQGILNTFFSSWATTDIRKHLPFIYNLSSISIYSYLPAFKVFGASAKVVHFLGRVKPWNYTYDPKTKSVKSEAHDPNMTHPEFLILWWNIFTTNVLPLLQQFGLVKDTCSYVNVEDVSGAISHLSLGEIPAMAQPFVSSEERKERWEQGQADYMGADSFDNIKRKLDTYLQ

SEQ ID NO: 3681 - protein, 1004 aa, Homo sapiens
MVQLYNLHPFGSQQVVPCKLEPDRFCGGGRDALFVAAGCKVEAFAVAGQELCQPRCAFSTLGRVLRLAYSEAGDYLVAIEEKNKATFLRAYVNWRNKRTENSRVCIRMIGHNVEGPFSKAFRDQMYIIEMPLSEAPLCISCCPVKGDLLVGCTNKLVLFSLKYQIINEEFSLLDFERSLIIHIDNITPVEVSFCVGYVAVMSDLEVLIVKLESGPKNGERVHHHPHKTNNRIRRTEEGISNEISQLESDDFVICQKPLELLGEKSEQSGLSVTLESTGLADEKRKYSHFQHLLYRRFAPDISSYVLSDDIKLHSLQLLPIYQTGSLTSDGKNLSQEKELLSLFCFFSLPHVGYLYMVVKSVELMSVYQYPEKSQQAVLTPQFLHVITSNNLQCFTVRCSAAAAREEDPYMDTTLKACPPVSMDVCALRIQLFIGLKAICHFKNHIILLTKAEPEAIPERRQSPKRLLSRKDTSVKIKIPPVAEAGWNLYIVNTISPVQLYKEMVDYSNTYKTVKTQSCIHLLSEAHLLVRAALMDASQLEPGEKAELLEAFKESCGHLGDCYSRLDSQHSHLTLPYYKMSGLSMAEVLARTDWTVEDGLQKYERGLIFYINHSLYENLDEELNEELAAKVVQMFYVAEPKQVPHILCSPSMKNINPLTAMSYLRKLDTSGFSSILVTLTKAAVALKMGDLDMHRNEMKSHSEMKLVCGFILEPRLLIQQRKGQIVPTELALHLKETQPGLLVASVLGLQKNNKIGIEEADSFFKVLCAKDEDTIPQLLVDFWEAQLVACLPDVVLQELFFKLTSQYIWRLSKRQPPDTTPLRTSEDLINACSHYGLIYPWVHVVISSDSLADKNYTEDLSKLQSLICGPSFDIASIIPFLEPLSEDTIAGLSVHVLCRTRLKEYEQCIDILLERCPEAVIPYANHELKEENRTLWWKKLLPELCQRIKCGGEKYQLYLSSLKETLSIVAVELELKDFMNVLPEDGTATFFLPYLLYCSRKKPLT

SEQ ID NO: 3682 - protein, 765 aa, Homo sapiens
MAGFKRGYDGKIAGLYDLDKTLGRGHFAVVKLARHVFTGEKVAVKVIDKTKLDTLATGHLFQEVRCMKLVQHPNIVRLYEVIDTQTKLYLILELGDGGDMFDYIMKHEEGLNEDLAKKYFAQIVHAISYCHKLHVVHRDLKPENVVFFEKQGLVKLTDFGFSNKFQPGKKLTTSCGSLAYSAPEILLGDEYDAPAVDIWSLGVILFMLVCGQPPFQEANDSETLTMIMDCKYTVPSHVSKECKDLITRMLQRDPKRRASLEEIENHPWLQGVDPSPATKYNIPLVSYKNLSEEEHNSIIQRMVLGDIADRDAIVEALETNRYNHITATYFLLAERILREKQEKEIQTRSASPSNIKAQFRQSWPTKIDVPQDLEDDLTATPLSHATVPQSPARAADSVLNGHRSKGLCDSAKKDDLPELAGPALSTVPPASLKPTASGRKCLFRVEEDEEEDEEDKKPMSLSTQVVLRRKPSVTNRLTSRKSAPVLNQIFEEGESDDEFDMDENLPPKLSRLKMNIASPGTVHKRYHRRKSQGRGSSCSSSETSDDDSESRRRLDKDSGFTYSWHRRDSSEGPPGSEGDGGGQSKPSNASGGVDKASPSENNAGGGSPSSGSGGNPTNTSGTTRRCAGPSNSMQLASRSAGELVESLKLMSLCLGSQLHGSTKYIIDPQNGLSFSSVKVQEKSTWKMCISSTGNAGQVPAVGGIKFFSDHMADTTTELERIKSKNLKNNVLQLPLCEKTISVNIQRNPKEGLLCASSPASCCHVI

SEQ ID NO: 3683 - protein, 124 aa, Homo sapiens
MRQAGRAALLAALLLLVQLCPGSSQRSPEAAGVQDPSLRWSPGARNQGGGARALLLLLAERFPRRAGPGRLGLGTAGERPRRDNPSLSIDLTFHLLRTLLELARTQSQRERAEQNRIIFDSVGK

SEQ ID NO: 3684 - protein, 65 aa, Homo sapiens [sequence omitted]

SEQ ID NO: 3685 - protein, 154 aa, Homo sapiens
MSKRNQVSYVRPAEPAFLARFKERVGYREGPTVETKRIQPQPPDEDGDHSDKEDEQPQVVVLKKGDLSVEEVMKIKAEIKAAKADEEPTPADGRIIYRKPVKHPSDEKYSGLTASSKKKKPNEDEVNQDSVKKNSQKQIKNSSLLSFDNEDENE

SEQ ID NO: 3686 - protein, 327 aa, Homo sapiens
MADGELNVDSLITRLLEVRGCRPGKIVQMTEAEVRGLCIKSREIFLSQPILLELEAPLKICGDIHGQYTDLLRLFEYGGFPPEANYLFLGDYVDRGKQSLETICLLLAYKIKYPENFFLLRGNHECASINRIYGFYDECKRRFNIKLWKTFTDCFNCLPIAAIVDEKIFCCHGGLSPDLQSMEQIRRIMRPTDVPDTGLLCDLLWSDPDKDVQGWGENDRGVSFTFGADVVSKFLNRHDLDLICRAHQVVEDGYEFFAKRQLVTLFSAPNYCGEFDNAGGMMSVDETLMCSFQILKPSEKKAKYQYGGLNSGRPVTPPRTANPPKKR

SEQ ID NO: 3687 - protein, 327 aa, Homo sapiens
MMLIPTHHFRNIERKPEYLQPEKCVPPPYPGPVGTMWFIRDGCGIACAIVTWFLVLYAEFVVLFVMLIPSRDYVYSIINGIVFNLLAFLALASHCRAMLTDPGAVPKGNATKEFIESLQLKPGQVVYKCPKCCSIKPDRAHHCSVCKRCIRKMDHHCPWVNNCVGENNQKYFVLFTMYIALISLHALIMVGFHFLHCFEEDWTTYGLNREEMAETGISLHEKMQPLNFSSTECSSFSPPTTVILLILLCFEGLLFLIFTSVMFGTQVHSICTDETGIEQLKKEERRWAKKTKWMNMKAVFGHPFSLGWASPFATPDQGKADPYQYVV

SEQ ID NO: 3688 - protein, 836 aa, Homo sapiens
MAGLNCGVSIALLGVLLLGAARLPRGAEAFEIALPRESNITVLIKLGTPTLLAKPCYIVISKRHITMLSIKSGERIVFTFSCQSPENHFVIEIQKNIDCMSGPCPFGEVQLQPSTSLLPTLNRTFIWDVKAHKSIGLELQFSIPRLRQIGPGESCPDGVTHSISGRIDATVVRIGTFCSNGTVSRIKMQEGVKMALHLPWFHPRNVSGFSIANRSSIKRLCIIESVFEGEGSATLMSANYPEGFPEDELMTWQFVVPAHLRASVSFLNFNLSNCERKEERVEYYIPGSTTNPEVFKLEDKQPGNMAGNFNLSLQGCDQDAQSPGILRLQFQVLVQHPQNESNKIYVVDLSNERAMSLTIEPRPVKQSRKFVPGCFVCLESRTCSSNLTLTSGSKHKISFLCDDLTRLWMNVEKTISCTDHRYCQRKSYSLQVPSDILHLPVELHDFSWKLLVPKDRLSLVLVPAQKLQQHTHEKPCNTSFSYLVASAIPSQDLYFGSFCPGGSIKQIQVKQNISVTLRTFAPSFQQEASRQGLTVSFIPYFKEEGVFTVTPDTKSKVYLRTPNWDRGLPSLTSVSWNISVPRDQVACLTFFKERSGVVCQTGRAFMIIQEQRTRAEEIFSLDEDVLPKPSFHHHSFWVNISNCSPTSGKQLDLLFSVTLTPRTVDLTVILIAAVGGGVLLLSALGLIICCVKKKKKKTNKGPAVGIYNDNINTEMPRQPKKFQKGRKDNDSHVYAVIEDTMVYGHLLQDSSGSFLQPEVDTYRPFQGTMGVCPPSPPTICSRAPTAKLATEEPPPRSPPESESEPYTFSHPNNGDVSSKDTDIPLLNTQEPMEPAE

SEQ ID NO: 3689 - protein, 202 aa, Homo sapiens
MELWGAYLLLCLFSLLTQVTTEPPTQKPKKIVNAKKDVVNTKMFEELKSRLDTLAQEVALLKEQQALQTVCLKGTKVHMKCFLAFTQTKTFHEASEDCISRGGTLGTPQTGSENDALYEYLRQSVGNEAEIWLGLNDMAAEGTWVDMTGARIAYKNWETEITAQPDGGKTENCAVLSGAANGKWFDKRCRDQLPYICQFGIV

SEQ ID NO: 3690 - protein, 299 aa, Homo sapiens
MAELGLNEHHQNEVINYMRFARSKRGLRLKTVDSCFQDLKESRLVEDTFTIDEVSEVLNGLQAVVHSEVESELINTAYTNVLLLRQLFAQAEKWYLKLQTDISELENRELLEQVAEFEKAEITSSNKKPILDVTKPKLAPLNEGGTAELLNKEILRLQEENEKLKSRLKTIEIQATNALDEKSKLEKALQDLQLDQGNQKDFIKAQDLSNLENTVAALKSEFQKTLNDKTENQKSLEENLATAKHDLLRVQEQLHMAEKELEKKFQQTAAYRNMKEILTKKNDQIKDLRKRLAQYEPED

SEQ ID NO: 3691 - protein, 1478 aa, Homo sapiens
MASTNAESQLQRIIRDLQDAVTELSKEFQEAGEPITDDSTSLHKFSYKLEYLLQFDQKEKATLLGNKKDYWDYFCACLAKVKGANDGIRFVKSISELRTSLGKGRAFIRYSLVHQRLADTLQQCFMNTKVTSDWYYARSPFLQPKLSSDIVGQLYELTEVQFDLASRGFDLDAAWPTFARRTLTTGSSAYLWKPPSRSSSMSSLVSSYLQTQEMVSNFDLNSPLNNEALEGFDEMRLELDQLEVREKQLRERMQQLDRENQELRAAVSQQGEQLQTERERGRTAAEDNVRLTCLVAELQKQWEVTQATQNTVKELQTCLQGLELGAAEKEEDYHTALRRLESMLQPLAQELEATRDSLDKKNQHLASFPGWLAMAQQKADTASDTKGRQEPIPSDAAQEMQELGEKLQALERERTKVEEVNRQQSAQLEQLVKELQLKEDARASLERLVKEMAPLQEELSGKGQEADQLWRRLQELLAHTSSWEEELAELRREKKQQQEEKELLEQEVRSLTRQLQFLETQLAQVSQHVSDLEEQKKQLIQDKDHLSQQVGMLERLAGPPGPELPVAGEKNEALVPVNSSLQEAWGKPEEEQRGLQEAQLDDTKVQEGSQEEELRQANRELEKELQNVVGRNQLLEGKLQALQADYQALQQRESAIQGSLASLEAEQASIRHLGDQMEASLLAVRKAKEAMKAQMAEKEAILQSKEGECQQLREEVEQCQQLAEARHRELRALESQCQQQTQLIEVLTAEKGQQGVGPPTDNEARELAAQLALSQAQLEVHQGEVQRLQAQVVDLQAKMRAALDDQDKVQSQLSMAEAVLREHKTLVQQLKEQNEALNRAHVQELLQCSEREGALQEERADEAQQREEELRALQEELSQAKCSSEEAQLEHAELQEQLHRANTDTAELGIQVCALTVEKERVEEALACAVQELQDAKEAASREREGLERQVAGLQQEKESLQEKLKAAKAAAGSLPGLQAQLAQAEQRAQSLQEAAHQELNTLKFQLSAEIMDYQSRLKNAGEECKSLRGQLEEQGRQLQAAEEAVEKLKATQADMGEKLSCTSNHLAECQAAMLRKDKEGAALREDLERTQKELEKATTKIQEYYNKLCQEVTNRERNDQKMLADLDDLNRTKKYLEERLIELLRDKDALWQKSDALEFQQKLSAEERWLGDTEANHCLDCKREFSWMVRRHHCRICGRIFCYYCCNNYVLSKHGGKKERCCRACFQKLSEGPGSPDSSGSGTSQGEPSPALSPASPGPQATGGQGANTDYRPPDDAVFDIITDEELCQIQESGSSLPETPTETDSLDPNAAEQDTTSTSLTPEDTEDMPVGQDSEICLLKSGELMIKVPLTVDEIASFGEGSRELFVRSSTYSLIPITVAEAGLTISWVFSSDPKSISFSVVFQEAEDTPLDQCKVLIPTTRCNSHKENIQGQLKVRTPGIYMLIFDNTFSRFVSKKVFYHLTVDRPVIYDGSDFL

SEQ ID NO: 3692 - protein, 371 aa, Homo sapiens
MGHKVVVFDISVIRALWETRVKKHKAWQKKEVERLEKSALEKIKEEWNFVAECRRKGIPQAVYCKNGFIDTSVRLLDKIERNTLTRQSSLPKDRGKRSSAFVFELSGEHWTELPDSLKEQTHLREWYISNTLIQIIPTYIQLFQAMRILDLPKNQISHLPAEIGCLKNLKELNVGFNYLKSIPPELGDCENLERLDCSGNLELMELPFELSNLKQVTFVDISANKFSSVPICVLRMSNLQWLDISSNNLTDLPQDIDRLEELQSFLLYKNKLTYLPYSMLNLKKLTLLVVSGDHLVELPTALCDSSTPLKFVSLMDNPIDNAQCEDGNEIMESERDRQHFDKEVMKAYIEDLKERESVPSYTTKVSFSLQL

SEQ ID NO: 3693 - protein, 266 aa, Homo sapiens
MFVELNNLLNTTPDRAEQGKLTLLCDAKTDGSFLVHHFLSFYLKANCKVCFVALIQSFSHYSIVGQKLGVSLTMARERGQLVFLEGLKSAVDVVFQAQKEPHPLQFLREANAGNLKPLFEFVREALKPVDSGEARWTYPVLLVDDLSVLLSLGMGAVAVLDFIHYCRATVCWELKGNMVVLVHDSGDAEDEENDILLNGLSHQSHLILRAEGLATGFCRDVHGQLRILWRRPSQPAVHRDQSFTYQYKIQDKSVSFFAKGMSPAVL

SEQ ID NO: 3694 - protein, 740 aa, Homo sapiens
MASHLRPPSPLLVRVYKSGPRVRRKLESYFQSSKSSGGGECTVSTQEHEAPGTFRVEFSERAAKERVLKKGEHQILVDEKPVPIFLVPTENSIKKNTRPQISSLTQSQAETPSGDMHQHEGHIPNAVDSCLQKIFLTVTADLNCNLFSKEQRAYITTLCPSIRKMEGHDGIEKVCGDFQDIERIHQFLSEQFLESEQKQQFSPSMTERKPLSQQERDSCISPSEPETKAEQKSNYFEVPLPYFEYFKYICPDKINSIEKRFGVNIEIQESSPNMVCLDFTSSRSGDLEAARESFASEFQKNTEPLKQECVSLADSKQANKFKQELNHQFTKLLIKEKGGELTLLGTQDDISAAKQKISEAFVKIPVKLFAANYMMNVIEVDSAHYKLLETELLQEISEIEKRYDICSKVSEKGQKTCILFESKDRQVDLSVHAYASFIDAFQHASCQLMREVLLLKSLGKERKHLHQTKFADDFRKRHPNVHFVLNQESMTLTGLPNHLAKAKQYVLKGGGMSSLAGKKLKEGHETPMDIDSDDSKAASPPLKGSVSSEASELDKKEKGICVICMDTISNKKVLPKCKHEFCAPCINKAMSYKPICPTCQTSYGIQKGNQPEGSMVFTVSRDSLPGYESFGTIVITYSMKAGIQTEEHPNPGKRYPGIQRTAYLPDNKEGRKVLKLLYRAFDQKLIFTVGYSRVLGVSDVITWNDIHHKTSRFGGPEMYGYPDPSYLKRVKEELKAKGIE

SEQ ID NO: 3695 - protein, 799 aa, Homo sapiens
MPRAPAPLYACLLGLCALLPRLAGLNICTSGSATSCEECLLIHPKCAWCSKEDFGSPRSITSRCDLRANLVKNGCGGEIESPASSFHVLRSLPLSSKGSGSAGWDVIQMTPQEIAVNLRPGDKTTFQLQVRQVEDYPVDLYYLMDLSLSMKDDLDNIRSLGTKLAEEMRKLTSNFRLGFGSFVDKDISPFSYTAPRYQTNPCIGYKLFPNCVPSFGFRHLLPLTDRVDSFNEEVRKQRVSRNRDAPEGGFDAVLQAAVCKEKIGWRKDALHLLVFTTDDVPHIALDGKLGGLVQPHDGQCHLNEANEYTASNQMDYPSLALLGEKLAENNINLIFAVTKNHYMLYKNFTALIPGTTVEILDGDSKNIIQLIINAYNSIRSKVELSVWDQPEDLNLFFTATCQDGVSYPGQRKCEGLKIGDTASFEVSLEARSCPSRHTEHVFALRPVGFRDSLEVGVTYNCTCGCSVGLEPNSARCNGSGTYVCGLCECSPGYLGTRCECQDGENQSVYQNLCREAEGKPLCSGRGDCSCNQCSCFESEFGKIYGPFCECDNFSCARNKGVLCSGHGECHCGECKCHAGYIGDNCNCSTDISTCRGRDGQICSERGHCLCGQCQCTEPGAFGEMCEKCPTCPDACSTKRDCVECLLLHSGKPDNQTCHSLCRDEVITWVDTIVKDDQEAVLCFYKTAKDCVMMFTYVELPSGKSNLTVLREPECGNTPNAMTILLAVVGSILLVGLALLAIWKLLVTIHDRREFAKFQSERSRARYEMASNPLYRKPISTHTVDFTFNKFNKSYNGTVD

SEQ ID NO: 3696 - protein, 191 aa, Homo sapiens
MAMHNKAAPPQIPDTRRELAELVKRKQELAETLANLERQIYAFEGSYLEDTQMYGNIIRGWDRYLTNQKNSNSKNDRRNRKFKEAERLFSKSSVTSAAAVSALAGVQDQLIEKREPGSGTESDTSPDFHNQENEPSQEDPEDLDGSVQGVKPQKAASSTSSGSHHSSHKKRKNKNRHRIDLKLNKKPRADY

SEQ ID NO: 3697 - protein, 396 aa, Homo sapiens
MKAVKSERERGSRRRHRDGDVVLPAGVVVKQERLSPEVAPPAHRRPDHSGGSPSPPTSEPARSGHRGNRARGVSRSPPKKKNKASGRRSKSPRSKRNRSPHHSTVKVKQEREDHPRRGREDRQHREPSEQEHRRARNSDRDRHRGHSHQRRTSNERPGSGQGQGRDRDTQNLQAQEEEREFYNARRREHRQRNDVGGGGSESQELVPRPGGNNKEKEVPAKEKPSFELSGALLEDTNTFRGVVIKYSEPPEARIPKKRWRLYPFKNDEVLPVMYIHRQSAYLLGRHRRIADIPIDHPSCSKQHAVFQYRLVEYTRADGTVGRRVKPYIIDLGSGNGTFLNNKRIEPQRYYELKEKDVLKFGFSSREYVLLHESSDTSEIDRKDDEDEEEEEEVSDS

SEQ ID NO: 3698 - protein, 747 aa, Homo sapiens
MQGGEPVSTMKVSESEGKLEGQATAVTPNKNSSCGGGISSSSSSRGGSAKGWQYSDHMENVYGYLMKYTNLVTGWQYRFFVLNNEAGLLEYFVNEQSRNQKPRGTLQLAGAVISPSDEDSHTFTVNAASGEQYKLRATDAKERQHWVSRLQICTQHHTEAIGKNNPPLKSRSFSLASSSNSPISQRRPSQNAISFFNVGHSKLQSLSKRTNLPPDHLVEVREMMSHAEGQQRDLIRRIECLPTSGHLSSLDQDLLMLKATSMATMNCLNDCFHILQLQHASHQKGSLPSGTTIEWLEPKISLSNHYKNGADQPFATDQSKPVAVPEEQPVAESGLLAREPEEINADDEIEDTCDHKEDDLGAVEEQRSVILHLLSQLKLGMDLTRVVLPTFILEKRSLLEMYADFMSHPDLFIAITNGATAEDRMIRFVEYYLTSFHEGRKGAIAKKPYNPIIGETFHCSWKMPKSEVASSVFSSSSTQGVTNHAPLSGESLTQVGSDCYTVRFVAEQVSHHPPVSGFYAECTERKMCVNAHVWTKSKFLGMSIGVTMVGEGILSLLEHGEEYTFSLPCAYARSILTVPWVELGGKVSVNCAKTGYSASITFHTKPFYGGKLHRVTAEVKHNITNTVVCRVQGEWNSVLEFTYSNGETKYVDLTKLAVTKKRVRPLEKQDPFESRRLWKNVTDSLRESEIDKATEHKHTLEERQRTEERHRTETGTPWKTKYFIKEGDGWVYHKPLWKIIPTTQPAE

SEQ ID NO: 3699 - protein, 416 aa, Homo sapiens
MVDHLLPVDENFSSPKCPVGYLGDRLVGRRAYHMLPSPVSEDDSDASSPCSCSSPDSQALCSCYGGGLGTESQDSILDFLLSQATLGSGGGSGSSIGASSGPVAWGPWRRAAAPVKGEHFCLPEFPLGDPDDVPRPFQPTLEEIEEFLEENMEPGVKEVPEGNSKDLDACSQLSAGPHKSHLHPGSSGRERCSPPPGGASAGGAQGPGGGPTPDGPIPVLLQIQPVPVKQESGTGPASPGQAPENVKVAQLLVNIQGQTFALVPQVVPSSNLNLPSKFVRIAPVPIAAKPVGSGPLGPGPAGLLMGQKFPKNPAAELIKMHKCTFPGCSKMYTKSSHLKAHLRRHTGEKPFACTWPGCGWRFSRSDELSRHRRSHSGVKPYQCPVCEKKFARSDHLSKHIKVHRFPRSSRSVRSVN

SEQ ID NO: 3700 - protein, 451 aa, Homo sapiens
MLRFYLFISLLCLSRSDAEETCPSFTRLSFHSAVVGTGLNVRLMLYTRKNLTCAQTINSSAFGNLNVTKKTTFIVHGFRPTGSPPVWMDDLVKGLLSVEDMNVVVVDWNRGATTLIYTHASSKTRKVAMVLKEFIDQMLAEGASLDDIYMIGVSLGAHISGFVGEMYDGWLGRITGLDPAGPLFNGKPHQDRLDPSDAQFVDVIHSDTDALGYKEPLGNIDFYPNGGLDQPGCPKTILGGFQYFKCDHQRSVYLYLSSLRESCTITAYPCDSYQDYRNGKCVSCGTSQKESCPLLGYYADNWKDHLRGKDPPMTKAFFDTAEESPFCMYHYFVDIITWNKNVRRGDITIKLRDKAGNTTESKINHEPTTFQKYHQVSLLARFNQDLDKVAAISLMFSTGSLIGPRYKLRILRMKLRSLAHPERPQLCRYDLVLMENVETVFQPILCPELQL

SEQ ID NO: 3701 - protein, 607 aa, Homo sapiens
MEAPAAGLFLLLLLGTWAPAPGSASSEAPPLINEDVKRTVDLSSHLAKVTAEVVLAHLGGGSTSRATSFLLALEPELEARLAHLGVQVKGEDEEENNLEVRETKIKGKSGRFFTVKLPVALDPGAKISVIVETVYTHVLHPYPTQITQSEKQFVVFEGNHYFYSPYPTKTQTMRVKLASRNVESYTKLGNPTRSEDLLDYGPFRDVPAYSQDTFKVHYENNSPFLTITSMTRVIEVSHWGNIAVEENVDLKHTGAVLKGPFSRYDYQRQPDSGISSIRSFKTILPAAAQDVYYRDEIGNVSTSHLLILDDSVEMEIRPRFPLFGGWKTHYIVGYNLPSYEYLYNLGDQYALKMRFVDHVFDEQVIDSLTVKIILPEGAKNIEIDSPYEISRAPDELHYTYLDTFGRPVIVAYKKNLVEQHIQDIVVHYTFNKVLMLQEPLLVVAAFYILFFTVIIYVRLDFSITKDPAAEARMKVACITEQVLTLVNKRIGLYRHFDETVNRYKQSRDISTLNSGKKSLETEHKALTSEIALLQSRLKTEGSDLCDRVSEMQKLDAQVKELVLKSAVEAERLVAGKLKKDTYIENEKLISGKRQELVTKIDHILDAL

SEQ ID NO: 3702 - protein, 728 aa, Homo sapiens
MRWLLLYYALCFSLSKASAHTVELNNMFGQIQSPGYPDSYPSDSEVTWNITVPDGFRIKLYFMHFNLESSYLCEYDYVKVETEDQVLATFCGRETTDTEQTPGQEVVLSPGSFMSITFRSDFSNEERFTGFDAHYMAVDVDECKEREDEELSCDHYCHNYIGGYYCSCRFGYILHTDNRTCRVECSDNLFTQRTGVITSPDFPNPYPKSSECLYTIELEEGFMVNLQFEDIFDIEDHPEVPCPYDYIKIKVGPKVLGPFCGEKAPEPISTQSHSVLILFHSDNSGENRGWRLSYRAAGNECPELQPPVHGKIEPSQAKYFFKDQVLVSCDTGYKVLKDNVEMDTFQIECLKDGTWSNKIPTCKIVDCRAPGELEHGLITFSTRNNLTTYKSEIKYSCQEPYYKMLNNNTGIYTCSAQGVWMNKVLGRSLPTCLPECGQPSRSLPSLVKRIIGGRNAEPGLFPWQALIVVEDTSRVPNDKWFGSGALLSASWILTAAHVLRSQRRDTTVIPVSKEHVTVYLGLHDVRDKSGAVNSSAARVVLHPDFNIQNYNHDIALVQLQEPVPLGPHVMPVCLPRLEPEGPAPHMLGLVAGWGISNPNVTVDEIISSGTRTLSDVLQYVKLPVVPHAECKTSYESRSGNYSVTENMFCAGYYEGGKDTCLGDSGGAFVIFDDLSQRWVVQGLVSWGGPEECGSKQVYGVYTKVSNYVDWVWEQMGLPQSVVEPQVER

SEQ ID NO: 3703 - protein, 541 aa, Homo sapiens
MGSQEVLGHAARLASSGLLLQVLFRLITFVLNAFILRFLSKEIVGVVNVRLTLLYSTTLFLAREAFRRACLSGGTQRDWSQTLNLLWLTVPLGVFWSLFLGWIWLQLLEVPDPNVVPHYATGVVLFGLSAVVELLGEPFWVLAQAHMFVKLKVIAESLSVILKSVLTAFLVLWLPHWGLYIFSLAQLFYTTVLVLCYVIYFTKLLGSPESTKLQTLPVSRITDLLPNITRNGAFINWKEAKLTWSFFKQSFLKQILTEGERYVMTFLNVLNFGDQGVYDIVNNLGSLVARLIFQPIEESFYIFFAKVLERGKDATLQKQEDVAVAAAVLESLLKLALLAGLTITVFGFAYSQLALDIYGGTMLSSGSGPVLLRSYCLYVLLLAINGVTECFTFAAMSKEEVDRYNFVMLALSSSFLVLSYLLTRWCGSVGFILANCFNMGIRITQSLCFIHRYYRRSPHRPLAGLHLSPVLLGTFALSGGVTAVSEVFLCCEQGWPARLAHIAVGAFCLGATLGTAFLTETKLIHFLRTQLGVPRRTDKMT

SEQ ID NO: 3704 - protein, 1689 aa, Homo sapiens
MGSKRRRATSPSSSVSGDFDDGHHSVSTPGPSRKRRRLSNLPTVDPIAVCHELYNTIRDYKDEQGRLLCELFIRAPKRRNQPDYYEVVSQPIDLMKIQQKLKMEEYDDVNLLTADFQLLFNNAKSYYKPDSPEYKAACKLWDLYLRTRNEFVQKGEADDEDDDEDGQDNQGTVTEGSSPAYLKEILEQLLEAIVVATNPSGRLISELFQKLPSKVQYPDYYAIIKEPIDLKTIAQRIQNGSYKSIHAMAKDIDLLAKNAKTYNEPGSQVFKDANSIKKIFYMKKAEIEHHEMAKSSLRMRTPSNLAAARLTGPSHSKGSLGEERNPTSKYYRNKRAVQGGRLSAITMALQYGSESEEDAALAAARYEEGESEAESITSFMDVSNPFYQLYDTVRSCRNNQGQLIAEPFYHLPSKKKYPDYYQQIKMPISLQQIRTKLKNQEYETLDHLECDLNLMFENAKRYNVPNSAIYKRVLKLQQVMQAKKKELARRDDIEDGDSMISSATSDTGSAKRKSKKNIRKQRMKILFNVVLEAREPGSGRRLCDLFMVKPSKKDYPDYYKIILEPMDLKIIEHNIRNDKYAGEEGMIEDMKLMFRNARHYNEEGSQVYNDAHILEKLLKEKRKELGPLPDDDDMASPKLKLSRKSGISPKKSKYMTPMQQKLNEVYEAVKNYTDKRGRRLSAIFLRLPSRSELPDYYLTIKKPMDMEKIRSHMMANKYQDIDSMVEDFVMMFNNACTYNEPESLIYKDALVLHKVLLETRRDLEGDEDSHVPNVTLLIQELIHNLFVSVMSHQDDEGRCYSDSLAEIPAVDPNFPNKPPLTFDIIRKNVENNRYRRLDLFQEHMFEVLERARRMNRTDSEIYEDAVELQQFFIKIRDELCKNGEILLSPALSYTTKHLHNDVEKERKEKLPKEIEEDKLKREEEKREAEKSEDSSGAAGLSGLHRTYSQDCSFKNSMYHVGDYVYVEPAEANLQPHIVCIERLWEDSAGEKWLYGCWFYRPNETFHLATRKFLEKEVFKSDYYNKVPVSKILGKCVVMFVKEYFKLCPENFRDEDVFVCESRYSAKTKSFKKIKLWTMPISSVRFVPRDVPLPVVRVASVFANADKGDDEKNTDNSEDSRAEDNFNLEKEKEDVPVEMSNGEPGCHYFEQLHYNDMWLKVGDCVFIKSHGLVRPRVGRIEKVWVRDGAAYFYGPIFIHPEETEHEPTKMFYKKEVFLSNLEETCPMTCILGKCAVLSFKDFLSCRPTEIPENDILLCESRYNESDKQMKKFKGLKRFSLSAKVVDDEIYYFRKPIVPQKEPSPLLEKKIQLLEAKFAELEGGDDDIEEMGEEDSEVIEPPSLPQLQTPLASELDLMPYTPPQSTPKSAKGSAKKEGSKRKINMSGYILFSSEMRAVIKAQHPDYSFGELSRLVGTEWRNLETAKKAEYEERAAKVAEQQERERAAQQQQPSASPRAGTPVGALMGVVPPPTPMGMLNQQLTPVAGMMGGYPPGLPPLQGPVDGLVSMGSMQPLHPGGPPPHHLPPGVPGLPGIPPPGVMNQGVAPMVGTPAPGGSPYGQQVGVLGPPGQQAPPPYPGPHPAGPPVIQQPTTPMFVAPPPKTQRLLHSEAYLKYIEGLSAESNSISKWDQTLAARRRDVHLSKEQESRLPSHWLKSKGAHTTMADALWRLRDLMLRDTLNIRQAYNLENV

SEQ ID NO: 3705 - protein, 526 aa, Homo sapiens
MVAKDYPFYLTVKRANCSLELPPASGPAKDAEEPSNKRVKPLSRVTSLANLIPPVKATPLKRFSQTLQRSISFRSESRPDILAPRPWSRNAAPSSTKRRDSKLWSETFDVCVNQMLTSKEIKRQEAIFELSQGEEDLIEDLKLAKKAYHDPMLKLSIMTEQELNQIFGTLDSLIPLHEELLSQLRDVRKPDGSTEHVGPILVGWLPCLSSYDSYCSNQVAAKALLDHKKQDHRVQDFLQRCLESPFSRKLDLWNFLDIPRSRLVKYPLLLREILRHTPNDNPDQQHLEEAINIIQGIVAEINTKTGESECRYYKERLLYLEEGQKDSLIDSSRVLCCHGELKNNRGVKLHVFLFQEVLVITRAVTHNEQLCYQLYRQPIPVKDLLLEDLQDGEVRLGGSLRGAFSNNERIKNFFRVSFKNGSQSQTHSLQANDTFNKQQWLNCIRQAKETVLCAAGQAGVLDSEGSFLNPTTGSRELQGETKLEQMDQSDSESDCSMDTSEVSLDCERMEQTDSSCGNSRHGESNV

SEQ ID NO: 3706 - protein, 739 aa, Homo sapiens
MAPWLQLCSVFFTVNACLNGSQLAVAAGGSGRARGADTCGWRGVGPASRNSGLYNITFKYDNCTTYLNPVGKHVIADAQNITISQYACHDQVAVTILWSPGALGIEFLKGFRVILEELKSEGRQCQQLILKDPKQLNSSFKRTGMESQPFLNMKFETDYFVKVVPFPSIKNESNYHPFFFRTRACDLLLQPDNLACKPFWKPRNLNISQHGSDMQVSFDHAPHNFGFRFFYLHYKLKHEGPFKRKTCKQEQTTETTSCLLQNVSPGDYIIELVDDTNTTRKVMHYALKPVHSPWAGPIRAVAITVPLVVISAFATLFTVMCRKKQQENIYSHLDEESSESSTYTAALPRERLRPRPKVFLCYSSKDGQNHMNVVQCFAYFLQDFCGCEVALDLWEDFSLCREGQREWVIQKIHESQFIIVVCSKGMKYFVDKKNYKHKGGGRGSGKGELFLVAVSAIAEKLRQAKQSSSAALSKFIAVYFDYSCEGDVPGILDLSTKYRLMDNLPQLCSHLHSRDHGLQEPGQHTRQGSRRNYFRSKSGRSLYVAICNMHQFIDEEPDWFEKQFVPFHPPPLRYREPVLEKFDSGLVLNDVMCKPGPESDFCLKVEAAVLGATGPADSQHESQHGGLDQDGEARPALDGSAALQPLLHTVKAGSPSDMPRDSGIYDSSVPSSELSLPLMEGLSTDQTETSSLTESVSSSSGLGEEEPPALPSKLLSSGSCKADLGCRSYTDELHAVAPL

SEQ ID NO: 3707 - protein, 340 aa, Homo sapiens
MEPGRTQIKLDPRYTADLLEVLKTNYGIPSACFSQPPTAAQLLRALGPVELALTSILTLLALGSIAIFLEDAVYLYKNTLCPIKRRTLLWKSSAPTVVSVLCCFGLWIPRSLVLVEMTITSFYAVCFYLLMLVMVEGFGGKEAVLRTLRDTPMMVHTGPCCCCCPCCPRLLLTRKKLQLLMLGPFQYAFLKITLTLVGLFLVPDGIYDPADISEGSTALWINTFLGVSTLLALWTLGIISRQARLHLGEQNMGAKFALFQVLLILTALQPSIFSVLANGGQIACSPPYSSKTRSQVMNCHLLILETFLMTVLTRMYYRRKDHKVGYETFSSPDLDLNLKA

SEQ ID NO: 3708 - protein, 489 aa, Homo sapiens
MAAHGGSAASSALKGLIQQFTTITGASESVGKHMLEACNNNLEMAVTMFLDGGGIAEEPSTSSASVSTVRPHTEEEVRAPIPQKQEILVEPEPLFGAPKRRRPARSIFDGFRDFQTETIRQEQELRNGGAIDKKLTTLADLFRPPIDLMHKGSFETAKECGQMQNKWLMINIQNVQDFACQCLNRDVWSNEAVKNIIREHFIFWQVYHDSEEGQRYIQFYKLGDFPYVSILDPRTGQKLVEWHQLDVSSFLDQVTGFLGEHGQLDGLSSSPPKKCARSESLIDASEDSQLEAAIRASLQETHFDSTQTKQDSRSDEESESELFSGSEEFISVCGSDEEEEVENLAKSRKSPHKDLGHRKEENRRPLTEPPVRTDPGTATNHQGLPAVDSEILEMPPEKADGVVEGIDVNGPKAQLMLRYPDGKREQITLPEQAKLLALVKHVQSKGYPNERFELLTNFPRRKLSHLDYDITLQEAGLCPQETVFVQERN

SEQ ID NO: 3709 - protein, 276 aa, Homo sapiens
LAARVAAVRAAAWLLLGAATGLTRGPAAAFTAARSDAGIRAMCSEIILRQEVLKDGFHRDLLIKVKFGESIEDLHTCRLLIKQDIPAGLYVDPYELASLRERNITEAVMVSENFDIEAPNYLSKESEVLIYARRDSQCIDCFQAFLPVHCRYHRPHSEDGEASIVVNNPDLLMFCDQAGSRRMIRFRFDSFDKTIEFPILKCWAHSEVAAPCALENEDICQWNKMKYKSVYKNVILQVPVGLTVHTSLVCSVTLLITILCSTLILVAVFKYGHFSL

SEQ ID NO: 3710 - protein, 738 aa, Homo sapiens
MRGPSGALWLLLALRTVLGGMEVRWCATSDPEQHKCGNMSEAFREAGIQPSLLCVRGTSADHCVQLIAAQEADAITLDGGAIYEAGKEHGLKPVVGEVYDQEVGTSYYAVAVVRRSSHVTIDTLKGVKSCHTGINRTVGWNVPVGYLVESGRLSVMGCDVLKAVSDYFGGSCVPGAGETSYSESLCRLCRGDSSGEGVCDKSPLERYYDYSGAFRCLAEGAGDVAFVKHSTVLENTDGKTLPSWGQALLSQDFELLCRDGSRADVTEWRQCHLARVPAHAVVVRADTDGGLIFRLLNEGQRLFSHEGSSFQMFSSEAYGQKDLLFKDSTSELVPIATQTYEAWLGHEYLHAMKGLLCDPNRLPPYLRWCVLSTPEIQKCGDMAVAFRRQRLKPEIQCVSAKSPQHCMERIQAEQVDAVTLSGEDIYTAGKTYGLVPAAGEHYAPEDSSNSYYVVAVVRRDSSHAFTLDELRGKRSCHAGFGSPAGWDVPVGALIQRGFIRPKDCDVLTAVSEFFNASCVPVNNPKNYPSSLCALCVGDEQGRNKCVGNSQERYYGYRGAFRCLVENAGDVAFVRHTTVFDNTNGHNSEPWAAELRSEDYELLCPNGARAEVSQFAACNLAQIPPHAVMVRPDTNIFTVYGLLDKAQDLFGDDHNKNGFKMFDSSNYHGQDLLFKDATVRAVPVGEKTTYRGWLGLDYVAALEGMSSQQCSGAAAPAPGAPLLPLLLPALAARLLPPAL

SEQ ID NO: 3711 - protein, 302 aa, Homo sapiens
MRGPSGALWLLLALRTVLGGMEVRWCATSDPEQHKCGNMSEAFREAGIQPSLLCVRGTSADHCVQLIAAQEADAITLDGGAIYEAGKEHGLKPVVGEVYDQEVGTSYYAVAVVRRSSHVTIDTLKGVKSCHTGINRTVGWNVPVGYLVESGRLSVMGCDVLKAVSDYFGGSCVPGAGETSYSESLCRLCRGDSSGEGVCDKSPLERYYDYSGAFRCLAEGAGDVAFVKHSTVLENTDESPSRRQTWTRSEEEEGECPAHEEARRTMRSSAGQAWKWAPVHRPQDESDKGEFGKRAKSRDMLG

SEQ ID NO: 3712 - protein, 373 aa, Homo sapiens
MAETREEETVSAEASGFSDLSDSEFLEFLDLEDAQESKALVNMPGPSSESLGKDDKPISLQNWKRGLDILSPMERFHLKYLYVTDLATQNWCELQTAYGKELPGFLAPEKAAVLDTGASIHLARELELHDLVTVPVTTKEDAWAIKFLNILLLIPTLQSEGHIREFPVFGEGEGVLLVGVIDELHYTAKGELELAELKTRRRPMLPLEAQKKKDCFQVSLYKYIFDAMVQGKVTPASLIHHTKLCLEKPLGPSVLRHAQQGGFSVKSLGDLMELVFLSLTLSDLPVIDILKIEYIHQETATVLGTEIVAFKEKEVRAKVQHYMAYWMGHREPQGVDVEEAWKCRTCTYADICEWRKGSGVLSSTLAPQVKKAK

SEQ ID NO: 3713 - protein, 736 aa, Homo sapiens
MAVRALKLLTTLLAVVAAASQAEVESEAGWGMVTPDLLFAEGTAAYARGDWPGVVLSMERALRSRAALRALRLRCRTQCAADFPWELDPDWSPSPAQASGAAALRDLSFFGGLLRRAACLRRCLGPPAAHSLSEEMELEFRKRSPYNYLQVAYFKINKLEKAVAAAHTFFVGNPEHMEMQQNLDYYQTMSGVKEADFKDLETQPHMQEFRLGVRLYSEEQPQEAVPHLEAALQEYFVAYEECRALCEGPYDYDGYNYLEYNADLFQAITDHYIQVLNCKQNCVTELASHPSREKPFEDFLPSHYNYLQFAYYNIGNYTQAVECAKTYLLFFPNDEVMNQNLAYYAAMLGEEHTRSIGPRESAKEYRQRSLLEKELLFFAYDVFGIPFVDPDSWTPEEVIPKRLQEKQKSERETAVRISQEIGNLMKEIETLVEEKTKESLDVSRLTREGGPLLYEGISLTMNSKLLNGSQRVVMDGVISDHECQELQRLTNVAATSGDGYRGQTSPHTPNEKFYGVTVFKALKLGQEGKVPLQSAHLYYNVTEKVRRIMESYFRLDTPLYFSYSHLVCRTAIEEVQAERKDDSHPVHVDNCILNAETLVCVKEPPAYTFRDYSAILYLNGDFDGGNFYFTELDAKTVTAEVQPQCGRAVGFSSGTENPHGVKAVTRGQRCAIALWFTLDPRHSERDRVQADDLVKMLFSPEEMDLSQEQPLDAQQGPPEPAQESLSGSESKPKDEL

SEQ ID NO: 3714 - protein, 478 aa, Homo sapiens
MASTTTCTRFTDEYQLFEELGKGAFSVVRRCMKIPTGQEYAAKIINTKKLSARDHQKLEREARICRLLKHPNIVRLHDSISEEGFHYLVFDLVTGGELFEDIVAREYYSEADASHCIQQILESVNHCHLNGIVHRDLKPENLLLASKSKGAAVKLADFGLAIEVQGDQQAWFGFAGTPGYLSPEVLRKDPYGKPVDMWACGVILYILLVGYPPFWDEDQHRLYQQIKAGAYDFPSPEWDTVTPEAKDLINKMLTINPAKRITASEALKHPWICQRSTVASMMHRQETVDCLKKFNARRKLKGAILTTMLATRNFSAAKSLLKKPDGVKESTESSNTTIEDEDVKARKQEIIKVTEQLIEAINNGDFEAYTKICDPGLTAFEPEALGNLVEGMDFHRFYFENALSKSNKPIHTIILNPHVHLVGDDAACIAYIRLTQYMDGSGMPKTMQSEETRVWHRRDGKWQNVHFHRSGSPTVPIK

SEQ ID NO: 3715 - protein, 386 aa, Homo sapiens [sequence omitted]

SEQ ID NO: 3716 - protein, 374 aa, Homo sapiens
MANEVIKCKAAVAWEAGKPLSIEEIEVAPPKAHEVRIKIIATAVCHTDAYTLSGADPEGCFPVILGHEGAGIVESVGEGVTKLKAGDTVIPLYIPQCGECKFCLNPKTNLCQKIRVTQGKGLMPDGTSRFTCKGKTILHYMGTSTFSEYTVVADISVAKIDPLAPLDKVCLLGCGISTGYGAAVNTAKLEPGSVCAVFGLGGVGLAVIMGCKVAGASRIIGVDINKDKFARAKEFGATECINPQDFSKPIQEVLIEMTDGGVDYSFECIGNVKVMRAALEACHKGWGVSVVVGVAASGEEIATRPFQLVTGRTWKGTAFGGWKSVESVPKLVSEYMSKKIKVDEFVTHNLSFDEINKAFELMHSGKSIRTVVKI

SEQ ID NO: 3717 - protein, 128 aa, Homo sapiens
MAGGKAGKDSGKAKTKAVSRSQRAGLQFPVGRIHRHLKSRTTSHGRVGATAAVYSAAILEYLTAEVLELAGNASKDLKVKRITPRHLQLAIRGDEELDSLIKATIAGGGVIPHIHKSLIGKKGQQKTV

SEQ ID NO: 3718 - protein, 261 aa, Homo sapiens
MELLQVTILFLLPSICSSNSTGVLEAANNSLVVTTTKPSITTPNTESLQKNVVTPTTGTTPKGTITNELLKMSLMSTATFLTSKDEGLKATTTDVRKNDSIISNVTVTSVTLPNAVSTLQSSKPKTETQSSIKTTEIPGSVLQPDASPSKTGTLTSIPVTIPENTSQSQVIGTEGGKNASTSATSRSYSSIILPVVIALIVITLSVFVLVGLYRMCWKADPGTPENGNDQPQSDKESVKLLTVKTISHESGEHSAQGKTKN

SEQ ID NO: 3719 - protein, 245 aa, Homo sapiens
MGRLDGKVIILTAAAQGIGQAAALAFAREGAKVIATDINESKLQELEKYPGIQTRVLDVTKKKQIDQFANEVERLDVLFNVAGFVHHGTVLDCEEKDWDFSMNLNVRSMYLMIKAFLPKMLAQKSGNIINMSSVASSVKGVVNRCVYSTTKAAVIGLTKSVAADFIQQGIRCNCVCPGTVDTPSLQERIQARGNPEEARNDFLKRQKTGRFATAEEIAMLCVYLASDESAYVTGNPVIIDGGWSL

SEQ ID NO: 3720 - protein, 223 aa, Homo sapiens
MAAGDGDVKLGTLGSGSESSNDGGSESPGDAGAAAEGGGWAAAALALLTGGGEMLLNVALVALVLLGAYRLWVRWGRRGLGAGAGAGEESPATSLPRMKKRDFSLEQLRQYDGSRNPRILLAVNGKVFDVTKGSKFYGPAGPYGIFAGRDASRGLATFCLDKDALRDEYDDLSDLNAVQMESVREWEMQFKEKYDYVGRLLKPGEEPSEYTDEEDTKDHNKQD

SEQ ID NO: 3721 - protein, 2135 aa, Homo sapiens
MPALGPALLQALWAGWVLTLQPLPPTAFTPNGTYLQHLARDPTSGTLYLGATNFLFQLSPGLQLEATVSTGPVLDSRDCLPPVMPDECPQAQPTNNPNQLLLVSPGALVVCGSVHQGVCEQRRLGQLEQLLLRPERPGDTQYVAANDPAVSTVGLVAQGLAGEPLLFVGRGYTSRGVGGGIPPITTRALWPPDPQAAFSYEETAKLAVGRLSEYSHHFVSAFARGASAYFLFLRRDLQAQSRAFRAYVSRVCLRDQHYYSYVELPLACEGGRYGLIQAAAVATSREVAHGEVLFAAFSSAAPPTVGRPPSAAAGASGASALCAFPLDEVDRLANRTRDACYTREGRAEDGTEVAYIEYDVNSDCAQLPVDTLDAYPCGSDHTPSPMASRVPLEATPILEWPGIQLTAVAVTMEDGHTIAFLGDSQGQLHRVYLGPGSDGHPYSTQSIQQGSAVSRDLTFDGTFEHLYVMTQSTLLKVPVASCAQHLDCASCLAHRDPYCGWCVLLGRCSRRSECSRGQGPEQWLWSFQPELGCLQVAAMSPANISREETREVFLSVPDLPPLWPGESYSCHFGEHQSPALLTGSGVMCPSPDPSEAPVLPRGADYVSVSVELRFGAVVIAKTSLSFYDCVAVTELRPSAQCQACVSSRWGCNWCVWQHLCTHKASCDAGPMVASHQSPLVSPDPPARGGPSPSPPTAPKALATPAPDTLPVEPGAPSTATASDISPGASPSLLSPWGPWAGSGSISSPGSTGSPLHEEPSPPSPQNGPGTAVPAPTDFRPSATPEDLLASPLSPSEVAAVPPADPGPEALHPTVPLDLPPATVPATTFPGAMGSVKPALDWLTREGGELPEADEWTGGDAPAFSTSTLLSGDGDSAELEGPPAPLILPSSLDYQYDTPGLWELEEATLGASSCPCVESVQGSTLMPVHVEREIRLLGRNLHLFQDGPGDNECVMELEGLEVVVEARVECEPPPDTQCHVTCQQHQLSYEALQPELRVGLFLRRAGRLRVDSAEGLHVVLYDCSVGHGDCSRCQTAMPQYGCVWCEGERPRCVTREACGEAEAVATQCPAPLIHSVEPLTGPVDGGTRVTIRGSNLGQHVQDVLGMVTVAGVPCAVDAQEYEVSSSLVCITGASGEEVAGATAVEVPGRGRGVSEHDFAYQDPKVHSIFPARGPRAGGTRLTLNGSKLLTGRLEDIRVVVGDQPCHLLPEQQSEQLRCETSPRPTPATLPVAVWFGATERRLQRGQFKYTLDPNITSAGPTKSFLSGGREICVRGQNLDVVQTPRIRVTVVSRMLQPSQGLGRRRRVVPETACSLGPSCSSQQFEEPCHVNSSQLITCRTPALPGLPEDPWVRVEFILDNLVFDFATLNPTPFSYEADPTLQPLNPEDPTMPFRHKPGSVFSVEGENLDLAMSKEEVVAMIGDGPCVVKTLTRHHLYCEPPVEQPLPRHHALREAPDSLPEFTVQMGNLRFSLGHVQYDGESPGAFPVAAQVGLGVGTSLLALGVIIIVLMYRRKSKQALRDYKKVQIQLENLESSVRDRCKKEFTDLMTEMTDLTSDLLGSGIPFLDYKVYAERIFFPGHRESPLHRDLGVPESRRPTVEQGLGQLSNLLNSKLFLTKFIHTLESQRTFSARDRAYVASLLTVALHGKLEYFTDILRTLLSDLVAQYVAKNPKLMLRRTETVVEKLLTNWMSICLYTFVRDSVGEPLYMLFRGIKHQVDKGPVDSVTGKAKYTLNDNRLLREDVEYRPLTLNALLAVGPGAGEAQGVPVKVLDCDTISQAKEKMLDQLYKGVPLTQRPDPRTLDVEWRSGVAGHLILSDEDVTSEVQGLWRRLNTLQHYKVPDGATVALVPCLTKHVLRENQDYVPGERTPMLEDVDEGGIRPWHLVKPSDEPEPPRPRRGSLRGGERERAKAIPEIYLTRLLSMKGTLQKFVDDLFQVILSTSRPVPLAVKYFFDLLDEQAQQHGISDQDTIHIWKTNSLPLRFWINIIKNPQFVFDVQTSDNMDAVLLVIAQTFMDACTLADHKLGRDSPINKLLYARDIPRYKRMVERYYADIRQTVPASDQEMNSVLAELSWNYSGDLGARVALHELYKYINKYYDQIITALEEDGTAQKMQLGYRLQQIAAAVENKVTDL

SEQ ID NO: 3722 - protein, 240 aa, Homo sapiens
MTAPVPAPRILLPLLLLLLLTPPPGARGEVCMASRGLSLFPESCPDFCCGTCDDQYCCSDVLKKFVWSEERCAVPEASVPASVEPVEQLGSALRFRPGYNDPMSGFGATLAVGLTIFVLSVVTIIICFTCSCCCLYKTCRRPRPVVTTTTSTTVVHAPYPQPPSVPPSYPGPSYQGYHTMPPQPGMPAAPYPMQYPPPYPAQPMGPPAYHETLAGGAAAPYPASQPPYNPAYMDAPKAAL

SEQ ID NO: 3723 - protein, 382 aa, Homo sapiens
MSHIQIPPGLTELLQGYTVEVLRQQPPDLVEFAVEYFTRLREARAPASVLPAATPRQSLGHPPPEPGPDRVADAKGDSESEEDEDLEVPVPSRFNRRVSVCAETYNPDEEEEDTDPRVIHPKTDEQRCRLQEACKDILLFKNLDQEQLSQVLDAMFERIVKADEHVIDQGDDGDNFYVIERGTYDILVTKDNQTRSVGQYDNRGSFGELALMYNTPRAATIVATSEGSLWGLDRVTFRRIIVKNNAKKRKMFESFIESVPLLKSLEVSERMKIVDVIGEKIYKDGERIITQTKSNKDGGNQEVEIARCHKGQYFGELALVTNKPRAASAYAVGDVKCLVMDVQAFERLLGPCMDIMKRNISHYEEQLVKMFGSSVDLGNLGQ

SEQ ID NO: 3724 - protein, 732 aa, Homo sapiens
MERQVLLSEPEEAAALYRGLSRQPALSAACLGPEVTTQYGGQYRTVHTEWTQRDLERMENIRFCRQYLVFHDGDSVVFAGPAGNSVETRGELLSRESPSGTMKAVLRKAGGTGPGEEKQFLEVWEKNRKLKSFNLSALEKHGPVYEDDCFGCLSWSHSETHLLYVAEKKRPKAESFFQTKALDVSASDDEIARLKKPDQAIKGDQFVFYEDWGENMVSKSIPVLCVLDVESGNISVLEGVPENVSPGQAFWAPGDAGVVFVGWWHEPFRLGIRFCTNRRSALYYVDLIGGKCELLSDDSLAVSSPRLSPDQCRIVYLQYPSLIPHHQCSQLCLYDWYTKVTSVVVDVVPRQLGENFSGIYCSLLPLGCWSADSQRVVFDSAQRSRQDLFAVDTQVGTVTSLTAGGSGGSWKLLTIDQDLMVAQFSTPSLPPTLKVGFLPSAGKEQSVLWVSLEEAEPIPDIHWGIRVLQPPPEQENVQYAGLDFEAILLQPGSPPDKTQVPMVVMPHGGPHSSFVTAWMLFPAMLCKMGFAVLLVNYRGSTGFGQDSILSLPGNVGHQDVKDVQFAVEQVLQEEHFDASHVALMGGSHGGFISCHLIGQYPETYRACVARNPVINIASMLGSTDIPDWCVVEAGFPFSSDCLPDLSVWAEMLDKSPIRYIPQVKTPLLLMLGQEDRRVPFKQGMEYYRALKTRNVPVRLLLYPKSTHALSEVEVESDSFMNAVLWLRTHLGS

SEQ ID NO: 3725 - protein, 839 aa, Homo sapiens
MSVVGIDLGFLNCYIAVARSGGIETIANEYSDRCTPACISLGSRTRAIGNAAKSQIVTNVRNTIHGFKKLHGRSFDDPIVQTERIRLPYELQKMPNGSAGVKVRYLEEERPFAIEQVTGMLLAKLKETSENALKKPVADCVISIPSFFTDAERRSVMAAAQVAGLNCLRLMNETTAVALAYGIYKQDLPPLDEKPRNVVFIDMGHSAYQVLVCAFNKGKLKVLATTFDPYLGGRNFDEALVDYFCDEFKTKYKINVKENSRALLRLYQECEKLKKLMSANASDLPLNIECFMNDLDVSSKMNRAQFEQLCASLLARVEPPLKAVMEQANLQREDISSIEIVGGATRIPAVKEQITKFFLKDISTTLNADEAVARGCALQCAILSPAFKVREFSITDLVPYSITLRWKTSFEDGSGECEVFCKNHPAPFSKVITFHKKEPFELEAFYTNLHEVPYPDARIGSFTIQNVFPQSDGDSSKVKVKVRVNIHGIFSVASASVIEKQNLEGDHSDAPMETETSFKNENKDNMDKMQVDQEEGHQKCHAEHTPEEEIDHTGAKTKSAVSDKQDRLNQTLKKGKVKSIDLPIQSSLCRQLGQDLLNSYIENEGKMIMQDKLEKERNDAKNAVEEYVYDFRDRLGTVYEKFITPEDLSKLSAVLEDTENWLYEDGEDQPKQVYVDKLQELKKYGQPIQMKYMEHEERPKALNDLGKKIQLVMKVIEAYRNKDERYDHLDPTEMEKVEKCISDAMSWLNSKMNAQNKLSLTQDPVVKVSEIVAKSKELDNFCNPIIYKPKPKAEVPEDKPKANSEHNGPMDGQSGTETKSDSTKDSSQHTKSSGEMEVD

SEQ ID NO: 3726 - protein, 518 aa, Homo sapiens
MAGLRNESEQEPLLGDTPGSREWDILETEEHYKSRWRSIRILYLTMFLSSVGFSVVMMSIWPYLQKIDPTADTSFLGWVIASYSLGQMVASPIFGLWSNYRPRKEPLIVSILISVAANCLYAYLHIPASHNKYYMLVARGLLGIGAGNVAVVRSYTAGATSLQERTSSMANISMCQALGFILGPVFQTCFTFLGEKGVTWDVIKLQINMYTTPVLLSAFLGILNIILILAILREHRVDDSGRQCKSINFEEASTDEAQVPQGNIDQVAVVAINVLFFVTLFIFALFETIITPLTMDMYAWTQEQAVLYNGIILAALGVEAVVIFLGVKLLSKKIGERAILLGGLIVVWVGFFILLPWGNQFPKIQWEDLHNNSIPNTTFGEIIIGLWKSPMEDDNERPTGCSIEQAWCLYTPVIHLAQFLTSAVLIGLGYPVCNLMSYTLYSKILGPKPQGVYMGWLTASGSGARILGPMFISQVYAHWGPRWAFSLVCGIIVLTITLLGVVYKRLIALSVRYGRIQE

SEQ ID NO: 3727 - protein, 1400 aa, Homo sapiens
MELLPPLPQSFLLLLLLPAKPAAGEDWQCPRTPYAASRDFDVKYVVPSFSAGGLVQAMVTYEGDRNESAVFVAIRNRLHVLGPDLKSVQSLATGPAGDPGCQTCAACGPGPHGPPGDTDTKVLVLDPALPALVSCGSSLQGRCFLHDLEPQGTAVHLAAPACLFSAHHNRPDDCPDCVASPLGTRVTVVEQGQASYFYVASSLDAAVAASFSPRSVSIRRLKADASGFAPGFVALSVLPKHLVSYSIEYVHSFHTGAFVYFLTVQPASVTDDPSALHTRLARLSATEPELGDYRELVLDCRFAPKRRRRGAPEGGQPYPVLRVAHSAPVGAQLATELSIAEGQEVLFGVFVTGKDGGPGVGPNSVVCAFPIDLLDTLIDEGVERCCESPVHPGLRRGLDFFQSPSFCPNPPGLEALSPNTSCRHFPLLVSSSFSRVDLFNGLLGPVQVTALYVTRLDNVTVAHMGTMDGRILQVELVRSLNYLLYVSNFSLGDSGQPVQRDVSRLGDHLLFASGDQVFQVPIQGPGCRHFLTCGRCLRAWHFMGCGWCGNMCGQQKECPGSWQQDHCPPKLTEFHPHSGPLRGSTRLTLCGSNFYLHPSGLVPEGTHQVTVGQSPCRPLPKDSSKLRPVPRKDFVEEFECELEPLGTQAVGPTNVSLTVTNMPPGKHFRVDGTSVLRGFSFMEPVLIAVQPLFGPRAGGTCLTLEGQSLSVGTSRAVLVNGTECLLARVSEGQLLCATPPGATVASVPLSLQVGGAQVPGSWTFQYREDPVVLSISPNCGYINSHITICGQHLTSAWHLVLSFHDGLRAVESRCERQLPEQQLCRLPEYVVRDPQGWVAGNLSARGDGAAGFTLPGFRFLPPPHPPSANLVPLKPEEHAIKFEYIGLGAVADCVGINVTVGGESCQHEFRGDMVVCPLPPSLQLGQDGAPLQVCVDGECHILGRVVRPGPDGVPQSTLLGILLPLLLLVAALATALVFSYWWRRKQLVLPPNLNDLASLDQTAGATPLPILYSGSDYRSGLALPAIDGLDSTTCVHGASFSDSEDESCVPLLRKESIQLRDLDSALLAEVKDVLIPHERVVTHSDRVIGKGHFGVVYHGEYIDQAQNRIQCAIKSLSRITEMQQVEAFLREGLLMRGLNHPNVLALIGIMLPPEGLPHVLLPYMCHGDLLQFIRSPQRNPTVKDLISFGLQVARGMEYLAEQKFVHRDLAARNCMLDESFTVKVADFGLARDILDREYYSVQQHRHARLPVKWMALESLQTYRFTTKSDVWSFGVLLWELLTRGAPPYRHIDPFDLTHFLAQGRRLPQPEYCPDSLYQVMQQCWEADPAVRPTFRVLVGEVEQIVSALLGDHYVQLPATYMNLGPSTSHEMNVRPEQPQFSPMPGNVRRPRPLSEPPRPT

SEQ ID NO: 3728 - protein, 435 aa, Homo sapiens
MGSLLALLALLLLWGAVAEGPAKKVLTLEGDLVLGGLFPVHQKGGPAEDCGPVNEHRGIQRLEAMLFALDRINRDPHLLPGVRLGAHILDSCSKDTHALEQALDFVRASLSRGADGSRHICPDGSYATHGDAPTAITGVIGGSYSDVSIQVANLLRLFQIPQISYASTSAKLSDKSRYDYFARTVPPDFFQAKAMAEILRFFNWTYVSTVASEGDYGETGIEAFELEARARNICVATSEKVGRAMSRAAFEGVVRALLQKPSARVAVLFTRSEDARELLAASQRLNASFTWVASDGWGALESVVAGSEGAAEGAITIELASYPISDFASYFQSLDPWNNSRNPWFREFWEQRFRCSFRQRDCAAHSLRAVPFEQESKIMFVVNAVYAMAHALHNMHRALCPNTTRLCDAMRPVNGRRLYKDFVLNVKFDGDLKVS

SEQ ID NO: 3729 - protein, 313 aa, Homo sapiens
MKLTDSVLRSFRVAKVFRENSDKINCFDFSPNGETVISSSDDDSIVLYDCQEGKPKRTLYSKKYGVDLIRYTHAANTVVYSSNKIDDTIRYLSLHDNKYIRYFPGHSKRVVALSMSPVDDTFISGSLDKTIRLWDLRSPNCQGLMHLQGKPVCSFDPEGLIFAAGVNSEMVKLYDLRSFDKGPFATFKMQYDRTCEWTGLKFSNDGKLILISTNGSFIRLIDAFKGVVMHTFGGYANSKAVTLEASFTPDSQFIMIGSEDGKIHVWNGESGIKVAVLDGKHTGPITCLQFNPKFMTFASACSNMAFWLPTIDD

SEQ ID NO: 3730 - protein, 875 aa, Homo sapiens
MTLARFVLALMLGALPEVVGFDSVLNDSLHHSHRHSPPAGPHYPYYLPTQQRPPRTRPPPPLPRFPRPPRALPAQRPHALQAGHTPRPHPWGCPAGEPWVSVTDFGAPCLRWAEVPPFLERSPPASWAQLRGQRHNFCRSPDGAGRPWCFYGDARGKVDWGYCDCRHGSVRLRGGKNEFEGTVEVYASGVWGTVCSSHWDDSDASVICHQLQLGGKGIAKQTPFSGLGLIPIYWSNVRCRGDEENILLCEKDIWQGGVCPQKMAAAVTCSFSHGPTFPIIRLAGGSSVHEGRVELYHAGQWGTVCDDQWDDADAEVICRQLGLSGIAKAWHQAYFGEGSGPVMLDEVRCTGNELSIEQCPKSSWGEHNCGHKEDAGVSCTPLTDGVIRLAGGKGSHEGRLEVYYRGQWGTVCDDGWTELNTYVVCRQLGFKYGKQASANHFEESTGPIWLDDVSCSGKETRFLQCSRRQWGRHDCSHREDVSIACYPGGEGHRLSLGFPVRLMDGENKKEGRVEVFINGQWGTICDDGWTDKDAAVICRQLGYKGPARARTMAYFGEGKGPIHVDNVKCTGNERSLADCIKQDIGRHNCRHSEDAGVICDYFGKKASGNSNKESLSSVCGLRLLHRRQKRIIGGKNSLRGGWPWQVSLRLKSSHGDGRLLCGATLLSSCWVLTAAHCFKRYGNSTRSYAVRVGDYHTLVPEEFEEEIGVQQIVIHREYRPDRSDYDIALVRLQGPEEQCARFSSHVLPACLPLWRERPQKTASNCYITGWGDTGRAYSRTLQQAAIPLLPKRFCEERYKGRFTGRMLCAGNLHEHKRVDSCQGDSGGPLMCERPGESWVVYGVTSWGYGCGVKDSPGVYTKVSAFVPWIKSVTKL

SEQ ID NO: 3731 - protein, 209 aa, Homo sapiens
MGKGDPNKPRGKMSSYAFFVQTCREEHKKKHPDSSVNFAEFSKKCSERWKTMSAKEKSKFEDMAKSDKARYDREMKNYVPPKGDKKGKKKDPNAPKRPPSAFFLFCSEHRPKIKSEHPGLSIGDTAKKLGEMWSEQSAKDKQPYEQKAAKLKEKYEKDIAAYRAKGKSEAGKKGPGRPTGSKKKNEPEDEEEEEEEEDEDEEEEDEDEE

SEQ ID NO: 3732 - protein, 220 aa, Homo sapiens
MNGFTPDEMSRGGDAAAAVAAVVAAAAAAASAGNGTGAGTGAEVPGAGAVSAAGPPGAAGPGPGQLCCLREDGERCGRAAGNASFSKRIQKSISQKKVKIELDKSARHLYICDYHKNLIQSVRNRRKRKGSDDDGGDSPVQDIDTPEVDLYQLQVNTLRRYKRHFKLPTRPGLNKAQLVEIVGCHFRSIPVNEKDTLTYFIYSVKNDKNKSDLKVDSGVH

SEQ ID NO: 3733 - protein, 98 aa, Homo sapiens
MKLMVLVFTIGLTLLLGVQAMPANRLSCYRKILKDHNCHNLPEGVADLTQIDVNVQDHFWDGKGCEMICYCNFSELLCCPKDVFFGPKISFVIPCNNQ

SEQ ID NO: 3734 - protein, 205 aa, Homo sapiens
MALQLSREQGITLRGSAEIVAEFFSFGINSILYQRGIYPSETFTRVQKYGLTLLVTTDLELIKYLNNVVEQLKDWLYKCSVQKLVVVISNIESGEVLERWQFDIECDKTAKDDSAPREKSQKAIQDEIRSVIRQITATVTFLPLLEVSCSFDLLIYTDKDLVVPEKWEESGPQFITNSEEVRLRSFTTTIHKVNSMVAYKIPVND

SEQ ID NO: 3735 - protein, 320 aa, Homo sapiens
MAQVLRGTVTDFPGFDERADAETLRKAMKGLGTDEESILTLLTSRSNAQRQEISAAFKTLFGRDLLDDLKSELTGKFEKLIVALMKPSRLYDAYELKHALKGAGTNEKVLTEIIASRTPEELRAIKQVYEEEYGSSLEDDVVGDTSGYYQRMLVVLLQANRDPDAGIDEAQVEQDAQALFQAGELKWGTDEEKFITIFGTRSVSHLRKVFDKYMTISGFQIEETIDRETSGNLEQLLLAVVKSIRSIPAYLAETLYYAMKGAGTDDHTLIRVMVSRSEIDLFNIRKEFRKNFATSLYSMIKGDTSGDYKKALLLLCGEDD

SEQ ID NO: 3736 - protein, 390 aa, Homo sapiens
MATGDLKRSLRNLEQVLRLLNYPEEVDCVGLIKGDPAASLPIISYSFTSYSPYVTELIMESNVELIAKNDLRFIDAVYKLLRDQFNYKPILTKKQFIQCGFAEWKIQIVCDILNCVMKKHKELSSLQKIPSQQRKKISSGKSEPPLGNEKISAEAVGVDISGRFMTSGKKKAVVIRHLYNEDNVDISEDTLSPITDVNEAVDVSDLNATEIKMPEVKVPEIKAEQQDVNVNPEITALQTMLAECQENLKKLTSIEKRLDCLEQKMKGKVMVDENTWTNLLSRVTLLETEMLLSKKNDEFIEFNEVSEDYASCSDMDLLNPHRKSEVERPASIPLSSGYSTASSDSTPRASTVNYCGLNEISEETTIQKMERMKKMFEETAELLKCPNHYL

SEQ ID NO: 3737 - protein, 883 aa, Homo sapiens
MQKIMHISVLLSPVLWGLIFGVSSNSIQIGGLFPRGADQEYSAFRVGMVQFSTSEFRLTPHIDNLEVANSFAVTNAFCSQFSRGVYAIFGFYDKKSVNTITSFCGTLHVSFITPSFPTDGTHPFVIQMRPDLKGALLSLIEYYQWDKFAYLYDSDRGLSTLQAVLDSAAEKKWQVTAINVGNINNDKKDEMYRSLFQDLELKKERRVILDCERDKVNDIVDQVITIGKHVKGYHYIIANLGFTDGDLLKIQFGGANVSGFQIVDYDDSLVSKFIERWSTLEEKEYPGAHTTTIKYTSALTYDAVQVMTEAFRNLRKQRIEISRRGNAGDCLANPAVPWGQGVEIERALKQVQVEGLSGNIKFDQNGKRINYTINIMELKTNGPRKIGYWSEVDKMVVTLTELPSGNDTSGLENKTVVVTTILESPYVMMKKNHEMLEGNERYEGYCVDLAAEIAKHCGFKYKLTIVGDGKYGARDADTKIWNGMVGELVYGKADIAIAPLTITLVREEVIDFSKPFMSLGISIMIKKPQKSKPGVFSFLDPLAYEIWMCIVFAYIGVSVVLFLVSRFSPYEWHTEEFEDGRETQSSESTNEFGIFNSLWFSLGAFMQQGCDISPRSLSGRIVGGVWWFFTLIIISSYTANLAAFLTVERMVSPIESAEDLSKQTEIAYGTLDSGSTKEFFRRSKIAVFDKMWTYMRSAEPSVFVRTTAEGVARVRKSKGKYAYLLESTMNEYIEQRKPCDTMKVGGNLDSKGYGIATPKGSSLRTPVNLAVLKLSEQGVLDKLKNKWWYDKGECGAKDSGSKEKTSALSLSNVAGVFYILVGGLGLAMLVALIEFCYKSRAEAKRMKVAKNAQNINPSSSQNSQNFATYKEGYNVYGIESVKI

SEQ ID NO: 3738 - protein, 345 aa, Homo sapiens
MSNNGADLTFGYISCFVAILLFGSNFVPLKKFDTGDGMFLQWVLCAAIWLVALVVNLILHCPKFWPFAMLGGCIWATGNIAVVPIIKTIGLGLGILIWGSFNALTGWASSRFGWFGLDAEEVSNPLLNYIGAGLSVVSAFIFLFIKSEIPNNTCSMDTTPLITEHVINTTQDPCSWVDKLSTVHHRIVGCSLAVISGVLYGSTFVPIIYIKDHSKRNDSIYAGASQYDLDYVFAHFSGIFLTSTVYFLAYCIAMKNSPKLYPEAVLPGFLSGVLWAIATCCWFIANHSLSAVVSFPIITAGPGFIAAMWGIFMFKEIKGLQNYLLMILAFCIILTGALCTAFSKI

SEQ ID NO: 3739 - protein, 519 aa, Homo sapiens
MTCPDKPGQLINWFICSLCVPRVRKLWSSRRPRTRRNLLLGTACAIYLGFLVSQVGRASLQHGQAAEKGPHRSRDTAEPSFPEIPLDGTLAPPESQGNGSTLQPNVVYITLRSKRSKPANIRGTVKPKRRKKHAVASAAPGQEALVGPSLQPQEAAREADAVAPGYAQGANLVKIGERPWRLVRGPGVRAGGPDFLQPSSRESNIRIYSESAPSWLSKDDIRRMRLLADSAVAGLRPVSSRSGARLLVLEGGAPGAVLRCGPSPCGLLKQPLDMSEVFAFHLDRILGLNRTLPSVSRKAEFIQDGRPCPIILWDASLSSASNDTHSSVKLTWGTYQQLLKQKCWQNGRVPKPESGCTEIHHHEWSKMALFDFLLQIYNRLDTNCCGFRPRKEDACVQNGLRPKCDDQGSAALAHIIQRKHDPRHLVFIDNKGFFDRSEDNLNFKLLEGIKEFPASAVSVLKSQHLRQKLLQSLFLDKVYWESQGGRQGIEKLIDVIEHRAKILITYINAHGVKVLPMNE

SEQ ID NO: 3740 - protein, 866 aa, Homo sapiens
MPAVSLPPKENALFKRILRCYEHKQYRNGLKFCKQILSNPKFAEHGETLAMKGLTLNCLGKKEEAYELVRRGLRNDLKSHVCWHVYGLLQRSDKKYDEAIKCYRNALKWDKDNLQILRDLSLLQIQMRDLEGYRETRYQLLQLRPAQRASWIGYAIAYHLLEDYEMAAKILEEFRKTQQTSPDKVDYEYSELLLYQNQVLREAGLYREALEHLCTYEKQICDKLAVEETKGELLLQLCRLEDAADVYRGLQERNPENWAYYKGLEKALKPANMLERLKIYEEAWTKYPRGLVPRRLPLNFLSGEKFKECLDKFLRMNFSKGCPPVFNTLRSLYKDKEKVAIIEELVVGYETSLKSCRLFNPNDDGKEEPPTTLLWVQYYLAQHYDKIGQPSIALEYINTAIESTPTLIELFLVKAKIYKHAGNIKEAARWMDEAQALDTADRFINSKCAKYMLKANLIKEAEEMCSKFTREGTSAVENLNEMQCMWFQTECAQAYKAMNKFGEALKKCHEIERHFIEITDDQFDFHTYCMRKITLRSYVDLLKLEDVLRQHPFYFKAARIAIEIYLKLHDNPLTDENKEHEADTANMSDKELKKLRNKQRRAQKKAQIEEEKKNAEKEKQQRNQKKKKDDDDEEIGGPKEELIPEKLAKVETPLEEAIKFLTPLKNLVKNKIETHLFAFEIYFRKEKFLLMLQSVKRAFAIDSSHPWLHECMIRLFNTAVCESKDLSDTVRTVLKQEMNRLFGATNPKNFNETFLKRNSDSLPHRLSAAKMVYYLDPSSQKRAIELATTLDESLTNRNLQTCMEVLEALYDGSLGDCKEAAEIYRANCHKLFPYALAFMPPGYEEDMKITVNGDSSAEAEELANEI

SEQ ID NO: 3741 - protein, 766 aa, Homo sapiens
MASTRSIELEHFEERDKRPRPGSRRGAPSSSGGSSSSGPKGNGLIPSPAHSAHCSFYRTRTLQALSSEKKAKKARFYRNGDRYFKGLVFAISSDRFRSFDALLIELTRSLSDNVNLPQGVRTIYTIDGSRKVTSLDELLEGESYVCASNEPFRKVDYTKNINPNWSVNIKGGTSRALAAASSVKSEVKESKDFIKPKLVTVIRSGVKPRKAVRILLNKKTAHSFEQVLTDITEAIKLDSGVVKRLCTLDGKQVTCLQDFFGDDDVFIACGPEKFRYAQDDFVLDHSECRVLKSSYSRSSAVKYSGSKSPGPSRRSKSPASVNGTPSSQLSTPKSTKSSSSSPTSPGSFRGLKQISAHGRSSSNVNGGPELDRCISPEGVNGNRCSESSTLLEKYKIGKVIGDGNFAVVKECIDRSTGKEFALKIIDKAKCCGKEHLIENEVSILRRVKHPNIIMLVEEMETATELFLVMELVKGGDLFDAITSSTKYTERDGSAMVYNLANALRYLHGLSIVHRDIKPENLLVCEYPDGTKSLKLGDFGLATVVEGPLYTVCGTPTYVAPEIIAETGYGLKVDIWAAGVITYILLCGFPPFRSENNLQEDLFDQILAGKLEFPAPYWDNITDSAKELISQMLQVNVEARCTAGQILSHPWVSDDASQENNMQAEVTGKLKQHFNNALPKQNSTTTGVSVIMNTALDKEGQIFCSKHCQDSGRPGMEPISPVPPSVEEIPVPGEAVPAPTPPESPTPHPPPAAPGGERAGTWRRHRD

SEQ ID NO: 3742 - protein, 373 aa, Homo sapiens
MAQESPKNSAAEIPVTSNGEVDDSREHSFNRDLKHSLPSGLGLSETQITSHGFDNTKEGVIEAGAFQGSPAPPLPSVMSPSRVAASRLAQQGSDLIVPAGGQRTQTKSGPVILADEIKNPAMEKLELVRKWSLNTYKCTRQIISEKLGRGSRTVDLELEAQIDILRDNKKKYENILKLAQTLSTQLFQMVHTQRQLGDAFADLSLKSLELHEEFGYNADTQKLLAKNGETLLGAINFFIASVNTLVNKTIEDTLMTVKQYESARIEYDAYRTDLEELNLGPRDANTLPKIEQSQHLFQAHKEKYDKMRNDVSVKLKFLEENKVKVLHNQLVLFHNAIAAYFAGNQKQLEQTLKQFHIKLKTPGVDAPSWLEEQ

SEQ ID NO: 3743 - protein, 700 aa, Homo sapiens
MLKMLSFKLLLLAVALGFFEGDAKFGERNEGSGARRRRCLNGNPPKRLKRRDRRMMSQLELLSGGEMLCGGFYPRLSCCLRSDSPGLGRLENKIFSVTNNTECGKLLEEIKCALCSPHSQSLFHSPEREVLERDLVLPLLCKDYCKEFFYTCRGHIPGFLQTTADEFCFYYARKDGGLCFPDFPRKQVRGPASNYLDQMEEYDKVEEISRKHKHNCFCIQEVVSGLRQPVGALHSGDGSQRLFILEKEGYVKILTPEGEIFKEPYLDIHKLVQSGIKGGDERGLLSLAFHPNYKKNGKLYVSYTTNQERWAIGPHDHILRVVEYTVSRKNPHQVDLRTARVFLEVAELHRKHLGGQLLFGPDGFLYIILGDGMITLDDMEEMDGLSDFTGSVLRLDVDTDMCNVPYSIPRSNPHFNSTNQPPEVFAHGLHDPGRCAVDRHPTDININLTILCSDSNGKNRSSARILQIIKGKDYESEPSLLEFKPFSNGPLVGGFVYRGCQSERLYGSYVFGDRNGNFLTLQQSPVTKQWQEKPLCLGTSGSCRGYFSGHILGFGEDELGEVYILSSSKSMTQTHNGKLYKIVDPKRPLMPEECRATVQPAQTLTSECSRLCRNGYCTPTGKCCCSPGWEGDFCRTAKCEPACRHGGVCVRPNKCLCKKGYLGPQCEQVDRNIRRVTRAGILDQIIDMTSYLLDLTSYIV

SEQ ID NO: 3744 - protein, 599 aa, Homo sapiens
MADKLTRIAIVNHDKCKPKKCRQECKKSCPVVRMGKLCIEVTPQSKIAWISETLCIGCGICIKKCPFGALSIVNLPSNLEKETTHRYCANAFKLHRLPIPRPGEVLGLVGTNGIGKSTALKILAGKQKPNLGKYDDPPDWQEILTYFRGSELQNYFTKILEDDLKAIIKPQYVDQIPKAAKGTVGSILDRKDETKTQAIVCQQLDLTHLKERNVEDLSGGELQRFACAVVCIQKADIFMFDEPSSYLDVKQRLKAAITIRSLINPDRYIIVVEHDLSVLDYLSDFICCLYGVPSAYGVVTMPFSVREGINIFLDGYVPTENLRFRDASLVFKVAETANEEEVKKMCMYKYPGMKKKMGEFELAIVAGEFTDSEIMVMLGENGTGKTTFIRMLAGRLKPDEGGEVPVLNVSYKPQKISPKSTGSVRQLLHEKIRDAYTHPQFVTDVMKPLQIENIIDQEVQTLSGGELQRVALALCLGKPADVYLIDEPSAYLDSEQRLMAARVVKRFILHAKKTAFVVEHDFIMATYLADRVIVFDGVPSKNTVANSPQTLLAGMNKFLSQLEITFRRDPNNYRPRINKLNSIKDVEQKKSGNYFFLDD

SEQ ID NO: 3745 - protein, 80 aa, Homo sapiens
MSLRKQTPSDFLKQIIGRPVVVKLNSGVDYRGVLACLDGYMNIALEQTEEYVNGQLKNKYGDAFIRGNNVLYISTQKRRM

SEQ ID NO: 3746 - protein, 438 aa, Homo sapiens
MPCTCTWRNWRQWIRPLVAVIYLVSIVVAVPLCVWELQKLEVGIHTKAWFIAGIFLLLTIPISLWVILQHLVHYTQPELQKPIIRILWMVPIYSLDSWIALKYPGIAIYVDTCRECYEAYVIYNFMGFLTNYLTNRYPNLVLILEAKDQQKHFPPLCCCPPWAMGEVLLFRCKLGVLQYTVVRPFTTIVALICELLGIYDEGNFSFSNAWTYLVIINNMSQLFAMYCLLLFYKVLKEELSPIQPVGKFLCVKLVVFVSFWQAVVIALLVKVGVISEKHTWEWQTVEAVATGLQDFIICIEMFLAAIAHHYTFSYKPYVQEAEEGSCFDSFLAMWDVSDIRDDISEQVRHVGRTVRGHPRKKLFPEDQDQNEHTSLLSSSSQDAISIASSMPPSPMGHYQGFGHTVTPQTTPTTAKISDEILSDTIGEKKEPSDKSVDS

SEQ ID NO: 3747 - protein, 1181 aa, Homo sapiens
MGPERTGAAPLPLLLVLALSQGILNCCLAYNVGLPEAKIFSGPSSEQFGYAVQQFINPKGNWLLVGSPWSGFPENRMGDVYKCPVDLSTATCEKLNLQTSTSIPNVTEMKTNMSLGLILTRNMGTGGFLTCGPLWAQQCGNQYYTTGVCSDISPDFQLSASFSPATQPCPSLIDVVVVCDESNSIYPWDAVKNFLEKFVQGLDIGPTKTQVGLIQYANNPRVVFNLNTYKTKEEMIVATSQTSQYGGDLTNTFGAIQYARKYAYSAASGGRRSATKVMVVVTDGESHDGSMLKAVIDQCNHDNILRFGIAVLGYLNRNALDTKNLIKEIKAIASIPTERYFFNVSDEAALLEKAGTLGEQIFSIEGTVQGGDNFQMEMSQVGFSADYSSQNDILMLGAVGAFGWSGTIVQKTSHGHLIFPKQAFDQILQDRNHSSYLGYSVAAISTGESTHFVAGAPRANYTGQIVLYSVNENGNITVIQAHRGDQIGSYFGSVLCSVDVDKDTITDVLLVGAPMYMSDLKKEEGRVYLFTIKEGILGQHQFLEGPEGIENTRFGSAIAALSDINMDGFNDVIVGSPLENQNSGAVYIYNGHQGTIRTKYSQKILGSDGAFRSHLQYFGRSLDGYGDLNGDSITDVSIGAFGQVVQLWSQSIADVAIEASFTPEKITLVNKNAQIILKLCFSAKFRPTKQNNQVAIVYNITLDADGFSSRVTSRGLFKENNERCLQKNMVVNQAQSCPEHIIYIQEPSDVVNSLDLRVDISLENPGTSPALEAYSETAKVFSIPFHKDCGEDGLCISDLVLDVRQIPAAQEQPFIVSNQNKRLTFSVTLKNKRESAYNTGIVVDFSENLFFASFSLPVDGTEVTCQVAASQKSVACDVGYPALKREQQVTFTINFDFNLQNLQNQASLSFQALSESQEENKADNLVNLKIPLLYDAEIHLTRSTNINFYEISSDGNVPSIVHSFEDVGPKFIFSLKVTTGSVPVSMATVIIHIPQYTKEKNPLMYLTGVQTDKAGDISCNADINPLKIGQTSSSVSFKSENFRHTKELNCRTASCSNVTCWLKDVHMKGEYFVNVTTRIWNGTFASSTFQTVQLTAAAEINTYNPEIYVIEDNTVTIPLMIMKPDEKAEVPTGVIIGSIIAGILLLLALVAILWKLGFFKRKYEKMTKNPDEIDETTELSS

SEQ ID NO: 3748 - protein, 480 aa, Homo sapiens
MKRSVAVWLLVGLSLGVPQFGKGDICDPNPCENGGICLPGLADGSFSCECPDGFTDPNCSSVVEVASDEEEPTSAGPCTPNPCHNGGTCEISEAYRGDTFIGYVCKCPRGFNGIHCQHNINECEVEPCKNGGICTDLVANYSCECPGEFMGRNCQYKCSGPLGIEGGIISNQQITASSTHRALFGLQKWYPYYARLNKKGLINAWTAAENDRWPWIQINLQRKMRVTGVITQGAKRIGSPEYIKSYKIAYSNDGKTWAMYKVKGTNEDMVFRGNIDNNTPYANSFTPPIKAQYVRLYPQVCRRHCTLRMELLGCELSGCSEPLGMKSGHIQDYQITASSIFRTLNMDMFTWEPRKARLDKQGKVNAWTSGHNDQSQWLQVDLLVPTKVTGIITQGAKDFGHVQFVGSYKLAYSNDGEHWTVYQDEKQRKDKVFQGNFDNDTHRKNVIDPPIYARHIRILPWSWYGRITLRSELLGCTEEE

SEQ ID NO: 3749 - protein, 169 aa, Homo sapiens
MGWSQDLFRALWRSLSREVKEHVGTDQFGNKYYYIPQYKNWRGQTIREKRIVEAANKKEVDYEAGDIPTEWEAWIRRTRKTPPTMEEILKNEKHREEIKIKSQDFYEKEKLLSKETSEELLPPPVQTQIKGHASAPYFGKEEPSVAPSSTGKTFQPGSWMPRDGKSHNQ

SEQ ID NO: 3750 - protein, 695 aa, Homo sapiens
MSGAALGLEIVFVFFLALFLLHRYGDFKKQHRLVIIGTLLAWYLCFLIVFILPLDVSTTIYNRCKHAAANSSPPENSNITGLYATANPVPSQHPCFKPWSYIPDGIMPIFWRVVYWTSQFLTWILLPFMQSYARSGGFSITGKIKTALIENAIYYGTYLLIFGAFLIYVAVNPHLHLEWNQLQTIGIAAANTWGLFLLVLLLGYGLVEIPRSYWNGAKRGYLLMKTYFKAAKLMTEKADAEENLEDAMEEVRKVNESIKYNHPLRKCVDTILKKCPTEYQEKMGRNMDDYEDFDEKHSIYPSEKSLVKLHKQVIYSVQRHRRTQVQWQILLEQAFYLEDVAKNETSATHQFVHTFQSPEPENRFIQYFYNPTFEWYWECLLRPWFYKILAVVLSIFSVIVVWSECTFFSTTPVLSLFAVFIQLAEKTYNYIYIEIACFLSIFFLSICVYSTVFRIRVFNYYYLASHHQTDAYSLLFSGMLFCRLTPPLCLNFLGLTHMDSSISHKNTQPTAYTSIMGSMKVLSFIADGFYIYYPMLVVILCIATYFSLGTRCLNLLGFQQFMGDDDMTSDLVNEGKELIRKEKRKRQRQEEGENRRREWKERYGHNREDSTRNRNIHTDPKESNFSDVNTNRSAFKYTRANNRTERDRIELLQDAEPLDFNAETFTDDPLESESGRYQPGGRYLSMSRSDIFNDV

SEQ ID NO: 3751 - protein, 374 aa, Homo sapiens
MKALIFAAAGLLLLLPTFCQSGMENDTNNLAKPTLPIKTFRGAPPNSFEEFPFSALEGWTGATITVKIKCPEESASHLHVKNATMGYLTSSLSTKLIPAIYLLVFVVGVPANAVTLWMLFFRTRSICTTVFYTNLAIADFLFCVTLPFKIAYHLNGNNWVFGEVLCRATTVIFYGNMYCSILLLACISINRYLAIVHPFTYRGLPKHTYALVTCGLVWATVFLYMLPFFILKQEYYLVQPDITTCHDVHNTCESSSPFQLYYFISLAFFGFLIPFVLIIYCYAAIIRTLNAYDHRWLWYVKASLLILVIFTICFAPSNIILIIHHANYYYNNTDGLYFIYLIALCLGSLNSCLDPFLYFLMSKTRNHSTAYLTK

SEQ ID NO: 3752 - protein, 245 aa, Homo sapiens
MANEAYPCPCDIGHRLEYGGLGREVQVEHIKAYVTKSPVDAGKAVIVIQDIFGWQLPNTRYIADMISGNGYTTIVPDFFVGQEPWDPSGDWSIFPEWLKTRNAQKIDREISAILKYLKQQCHAQKIGIVGFCWGGTAVHHLMMKYSEFRAGVSVYGIVKDSEDIYNLKNPTLFIFAENDVVIPLKDVSLLTQKLKEHCKVEYQIKTFSGQTHGFVHRKREDCSPADKPYIDEARRNLIEWLNKYM

SEQ ID NO: 3753 - protein, 445 aa, Homo sapiens
MMEESGIETTPPGTPPPNPAGLAATAMSSTPVPLAATSSFSSPNVSSMESFPPLAYSTPQPPLPPVRPSAPLPFVPPPAVPSVPPLVTSMPPPVSPSTAAAFGNPPVSHFPPSTSAPNTLLPAPPSGPPISGFSVGSTYDITRGHAGRAPQTPLMPSFSAPSGTGLLPTPITQQASLTSLAQGTGTTSAITFPEEQEDPRITRGQDEASAGGIWGFIKGVAGNPMVKSVLDKTKHSVESMITTLDPGMAPYIKSGGELDIVVTSNKEVKVAAVRDAFQEVFGLAVVVGEAGQSNIAPQPVGYAAGLKGAQERIDSLRRTGVIHEKQTAVSVENFIAELLPDKWFDIGCLVVEDPVHGIHLETFTQATPVPLEFVQQAQSLTPQDYNLRWSGLLVTVGEVLEKSLLNVSRTDWHMAFTGMSRRQMIYSAARAIAGMYKQRLPPRTV

SEQ ID NO: 3754 - protein, 143 aa, Homo sapiens [sequence omitted]

SEQ ID NO: 3755 - protein, 459 aa, Homo sapiens
MLRWLIGGGREPQGLAEKSPLQTIGEEQTQNPYTELLVLKAHHDIVRFLVQLDDYRFASAGDDGIVVVWNAQTGEKLLELNGHTQKITAIITFPSLESCEEKNQLILTASADRTVIVWDGDTTRQVQRISCFQSTVKCLTVLQRLDVWLSGGNDLCVWNRKLDLLCKTSHLSDTGISALVEIPKNCVVAAVGKELIIFRLVAPTEGSLEWDILEVKRLLDHQDNILSLINVNDLSFVTGSHVGELIIWDALDWTMQAYERNFWDPSPQLDTQQEIKLCQKSNDISIHHFTCDEENVFAAVGRGLYVYSLQMKRVIACQKTAHDSNVLHVARLPNRQLISCSEDGSVRIWELREKQQLAAEPVPTGFFNMWGFGRVSKQASQPVKKQQENATSCSLELIGDLIGHSSSVEMFLYFEDHGLVTCSADHLIILWKNGERESGLRSLRLFQKLEENGDLYLAV

SEQ ID NO: 3756 - protein, 175 aa, Homo sapiens
MAAVSMSVVLRQTLWRRRAVAVAALSVSRVPTRSLRTSTWRLAQDQTQDTQLITVDEKLDITTLTGVPEEHIKTRKVRIFVPARNNMQSGVNNTKKWKMEFDTRERWENPLMGWASTADPLSNMVLTFSTKEDAVSFAEKNGWSYDIEERKVPKPKSKSYGANFSWNKRTRVSTK

SEQ ID NO: 3757 - protein, 93 aa, Homo sapiens
MKLVTIFLLVTISLCSYSATAFLINKVPLPVDKLAPLPLDNILPFMDPLKLLLKTLGISVEHLVEGLRKCVNELGPEASEAVKKLLEALSHLV

SEQ ID NO: 3758 - protein, 79 aa, Homo sapiens
MKVTGIFLLSALALLSLSGNTGADSLGREAKCYNELNGCTKIYDPVCGTDGNTYPNECVLCFENRKRQTSILIQKSGPC

SEQ ID NO: 3759 - protein, 943 aa, Homo sapiens
MGPRKKSVKTCIMNNEIPEEMTADETKDYMNQLSHEVLCHIFRYLPLQDIMCMECLSRKLKEAVTLYLRVVRVVDLCAGRWWEYMPSGFTDASFLTLLKKMPDVEQLYGLHPRYLERRRVRGHEAFSIPGVLEALQACPNLVGVETSHLELVESIWTYMPHVHILGKFRNRNGAFPIPPENKLKIPIGAKIQTLHLVGVNVPEIPCIPMLRHLYMKWVRLTKPQPFKDFLCISLRTFVMRNCAGPTNSLKYVPLVTGLASARNLEHLEMVRVPFLGGLIQHVVEDSWRSGGFRNLHTIVLGACKNALEVDLGYLIITAARRLHEVRIQPSLTKDGVFSALKMAELEFPQFETLHLGYVDEFLLQSRMANADLVKYGLADVVENPGIITDIGMKAVNEVFSCIKYLAIYNCPHLHNPYNWISDHSRWTRLVDINLVRCHALKLDSFGQFIELLPSLEFISLDQMFREPPKGCARVGLSAGTGIGVSSALVSNQNSNNDDNNAQNNNANIHDNNHHHPDDSDEENDFRQDLQPGEQQFAADALNEMEDIVQEDGEVVAESGNNTPAHSQAIIPVDVDEEQAGPSGLQRVVKPTSITVHDSESDDEEDSLELQEVWIPKNGTRRYSEREEKTGESVQSRELSEVAKTKPRHAMKRKRTADKSTSTSDPVIEDDHVQVLVLKSKNLVGVTMTNCGITDLVLKDCPKMMFIHATRCRVLKHLKVENAPIVNRFDYAQCKKLNMDQVLDQILRMPPERNRIIYLRPMQQVDTLTLEQKLFSGPYPYHICIIHEFSNPPNVRNKVRIRSWMDTIANINQELIKYEFFPEATRSEEDLKKYPKYPWGREIYTLEGVVDGAPYSMISDFPWLRSLRAAEPNSFARYDFEDDEESTIYAPRRKGQLSADICMETIGEEISEMRQMKKGVFQRVVAIFIHYCDVNGEPVEDDYI

SEQ ID NO: 3760 - protein, 1098 aa, Homo sapiens
MAERGGDGGESERFNPGELRMAQQQALRFRGPAPPPNAVMRGPPPLMRPPPPFGMMRGPPPPPRPPFGRPPFDPNMPPMPPPGGIPPPMGPPHLQRPPFMPPPMSSMPPPPGMMFPPGMPPVTAPGTPALPPTEEIWVENKTPDGKVYYYNARTRESAWTKPDGVKVIQQSELTPMLAAQAQVQAQAQAQAQAQAQAQAQAQAQAQAQAQAQAQAQAQAQAQAQAQAQAQAQAQAQAQAQAQVQAQVQAQVQAQAVGASTPTTSSPAPAVSTSTSSSTPSSTTSTTTTATSVAQTVSTPTTQDQTPSSAVSVATPTVSVSTPAPTATPVQTVPQPHPQTLPPAVPHSVPQPTTAIPAFPPVMVPPFRVPLPGMPIPLPGVAMMQIVSCPYVKTVATTKTGVLPGMAPPIVPMIHPQVAIAASPATLAGATAVSEWTEYKTADGKTYYYNNRTLESTWEKPQELKEKEKLEEKIKEPIKEPSEEPLPMETEEEDPKEEPIKEIKEEPKEEEMTEEEKAAQKAKPVATAPIPGTPWCVVWTGDERVFFYNPTTRLSMWDRPDDLIGRADVDKIIQEPPHKKGMEELKKLRHPTPTMLSIQKWQFSMSAIKEEQELMEEINEDEPVKAKKRKRDDNKDIDSEKEAAMEAEIKAARERAIVPLEARMKQFKDMLLERGVSAFSTWEKELHKIVFDPRYLLLNPKERKQVFDQYVKTRAEEERREKKNKIMQAKEDFKKMMEEAKFNPRATFSEFAAKHAKDSRFKAIEKMKDREALFNEFVAAARKKEKEDSKTRGEKIKSDFFELLSNHHLDSQSRWSKVKDKVESDPRYKAVDSSSMREDLFKQYIEKIAKNLDSEKEKELERQARIEASLREREREVQKARSEQTKEIDREREQHKREEAIQNFKALLSDMVRSSDVSWSDTRRTLRKDHRWESGSLLEREEKEKLFNEHIEALTKKKREHFRQLLDETSAITLTSTWKEVKKIIKEDPRCIKFSSSDRKKQREFEEYIRDKYITAKADFRTLLKETKFITYRSKKLIQESDQHLKDVEKILQNDKRYLVLDCVPEERRKLIVAYVDDLDRRGPPPPPTASEPTRRSTK

SEQ ID NO: 3761 - protein, 768 aa, Homo sapiens
MDRGQVLEQLLPELTGLLSLLDHEYLSDTTLEKKMAVASILQSLQPLPAKEVSYLYVNTADLHSGPSFVESLFEEFDCDLSDLRDMPEDDGEPSKGASPELAKSPRLRNAADLPPPLPNKPPPEDYYEEALPLGPGKSPEYISSHNGCSPSHSIVDGYYEDADSSYPATRVNGELKSSYNDSDAMSSSYESYDEEEEEGKSPQPRHQWPSEEASMHLVRECRICAFLLRKKRFGQWAKQLTVIREDQLLCYKSSKDRQPHLRLALDTCSIIYVPKDSRHKRHELRFTQGATEVLVLALQSREQAEEWLKVIREVSKPVGGAEGVEVPRSPVLLCKLDLDKRLSQEKQTSDSDSVGVGDNCSTLGRRETCDHGKGKKSSLAELKGSMSRAAGRKITRIIGFSKKKTLADDLQTSSTEEEVPCCGYLNVLVNQGWKERWCRLKCNTLYFHKDHMDLRTHVNAIALQGCEVAPGFGPRHPFAFRILRNRQEVAILEASCSEDMGRWLGLLLVEMGSRVTPEALHYDYVDVETLTSIVSAGRNSFLYARSCQNQWPEPRVYDDVPYEKMQDEEPERPTGAQVKRHASSCSEKSHRVDPQVKVKRHASSANQYKYGKNRAEEDARRYLVEKEKLEKEKETIRTELIALRQEKRELKEAIRSSPGAKLKALEEAVATLEAQCRAKEERRIDLELKLVAVKERLQQSLAGGPALGLSVSSKPKSGETANKPQNSVPEQPLPVNCVSELRKRSPSIVASNQGRVLQKAKEWEMKKT

SEQ ID NO: 3762 - protein, 90 aa, Homo sapiens
MEPLAAYPLKCSGPRAKVFAVLLSIVLCTVTLFLLQLKFLKPKINSFYAFEVKDAKGRTVSLEKYKGKILQRRNQGGIFGSILSTLRVKL

SEQ ID NO: 3763 - protein, 521 aa, Homo sapiens
MANKGNKKRRQFSLEEKMKVVGAVDSGKRKGDVAKEFGITPSTLSTFLKDRTKFEEKVREASVGPQRKRMRSALYDDIDKAVFAWFQEIHAKNILVTGSVIRKKALNLANMLGYDNFQASVGWLNRFRDRHGIALKAVCREDSDRLMNGLGIDKINEWHAGEIIKLIADYSPDDIFNADETGVFFQLLPQHTLAAKGDHCRGGKKAKQRLTALFCCNASGTEKMRPLIVGRSASPHCLKNIHSLPCDYRANQWAWMTRDLFNEWLMQVDARMKRAERRILLLIDNCSAHNMLPHLERIQVGYLPSNCTAVLQPLNLGIIHTMKVLYQSHLLKQILLKLNSSEDQEEVDIKQAIDMIAAAWWSVKPSTVVKCWQKAGIVPMEFAECDTESAASEPDIAIEKLWHTVAIATCVPNEVNFQDFVTADDDLIISQDTDIIQDMVAGENTSEAGSEDEGEVSLPEQPKVTITEAISSVQKLRQFLSTCVDIPDAIFGQLNGIDEYLMKRVTQTLIDSKITDFLQTK

SEQ ID NO: 3764 - protein, 440 aa, Homo sapiens
MAVKLGTLLLALALGLAQPASARRKLLVFLLDGFRSDYISDEALESLPGFKEIVSRGVKVDYLTPDFPSLSYPNYYTLMTGRHCEVHQMIGNYMWDPTTNKSFDIGVNKDSLMPLWWNGSEPLWVTLTKAKRKVYMYYWPGCEVEILGVRPTYCLEYKNVPTDINFANAVSDALDSFKSGRADLAAIYHERIDVEGHHYGPASPQRKDALKAVDTVLKYMTKWIQERGLQDRLNVIIFSDHGMTDIFWMDKVIELNKYISLNDLQQVKDRGPVVSLWPAPGKHSEIYNKLSTVEHMTVYEKEAIPSRFYYKKGKFVSPLTLVADEGWFITENREMLPFWMNSTGRREGWQRGWHGYDNELMDMRGIFLAFGPDFKSNFRAAPIRSVDVYNVMCNVVGITPLPNNGSWSRVMCMLKGRASTAPPVWPSHCALALILLFLLA

SEQ ID NO: 3765 - protein, 948 aa, Homo sapiens
MVFLPLKWSLATMSFLLSSLLALLTVSTPSWCQSTEASPKRSDGTPFPWNKIRLPEYVIPVHYDLLIHANLTTLTFWGTTKVEITASQPTSTIILHSHHLQISRATLRKGAGERLSEEPLQVLEHPRQEQIALLAPEPLLVGLPYTVVIHYAGNLSETFHGFYKSTYRTKEGELRILASTQFEPTAARMAFPCFDEPAFKASFSIKIRREPRHLAISNMPLVKSVTVAEGLIEDHFDVTVKMSTYLVAFIISDFESVSKITKSGVKVSVYAVPDKINQADYALDAAVTLLEFYEDYFSIPYPLPKQDLAAIPDFQSGAMENWGLTTYRESALLFDAEKSSASSKLGITMTVAHELAHQWFGNLVTMEWWNDLWLNEGFAKFMEFVSVSVTHPELKVGDYFFGKCFDAMEVDALNSSHPVSTPVENPAQIREMFDDVSYDKGACILNMLREYLSADAFKSGIVQYLQKHSYKNTKNEDLWDSMASICPTDGVKGMDGFCSRSQHSSSSSHWHQEGVDVKTMMNTWTLQKGFPLITITVRGRNVHMKQEHYMKGSDGAPDTGYLWHVPLTFITSKSDMVHRFLLKTKTDVLILPEEVEWIKFNVGMNGYYIVHYEDDGWDSLTGLLKGTHTAVSSNDRASLINNAFQLVSIGKLSIEKALDLSLYLKHETEIMPVFQGLNELIPMYKLMEKRDMNEVETQFKAFLIRLLRDLIDKQTWTDEGSVSERMLRSQLLLLACVHNYQPCVQRAEGYFRKWKESNGNLSLPVDVTLAVFAVGAQSTEGWDFLYSKYQFSLSSTEKSQIEFALCRTQNKEKLQWLLDESFKGDKIKTQEFPQILTLIGRNPVGYPLAWQFLRKNWNKLVQKFELGSSSIAHMVMGTTNQFSTRTRLEEVKGFFSSLKENGSQLRCVQQTIETIEENIGWMDKNFDKIRVWLQSEKLEHDPEADATG

SEQ ID NO: 3766 - protein, 2468 aa, Homo sapiens
MATVVVEATEPEPSGSIANPAASTSPSLSHRFLDSKFYLLVVVGEIVTEEHLRRAIGNIELGIRSWDTNLIECNLDQELKLFVSRHSARFSPEVPGQKILHHRSDVLETVVLINPSDEAVSTEVRLMITDAARHKLLVLTGQCFENTGELILQSGSFSFQNFIEIFTDQEIGELLSTTHPANKASLTLFCPEEGDWKNSNLDRHNLQDFINIKLNSASILPEMEGLSEFTEYLSESVEVPSPFDILEPPTSGGFLKLSKPCCYIFPGGRGDSALFAVNGFNMLINGGSERKSCFWKLIRHLDRVDSILLTHIGDDNLPGINSMLQRKIAELEEEQSQGSTTNSDWMKNLISPDLGVVFLNVPENLKNPEPNIKMKRSIEEACFTLQYLNKLSMKPEPLFRSVGNTIDPVILFQKMGVGKLEMYVLNPVKSSKEMQYFMQQWTGTNKDKAEFILPNGQEVDLPISYLTSVSSLIVWHPANPAEKIIRVLFPGNSTQYNILEGLEKLKHLDFLKQPLATQKDLTGQVPTPVVKQTKLKQRADSRESLKPAAKPLPSKSVRKESKEETPEVTKVNHVEKPPKVESKEKVMVKKDKPIKTETKPSVTEKEVPSKEEPSPVKAEVAEKQATDVKPKAAKEKTVKKETKVKPEDKKEEKEKPKKEVAKKEDKTPIKKEEKPKKEEVKKEVKKEIKKEEKKEPKKEVKKETPPKEVKKEVKKEEKKEVKKEEKEPKKEIKKLPKDAKKSSTPLSEAKKPAALKPKVPKKEESVKKDSVAAGKPKEKGKIKVIKKEGKAAEAVAAAVGTGATTAAVMAAAGIAAIGPAKELEAERSLMSSPEDLTKDFEELKAEEVDVTKDIKPQLELIEDEEKLKETEPVEAYVIQKEREVTKGPAESPDEGITTTEGEGECEQTPEELEPVEKQGVDDIEKFEDEGAGFEESSETGDYEEKAETEEAEEPEEDGEEHVCVSASKHSPTEDEESAKAEADAYIREKRESVASGDDRAEEDMDEAIEKGEAEQSEEEADEEDKAEDAREEEYEPEKMEAEDYVMAVVDKAAEAGGAEEQYGFLTTPTKQLGAQSPGREPASSIHDETLPGGSESEATASDEENREDQPEEFTATSGYTQSTIEISSEPTPMDEMSTPRDVMSDETNNEETESPSQEFVNITKYESSLYSQEYSKPADVTPLNGFSEGSKTDATDGKDYNASASTISPPSSMEEDKFSRSALRDAYCSEVKASTTLDIKDSISAVSSEKVSPSKSPSLSPSPPSPLEKTPLGERSVNFSLTPNEIKVSAEAEVAPVSPEVTQEVVEEHCASPEDKTLEVVSPSQSVTGSAGHTPYYQSPTDEKSSHLPTEVIEKPPAVPVSFEFSDAKDENERASVSPMDEPVPDSESPIEKVLSPLRSPPLIGSESAYESFLSADDKASGRGAESPFEEKSGKQGSPDQVSPVSEMTSTSLYQDKQEGKSTDFAPIKEDFGQEKKTDDVEAMSSQPALALDERKLGDVSPTQIDVSQFGSFKEDTKMSISEGTVSDKSATPVDEGVAEDTYSHMEGVASVSTASVATSSFPEPTTDDVSPSLHAEVGSPHSTEVDDSLSVSVVQTPTTFQETEMSPSKEECPRPMSISPPDFSPKTAKSRTPVQDHRSEQSSMSIEFGQESPEQSLAMDFSRQSPDHPTVGAGVLHITENGPTEVDYSPSDMQDSSLSHKIPPMEEPSYTQDNDLSELISVSQVEASPSTSSAHTPSQIASPLQEDTLSDVAPPRDMSLYASLTSEKVQSLEGEKLSPKSDISPLTPRESSPLYSPTFSDSTSAVKEKTATCHSSSSPPIDAASAEPYGFRASVLFDTMQHHLALNRDLSTPGLEKDSGGKTPGDFSYAYQKPEETTRSPDEEDYDYESYEKTTRTSDVGGYYYEKIERTTKSPSDSGYSYETIGKTTKTPEDGDYSYEIIEKTTRTPEEGGYSYDISEKTTSPPEVSGYSYEKTERSRRLLDDISNGYDDSEDGGHTLGDPSYSYETTEKITSFPESEGYSYETSTKTTRTPDTSTYCYETAEKITRTPQASTYSYETSDLCYTAEKKSPSEARQDVDLCLVSSCEYKHPKTELSPSFINPNPLEWFASEEPTEESEKPLTQSGGAPPPPGGKQQGRQCDETPPTSVSESAPSQTDSDVPPETEECPSITADANIDSEDESETIPTDKTVTYKHMDPPPAPVQDRSPSPRHPDVSMVDPEALAIEQNLGKALKKDLKEKTKTKKPGTKTKSSSPVKKSDGKSKPLAASPKPAGLKESSDKVSRVASPKKKESVEKAAKPTTTPEVKAARGEEKDKETKNAANASASKSAKTATAGPGTTKTTKSSAVPPGLPVYLDLCYIPNHSNSKNVDVEFFKRVRSSYYVVSGNDPAAEEPSRAVLDALLEGKAQWGSNMQVTLIPTHDSEVMREWYQETHEKQQDLNIMVLASSSTVVMQDESFPACKIEL

SEQ ID NO: 3767 - protein, 116 aa, Homo sapiens
MESSRVRLLPLLGAALLLMLPLLGTRAQEDAELQPRALDIYSAVDDASHEKELIEALQEVLKKLKSKRVPIYEKKYGQVPMCDAGEQCAVRKGARIGKLCDCPRGTSCNSFLLKCL

SEQ ID NO: 3768 - protein, 484 aa, Homo sapiens
MFPNSILGRPPFTPNHQQHNNFFTLSPTVYSHQQLIDAQFNFQNADLSRAVSLQQLTYGNVSPIQTSASPLFRGRKRLSDEKNLPLDGKRQRFHSPHQEPTVVNQIVPLSGERRYSMPPLFHTHYVPDIVRCVPPFREIAFLEPREITLPEAKDKLSQQILELFETCQQQISDLKKKELCRTQLQREIQLLFPQSRLFLVGSSLNGFGTRSSDGDLCLVVKEEPCFFQVNQKTEARHILTLVHKHFCTRLSGYIERPQLIRAKVPIVKFRDKVSCVEFDLNVNNIVGIRNTFLLRTYAYLENRVRPLVLVIKKWASHHQINDASRGTLSSYSLVLMVLHYLQTLPEPILPSLQKIYPESFSPAIQLHLVHQAPCNVPPYLSKNESNLGDLLLGFLKYYATEFDWNSQMISVREAKAIPRPDGIEWRNKYICVEEPFDGTNTARAVHEKQKFDMIKDQFLKSWHRLKNKRDLNSILPVRAAVLKR

SEQ ID NO: 3769 - protein, 313 aa, Homo sapiens
MDTSTNLDIGAQLIVEECPSTYSLTGMPDIKIEHPLDPNSEEGSAQGVAMGMKFILPNRFDMNVCSRFVKSLNEEDSKNIQDQVNSDLEVASVLFKAECNIHTSPSPGIQVRHVYTPSTTKHFSPIKQSTTLTNKHRGNEVSTTPLLANSLSVHQLAAQGEMLYLATRIEQENVINHTDEEGFTPLMWAAAHGQIAVVEFLLQNGADPQLLGKGRESALSLACSKGYTDIVKMLLDCGVDVNEYDWNGGTPLLYAVHGNHVKCVKMLLESGADPTIETDSGYNSMDLAVALGYRSVQQVIESHLLKLLQNIKE

SEQ ID NO: 3770 - protein, 318 aa, Homo sapiens
MALPIIVKWGGQEYSVTTLSEDDTVLDLKQFLKTLTGVLPERQKLLGLKVKGKPAENDVKLGALKLKPNTKIMMMGTREESLEDVLGPPPDNDDVVNDFDIEDEVVEVENREENLLKISRRVKEYKVEILNPPREGKKLLVLDVDYTLFDHRSCAETGVELMRPYLHEFLTSAYEDYDIVIWSATNMKWIEAKMKELGVSTNANYKITFMLDSAAMITVHTPRRGLIDVKPLGVIWGKFSEFYSKKNTIMFDDIGRNFLMNPQNGLKIRPFMKAHLNRDKDKELLKLTQYLKEIAKLDDFLDLNHKYWERYLSKKQGQ

SEQ ID NO: 3771 - protein, 518 aa, Homo sapiens
MAGYKPVAIQTYPILGEKITQDTLYWNNYKTPVQIKEFGAVSKVDFSPQPPYNYAVTASSRIHIYGRYSQEPIKTFSRFKDTAYCATFRQDGRLLVAGSEDGGVQLFDISGRAPLRQFEGHTKAVHTVDFTADKYHVVSGADDYTVKLWDIPNSKEILTFKEHSDYVRCGCASKLNPDLFITGSYDHTVKMFDARTSESVLSVEHGQPVESVLLFPSGGLLVSAGGRYVKVWDMLKGGQLLVSLKNHHKTVTCLCLSSSGQRLLSGSLDRKVKVYSTTSYKVVHSFDYAASILSLALAHEDETIVVGMTNGILSVKHRKSEAKKESLPRRRRPAYRTFIKGKNYMKQRDDILINRPAKKHLELYDRDLKHFRISKALDRVLDPTCTIKTPEITVSIIKELNRRGVLANALAGRDEKEISHVLNFLIRNLSQPRFAPVLINAAEIIIDIYLPVIGQSPVVDKKFLLLQGLVEKEIDYQRELLETLGMMDMLFATMRRKEGTSVLEHTSDGFPENKKIES

SEQ ID NO: 3772 - protein, 904 aa, Homo sapiens
MRQTLPCIYFWGGLLPFGMLCASSTTKCTVSHEVADCSHLKLTQVPDDLPTNITVLNLTHNQLRRLPAANFTRYSQLTSLDVGFNTISKLEPELCQKLPMLKVLNLQHNELSQLSDKTFAFCTNLTELHLMSNSIQKIKNNPFVKQKNLITLDLSHNGLSSTKLGTQVQLENLQELLLSNNKIQALKSEELDIFANSSLKKLELSSNQIKEFSPGCFHAIGRLFGLFLNNVQLGPSLTEKLCLELANTSIRNLSLSNSQLSTTSNTTFLGLKWTNLTMLDLSYNNLNVVGNDSFAWLPQLEYFFLEYNNIQHLFSHSLHGLFNVRYLNLKRSFTKQSISLASLPKIDDFSFQWLKCLEHLNMEDNDIPGIKSNMFTGLINLKYLSLSNSFTSLRTLTNETFVSLAHSPLHILNLTKNKISKIESDAFSWLGHLEVLDLGLNEIGQELTGQEWRGLENIFEIYLSYNKYLQLTRNSFALVPSLQRLMLRRVALKNVDSSPSPFQPLRNLTILDLSNNNIANINDDMLEGLEKLEILDLQHNNLARLWKHANPGGPIYFLKGLSHLHILNLESNGFDEIPVEVFKDLFELKIIDLGLNNLNTLPASVFNNQVSLKSLNLQKNLITSVEKKVFGPAFRNLTELDMRFNPFDCTCESIAWFVNWINETHTNIPELSSHYLCNTPPHYHGFPVRLFDTSSCKDSAPFELFFMINTSILLIFIFIVLLIHFEGWRISFYWNVSVHRVLGFKEIDRQTEQFEYAAYIIHAYKDKDWVWEHFSSMEKEDQSLKFCLEERDFEAGVFELEAIVNSIKRSRKIIFVITHHLLKDPLCKRFKVHHAVQQAIEQNLDSIILVFLEEIPDYKLNHALCLRRGMFKSHCILNWPVQKERIGAFRHKLQVALGSKNSVH

SEQ ID NO: 3773 - protein, 732 aa, Homo sapiens
MLTNLRIFAMSHQTIPSVYINNICCYKIRASLKRLKPHVPLGRNCSSLPGLIGNDIKSLHSIINPPIAKIRNIGIMAHIDAGKTTTTERILYYSGYTRSLGDVDDGDTVTDFMAQERERGITIQSAAVTFDWKGYRVNLIDTPGHVDFTLEVERCLRVLDGAVAVFDASAGVEAQTLTVWRQADKHNIPRICFLNKMDKTGASFKYAVESIREKLKAKPLLLQLPIGEAKTFKGVVDVVMKEKLLWNCNSNDGKDFERKPLLEMNDPELLKETTEARNALIEQVADLDDEFADLVLEEFSENFDLLPAEKLQTAIHRVTLAQTAVPVLCGSALKNKGIQPLLDAVTMYLPSPEERNYEFLERISRLLLPFADQHVEIPSLTAGNIALTVGLKHTATGDTIVSSKSSALAAARRAEREGEKKHRQNNEAERLLLAGVEIPEPVFFCTIEPPSLSKQPDLEHALKCLQREDPSLKVRLDPDSGQTVLCGMGELHIEIIHDRIKREYGLETYLGPLQVAYRETILNSVRATDTLDRTLGDKRHLVTVEVEARPIETSSVMPVIEFEYAESINEGLLKVSQEAIENGIHSACLQGPLLGSPIQDVAITLHSLTIHPGTSTTMISACVSRCVQKALKKADKQVLEPLMNLEVTVARDYLSPVLADLAQRRGNIQEIQTRQDNKVVIGFVPLAEIMGYSTVLRTLTSGSATFALELSTYQAMNPQDQNTLLNRRSGLT

SEQ ID NO: 3774 - protein, 779 aa, Homo sapiens
MLTNLRIFAMSHQTIPSVYINNICCYKIRASLKRLKPHVPLGRNCSSLPGLIGNDIKSLHSIINPPIAKIRNIGIMAHIDAGKTTTTERILYYSGYTRSLGDVDDGDTVTDFMAQERERGITIQSAAVTFDWKGYRVNLIDTPGHVDFTLEVERCLRVLDGAVAVFDASAGVEAQTLTVWRQADKHNIPRICFLNKMDKTGASFKYAVESIREKLKAKPLLLQLPIGEAKTFKGVVDVVMKEKLLWNCNSNDGKDFERKPLLEMNDPELLKETTEARNALIEQVADLDDEFADLVLEEFSENFDLLPAEKLQTAIHRVTLAQTAVPVLCGSALKNKGIQPLLDAVTMYLPSPEERNYEFLQWYKDDLCALAFKVLHDKQRGPLVFMRIYSGTIKPQLAIHNINGNCTERISRLLLPFADQHVEIPSLTAGNIALTVGLKHTATGDTIVSSKSSALAAARRAEREGEKKHRQNNEAERLLLAGVEIPEPVFFCTIEPPSLSKQPDLEHALKCLQREDPSLKVRLDPDSGQTVLCGMGELHIEIIHDRIKREYGLETYLGPLQVAYRETILNSVRATDTLDRTLGDKRHLVTVEVEARPIETSSVMPVIEFEYAESINEGLLKVSQEAIENGIHSACLQGPLLGSPIQDVAITLHSLTIHPGTSTTMISACVSRCVQKALKKADKQVLEPLMNLEVTVARDYLSPVLADLAQRRGNIQEIQTRQDNKVVIGFVPLAEIMGYSTVLRTLTSGSATFALELSTYQAMNPQDQNTLLNRRSGLT

SEQ ID NO: 3775 - protein, 1609 aa, Homo sapiens
MNSPVDPGARQALRKKPPERTPEDLNTIYSYLHGMEILSNLREHQLRLMSARARYERYSGNQVLFCSETIARCWYILLSGSVLVKGSMVLPPCSFGKQFGGKRGCDCLVLEPSEMIVVENAKDNEDSILQREIPARQSRRRFRKINYKGERQTITDDVEVNSYLSLPADLTKMHLTENPHPQVTHVSSSQSGCSIASDSGSSSLSDIYQATESEVGDVDLTRLPEGPVDSEDDEEEDEEIDRTDPLQGRDLVRECLEKEPADKTDDDIEQLLEFMHQLPAFANMTMSVRRELCSVMIFEVVEQAGAIILEDGQELDSWYVILNGTVEISHPDGKVENLFMGNSFGITPTLDKQYMHGIVRTKVDDCQFVCIAQQDYWRILNHVEKNTHKVEEEGEIVMVHEHRELDRSGTRKGHIVIKATPERLIMHLIEEHSIVDPTYIEDFLLTYRTFLESPLDVGIKLLEWFKIDSLRDKVTRIVLLWVNNHFNDFEGDPAMTRFLEEFEKNLEDTKMNGHLRLLNIACAAKAKWRQVVLQKASRESPLQFSLNGGSEKGFGIFVEGVEPGSKAADSGLKRGDQIMEVNGQNFENITFMKAVEILRNNTHLALTVKTNIFVFKELLFRTEQEKSGVPHIPKIAEKKSNRHSIQHVPGDIEQTSQEKGSKKVKANTVSGGRNKIRKILDKTRFSILPPKLFSDGGLSQSQDDSIVGTRHCRHSLAIMPIPGTLSSSSPDLLQPTTSMLDFSNPSDIPDQVIRVFKVDQQSCYIIISKDTTAKEVVFHAVHEFGLTGASDTYSLCEVSVTPEGVIKQRRLPDQFSKLADRIQLNGRYYLKNNMETETLCSDEDAQELVKESQLSMLQLSTIEVATQLSMRDFDLFRNIEPTEYIDDLFKLNSKTGNTHLKRFEDIVNQETFWVASEILTEANQLKRMKIIKHFIKIALHCRECKNFNSMFAIISGLNLASVARLRGTWEKLPSKYEKHLQDLQDIFDPSRNMAKYRNILSSQSMQPPIIPLFPVVKKDMTFLHEGNDSKVDGLVNFEKLRMISKEIRQVVRMTSANMDPAMMFRQRKKRWRSLGSLSQGSTNSNMLDVQGGAHKKRARRSSLLNAKKLYEDAQMARKVKQYLSSLDVETDEEKFQMMSLQWEPAYGTLTKNLSEKRSAKSSEMSPVPMRSAGQTTKAHLHQPHRVSQVLQVPAVNLHPIRKKGQTKDPALNTSLPQKVLGTTEEISGKKHTEDTISVASSLHSSPPASPQGSPHKGYTLIPSAKSDNLSDSSHSEISSRSSIVSNCSVDSMSAALQDERCSSQALAVPESTGALEKTEHASGIGDHSQHGPGWTLLKPSLIKCLAVSSSVSNEEISQEHIIIEAADSGRGSWTSCSSSSHDNFQSLPNPKSWDFLNSYRHTHLDDPIAEVEPTDSEPYSCSKSCSRTCGQCKGSLERKSWTSSSSLSDTYEPNYGTVKQRVLESTPAESSEGLDPKDATDPVYKTVTSSTEKGLIVYCVTSPKKDDRYREPPPTPPGYLGISLADLKEGPHTHLKPPDYSVAVQRSKMMHNSLSRLPPASLSSNLVACVPSKIVTQPQRHNLQPFHPKLGDVTDADSEADENEQVSAV

SEQ ID NO: 3776 - protein, 655 aa, Homo sapiens
MGTSPSSSTALASCSRIARRATATMIAGSLLLLGFLSTTTAQPEQKASNLIGTYRHVDRATGQVLTCDKCPAGTYVSEHCTNTSLRVCSSCPVGTFTRHENGIEKCHDCSQPCPWPMIEKLPCAALTDRECTCPPGMFQSNATCAPHTVCPVGWGVRKKGTETEDVRCKQCARGTFSDVPSSVMKCKAYTDCLSQNLVVIKPGTKETDNVCGTLPSFSSSTSPSPGTAIFPRPEHMETHEVPSSTYVPKGMNSTESNSSASVRPKVLSSIQEGTVPDNTSSARGKEDVNKTLPNLQVVNHQQGPHHRHILKLLPSMEATGGEKSSTPIKGPKRGHPRQNLHKHFDINEHLPWMIVLFLLLVLVVIVVCSIRKSSRTLKKGPRQDPSAIVEKAGLKKSMTPTQNREKWIYYCNGHGIDILKLVAAQVGSQWKDIYQFLCNASEREVAAFSNGYTADHERAYAALQHWTIRGPEASLAQLISALRQHRRNDVVEKIRGLMEDTTQLETDKLALPMSPSPLSPSPIPSPNAKLENSALLTVEPSPQDKNKGFFVDESEPLLRCDSTSSGSSALSRNGSFITKEKKDTVLRQVRLDPCDLQPIFDDMLHFLNPEELRVIEEIPQAEDKLDRLFEIIGVKSQEASQTLLDSVYSHLPDLL

SEQ ID NO: 3777 - protein, 152 aa, Homo sapiens
MSRLPVLLLLQLLVRPGLQAPMTQTTPLKTSWVNCSNMIDEIITHLKQPPLPLLDFNNLNGEDQDILMENNLRRPNLEAFNRAVKSLQNASAIESILKNLLPCLPLATAAPTRHPIHIKDGDWNEFRRKLTFYLKTLENAQAQQTTLSLAIF

SEQ ID NO: 3778 - protein, 144 aa, Homo sapiens
MWLQSLLLLGTVACSISAPARSPSPSTQPWEHVNAIQEARRLLNLSRDTAAEMNETVEVISEMFDLQEPTCLQTRLELYKQGLRGSLTKLKGPLTMMASHYKQHCPPTPETSCATQIITFESFKENLKDFLLVIPFDCWEPVQE

SEQ ID NO: 3779 - protein, 429 aa, Homo sapiens
MAATDLERFSNAEPEPRSLSLGGHVGFDSLPDQLVSKSVTQGFSFNILCVGETGIGKSTLMNTLFNTTFETEEASHHEACVRLRPQTYDLQESNVQLKLTIVDAVGFGDQINKDESYRPIVDYIDAQFENYLQEELKIRRSLFDYHDTRIHVCLYFITPTGHSLKSLDLVTMKKLDSKVNIIPIIAKADTISKSELHKFKIKIMGELVSNGVQIYQFPTDDEAVAEINAVMNAHLPFAVVGSTEEVKVGNKLVRARQYPWGVVQVENENHCDFVKLREMLIRVNMEDLREQTHSRHYELYRRCKLEEMGFQDSDGDSQPFSLQETYEAKRKEFLSELQRKEEEMRQMFVNKVKETELELKEKERELHEKFEHLKRVHQEEKRKVEEKRRELEEETNAFNRRKAAVEALQSQALHATSQQPLRKDKDKKN

SEQ ID NO: 3780 - protein, 77 aa, Homo sapiens
MWHLKLCAVLMIFLLLLGQIDGSPIPEVSSAKRRPRRMTPFWRGVSLRPIGASCRDDSECITRLCRKRRCSLSVAQE

SEQ ID NO: 3781 - protein, 294 aa, Homo sapiens
MEDSMDMDMSPLRPQNYLFGCELKADKDYHFKVDNDENEHQLSLRTVSLGAGAKDELHIVEAEAMNYEGSPIKVTLATLKMSVQPTVSLGGFEITPPVVLRLKCGSGPVHISGQHLVAVEEDAESEDEEEEDVKLLSISGKRSAPGGGSKVPQKKVKLAADEDDDDDDEEDDDEDDDDDDFDDEEAEEKAPVKKSIRDTPAKNAQKSNQNGKDSKPSSTPRSKGQESFKKQEKTPKTPKGPSSVEDIKAKMQASIEKGGSLPKVEAKFINYVKNCFRMTDQEAIQDLWQWRKSL

SEQ ID NO: 3782 - protein, 1193 aa, Homo sapiens
MMFRSDRMWSCHWKWKPSPLLFLFALYIMCVPHSVWGCANCRVVLSNPSGTFTSPCYPNDYPNSQACMWTLRAPTGYIIQITFNDFDIEEAPNCIYDSLSLDNGESQTKFCGATAKGLSFNSSANEMHVSFSSDFSIQKKGFNASYIRVAVSLRNQKVILPQTSDAYQVSVAKSISIPELSAFTLCFEATKVGHEDSDWTAFSYSNASFTQLLSFGKAKSGYFLSISDSKCLLNNALPVKEKEDIFAESFEQLCLVWNNSLGSIGVNFKRNYETVPCDSTISKVIPGNGKLLLGSNQNEIVSLKGDIYNFRLWNFTMNAKILSNLSCNVKGNVVDWQNDFWNIPNLALKAESNLSCGSYLIPLPAAELASCADLGTLCQDGIIYRISVVIQNILRHPEVKVQSKVAEWLNSTFQNWNYTVYVVNISFHLSAGEDKIKVKRSLEDEPRLVLWALLVYNATNNTNLEGKIIQQKLLKNNESLDEGLRLHTVNVRQLGHCLAMEEPKGYYWPSIQPSEYVLPCPDKPGFSASRICFYNATNPLVTYWGPVDISNCLKEANEVANQILNLTADGQNLTSANITNIVEQVKRIVNKEENIDITLGSTLMNIFSNILSSSDSDLLESSSEALKTIDELAFKIDLNSTSHVNITTRNLALSVSSLLPGTNAISNFSIGLPSNNESYFQMDFESGQVDPLASVILPPNLLENLSPEDSVLVRRAQFTFFNKTGLFQDVGPQRKTLVSYVMACSIGNITIQNLKDPVQIKIKHTRTQEVHHPICAFWDLNKNKSFGGWNTSGCVAHRDSDASETVCLCNHFTHFGVLMDLPRSASQLDARNTKVLTFISYIGCGISAIFSAATLLTYVAFEKLRRDYPSKILMNLSTALLFLNLLFLLDGWITSFNVDGLCIAVAVLLHFFLLATFTWMGLEAIHMYIALVKVFNTYIRRYILKFCIIGWGLPALVVSVVLASRNNNEVYGKESYGKEKGDEFCWIQDPVIFYVTCAGYFGVMFFLNIAMFIVVMVQICGRNGKRSNRTLREEVLRNLRSVVSLTFLLGMTWGFAFFAWGPLNIPFMYLFSIFNSLQGLFIFIFHCAMKENVQKQWRQHLCCGRFRLADNSDWSKTATNIIKKSSDNLGKSLSSSSIGSNSTYLTSKSKSSSTTYFKRNSHTDNVSYEHSFNKSGSLRQCFHGQVLVKTGPC

SEQ ID NO: 3783 - protein, 529 aa, Homo sapiens
MEPDSVIEDKTIELMNTSVMEDQNEDESPKKNTLWQISNGTSSVIVSRKRPSEGNYQKEKDLCIKYFDQWSESDQVEFVEHLISRMCHYQHGHINSYLKPMLQRDFITALPEQGLDHIAENILSYLDARSLCAAELVCKEWQRVISEGMLWKKLIERMVRTDPLWKGLSERRGWDQYLFKNRPTDGPPNSFYRSLYPKIIQDIETIESNWRCGRHNLQRIQCRSENSKGVYCLQYDDEKIISGLRDNSIKIWDKTSLECLKVLTGHTGSVLCLQYDERVIVTGSSDSTVRVWDVNTGEVLNTLIHHNEAVLHLRFSNGLMVTCSKDRSIAVWDMASATDITLRRVLVGHRAAVNVVDFDDKYIVSASGDRTIKVWSTSTCEFVRTLNGHKRGIACLQYRDRLVVSGSSDNTIRLWDIECGACLRVLEGHEELVRCIRFDNKRIVSGAYDGKIKVWDLQAALDPRAPASTLCLRTLVEHSGRVFRLQFDEFQIISSSHDDTILIWDFLNVPPSAQNETRSPSRTYTYISR

SEQ ID NO: 3784 - protein, 639 aa, Homo sapiens
MPQPSVSGMDPPFGDAFRSHTFSEQTLMSTDLLANSSDPDFMYELDREMNYQQNPRDNFLSLEDCKDIENLESFTDVLDNEGALTSNWEQWDTYCEDLTKYTKLTSCDIWGTKEVDYLGLDDFSSPYQDEEVISKTPTLAQLNSEDSQSVSDSLYYPDSLFSVKQNPLPSSFPGKKITSRAAAPVCSSKTLQAEVPLSDCVQKASKPTSSTQIMVKTNMYHNEKVNFHVECKDYVKKAKVKINPVQQSRPLLSQIHTDAAKENTCYCGAVAKRQEKKGMEPLQGHATPALPFKETQELLLSPLPQEGPGSLAAGESSSLSASTSVSDSSQKKEEHNYSLFVSDNLGEQPTKCSPEEDEEDEEDVDDEDHDEGFGSEHELSENEEEEEEEEDYEDDKDDDISDTFSEPGYENDSVEDLKEVTSISSRKRGKRRYFWEYSEQLTPSQQERMLRPSEWNRDTLPSNMYQKNGLHHGKYAVKKSRRTDVEDLTPNPKKLLQIGNELRKLNKVISDLTPVSELPLTARPRSRKEKNKLASRACRLKKKAQYEANKVKLWGLNTEYDNLLFVINSIKQEIVNRVQNPRDERGPNMGQKLEILIKDTLGLPVAGQTSEFVNQVLEKTAEGNPTGGLVGLRIPTSKV

SEQ ID NO: 3785 - protein, 539 aa, Homo sapiens
MVPGARGGGALARAAGRGLLALLLAVSAPLRLQAEELGDGCGHLVTYQDSGTMTSKNYPGTYPNHTVCEKTITVPKGKRLILRLGDLDIESQTCASDYLLFTSSSDQYGPYCGSMTVPKELLLNTSEVTVRFESGSHISGRGFLLTYASSDHPDLITCLERASHYLKTEYSKFCPAGCRDVAGDISGNMVDGYRDTSLLCKAAIHAGIIADELGGQISVLQRKGISRYEGILANGVLSRDGSLSDKRFLFTSNGCSRSLSFEPDGQIRASSSWQSVNESGDQVHWSPGQARLQDQGPSWASGDSSNNHKPREWLEIDLGEKKKITGIRTTGSTQSNFNFYVKSFVMNFKNNNSKWKTYKGIVNNEEKVFQGNSNFRDPVQNNFIPPIVARYVRVVPQTWHQRIALKVELIGCQITQGNDSLVWRKTSQSTSVSTKKEDETITRPIPSEETSTGINITTVAIPLVLLVVLVFAGMGIFAAFRKKKKKGSPYGSAEAQKTDCWKQIKYPFARHQSAEFTISYDNEKEMTQKLDLITSDMAG

SEQ ID NO: 3786 - protein, 491 aa, Homo sapiens
MIATGGVITGLAALKRQDSARSQQHVNLSPSPATQEKKPIRRRPRADVVVVRGKIRLYSPSGFFLILGVLISIIGIAMAVLGYWPQKEHFIDAETTLSTNETQVIRNEGGVVVRFFEQHLHSDKMKMLGPFTMGIGIFIFICANAILHENRDKETKIIHMRDIYSTVIDIHTLRIKEQRQMNGMYTGLMGETEVKQNGSSCASRLAANTIASFSGFRSSFRMDSSVEEDELMLNEGKSSGHLMPPLLSDSSVSVFGLYPPPSKTTDDKTSGSKKCETKSIVSSSISAFTLPVIKLNNCVIDEPSIDNITEDADNLKSRSRNLSMDSLVVPLPNTSESFQPVSTVLPRNNSIGESLSSQYKSSMALGPGAGQLLSPGAARRQFGSNTSLHLLSSHSKSLDLDRGPSTLTVQAEQRKHPSWPRLDRNNSKGYMKLENKEDPMDRLLVPQVAIKKDFTNKEKLLMISRSHNNLSFEHDEFLSNNLKRGTSETRF

SEQ ID NO: 3787 - protein, 231 aa, Homo sapiens
MMPKHCFLGFLISFFLTGVAGTQSTHESLKPQRVQFQSRNFHNILQWQPGRALTGNSSVYFVQYKIYGQRQWKNKEDCWGTQELSCDLTSETSDIQEPYYGRVRAASAGSYSEWSMTPRFTPWWETKIDPPVMNITQVNGSLLVILHAPNLPYRYQKEKNVSIEDYYELLYRVFIINNSLEKEQKVYEGAHRAVEIEALTPHSSYCVVAEIYQPMLDRRSQRSEERCVEIP

SEQ ID NO: 3788 - protein, 263 aa, Homo sapiens
MMPKHCFLGFLISFFLTGVAGTQSTHESLKPQRVQFQSRNFHNILQWQPGRALTGNSSVYFVQYKIMFSCSMKSSHQKPSGCWQHISCNFPGCRTLAKYGQRQWKNKEDCWGTQELSCDLTSETSDIQEPYYGRVRAASAGSYSEWSMTPRFTPWWETKIDPPVMNITQVNGSLLVILHAPNLPYRYQKEKNVSIEDYYELLYRVFIINNSLEKEQKVYEGAHRAVEIEALTPHSSYCVVAEIYQPMLDRRSQRSEERCVEIP

SEQ ID NO: 3789 - protein, 140 aa, Homo sapiens
MAETVADTRRLITKPQNLNDAYGPPSNFLEIDTNLPIFKLKESTVRRRYSDFEWLRSELERESKVVVPPLPGKAFLRQLPFRGDDGIFDDNFIEERKQGLEQFINKVAGHPLAQNERCLHMFLQDEIIDKSYTPSKIRHA

SEQ ID NO: 3790 - protein, 745 aa, Homo sapiens
MKLSPQPSCVNLGMMWTWALWMLPSLCKFSLAALPAKPENISCVYYYRKNLTCTWSPGKETSYTQYTVKRTYAFGEKHDNCTTNSSTSENRASCSFFLPRITIPDNYTIEVEAENGDGVIKSHMTYWRLENIAKTEPPKIFRVKPVLGIKRMIQIEWIKPELAPVSSDLKYTLRFRTVNSTSWMEVNFAKNRKDKNQTYNLTGLQPFTEYVIALRCAVKESKFWSDWSQEKMGMTEEEAPCGLELWRVLKPAEADGRRPVRLLWKKARGAPVLEKTLGYNIWYYPESNTNLTETMNTTNQQLELHLGGESFWVSMISYNSLGKSPVATLRIPAIQEKSFQCIEVMQACVAEDQLVVKWQSSALDVNTWMIEWFPDVDSEPTTLSWESVSQATNWTIQQDKLKPFWCYNISVYPMLHDKVGEPYSIQAYAKEGVPSEGPETKVENIGVKTVTITWKEIPKSERKGIICNYTIFYQAEGGKGFSKTVNSSILQYGLESLKRKTSYIVQVMASTSAGGTNGTSINFKTLSFSVFEIILITSLIGGGLLILIILTVAYGLKKPNKLTHLCWPTVPNPAESSIATWHGDDFKDKLNLKESDDSVNTEDRILKPCSTPSDKLVIDKLVVNFGNVLQEIFTDEARTGQENNLGGEKNGYVTCPFRPDCPLGKSFEELPVSPEIPPRKSQYLRSRMPEGTRPEAKEQLLFSGQSLVPDHLCEEGAPNPYLKNSVTAREFLVSEKLPEHTKGEV

SEQ ID NO: 3791 - protein, 399 aa, Homo sapiens
MDEDGGGEGGGVPEDLSLEEREELLDIRRRKKELIDDIERLKYEIAEVMTEIDNLTSVEESKTTQRNKQIAMGRKKFNMDPKKGIQFLIENDLLQSSPEDVAQFLYKGEGLNKTVIGDYLGERDEFNIKVLQAFVELHEFADLNLVQALRQFLWSFRLPGEAQKIDRMMEAFASRYCLCNPGVFQSTDTCYVLSFAIIMLNTSLHNHNVRDKPTAERFIAMNRGINEGGDLPEELLRNLYESIKNEPFKIPEDDGNDLTHTFFNPDREGWLLKLGGRVKTWKRRWFILTDNCLYYFEYTTDKEPRGIIPLENLSIREVEDPRKPNCFELYNPSHKGQVIKACKTEADGRVVEGNHVVYRISAPSPEEKEEWMKSIKASISRDPFYDMLATRKRRIANKK

SEQ ID NO: 3792 - protein, 672 aa, Homo sapiens
MPGMVLFGRRWAIASDDLVFPGFFELVVRVLWWIGILTLYLMHRGKLDCAGGALLSSYLIVLMILLAVVICTVSAIMCVSMRGTICNPGPRKSMSKLLYIRLALFFPEMVWASLGAAWVADGVQCDRTVVNGIIATVVVSWIIIAATVVSIIIVFDPLGGKMAPYSSAGPSHLDSHDSSQLLNGLKTAATSVWETRIKLLCCCIGKDDHTRVAFSSTAELFSTYFSDTDLVPSDIAAGLALLHQQQDNIRNNQEPAQVVCHAPGSSQEADLDAELENCHHYMQFAAAAYGWPLYIYRNPLTGLCRIGGDCCRSRTTDYDLVGGDQLNCHFGSILHTTGLQYRDFIHVSFHDKVYELPFLVALDHRKESVVVAVRGTMSLQDVLTDLSAESEVLDVECEVQDRLAHKGISQAARYVYQRLINDGILSQAFSIAPEYRLVIVGHSLGGGAAALLATMLRAAYPQVRCYAFSPPRGLWSKALQEYSQSFIVSLVLGKDVIPRLSVTNLEDLKRRILRVVAHCNKPKYKILLHGLWYELFGGNPNNLPTELDGGDQEVLTQPLLGEQSLLTRWSPAYSFSSDSPLDSSPKYPPLYPPGRIIHLQEEGASGRFGCCSAAHYSAKWSHEAEFSKILIGPKMLTDHMPDILMRALDSVVSDRAACVSCPAQGVSSVDVA

SEQ ID NO: 3793 - protein, 282 aa, Homo sapiens
MSDVEENNFEGRESRSQSKSPTGTPARVKSESRSGSRSPSRVSKHSESHSRSRSKSRSRSRRHSHRRYTRSRSHSHSHRRRSRSRSYTPEYRRRRSRSHSPMSNRRRHTGSRANPDPNTCLGVFGLSLYTTERDLREVFSRYGPLSGVNVVYDQRTGRSRGFAFVYFERIDDSKEAMERANGMELDGRRIRVDYSITKRAHTPTPGIYMGRPTHSGGGGGGGGGGGGGGGGRRRDSYYDRGYDRGYDRYEDYDYRYRRRSPSPYYSRYRSRSRSRSYSPRRY

SEQ ID NO: 3794 - protein, 603 aa, Homo sapiens
MRRKEKRLLQAVALVLAALVLLPNVGLWALYRERQPDGTPGGSGAAVAPAAGQGSHSRQKKTFFLGDGQKLKDWHDKEAIRRDAQRVGNGEQGRPYPMTDAERVDQAYRENGFNIYVSDKISLNRSLPDIRHPNCNSKRYLETLPNTSIIIPFHNEGWSSLLRTVHSVLNRSPPELVAEIVLVDDFSDREHLKKPLEDYMALFPSVRILRTKKREGLIRTRMLGASVATGDVITFLDSHCEANVNWLPPLLDRIARNRKTIVCPMIDVIDHDDFRYETQAGDAMRGAFDWEMYYKRIPIPPELQKADPSDPFESPVMAGGLFAVDRKWFWELGGYDPGLEIWGGEQYEISFKVWMCGGRMEDIPCSRVGHIYRKYVPYKVPAGVSLARNLKRVAEVWMDEYAEYIYQRRPEYRHLSAGDVAVQKKLRSSLNCKSFKWFMTKIAWDLPKFYPPVEPPAAAWGEIRNVGTGLCADTKHGALGSPLRLEGCVRGRGEAAWNNMQVFTFTWREDIRPGDPQHTKKFCFDAISHTSPVTLYDCHSMKGNQLWKYRKDKTLYHPVSGSCMDCSESDHRIFMNTCNPSSLTQQWLFEHTNSTVLEKFNRN

SEQ ID NO: 3795 - protein, 183 aa, Homo sapiens
MNGFSTEEDSREGPPAAPAAAAPGYGQSCCLIEDGERCVRPAGNASFSKRVQKSISQKKLKLDIDKSVRHLYICDFHKNFIQSVRNKRKRKTSDDGGDSPEHDTDIPEVDLFQLQVNTLRRYKRHYKLQTRPGFNKAQLAETVSRHFRNIPVNEKETLAYFIYMVKSNKSRLDQKSEGGKQLE

SEQ ID NO: 3796 - protein, 860 aa, Homo sapiens
MGWVGGRRRDSASPPGRSRSAADDINPAPANMEGGGGSVAVAGLGARGSGAAAATVRELLQDGCYSDFLNEDFDVKTYTSQSIHQAVIAEQLAKLAQGISQLDRELHLQVVARHEDLLAQATGIESLEGVLQMMQTRIGALQGAVDRIKAKIVEPYNKIVARTAQLARLQVACDLLRRIIRILNLSKRLQGQLQGGSREITKAAQSLNELDYLSQGIDLSGIEVIENDLLFIARARLEVENQAKRLLEQGLETQNPTQVGTALQVFYNLGTLKDTITSVVDGYCATLEENINSALDIKVLTQPSQSAVRGGPGRSTMPTPGNTAALRASFWTNMEKLMDHIYAVCGQVQHLQKVLAKKRDPVSHICFIEEIVKDGQPEIFYTFWNSVTQALSSQFHMATNSSMFLKQAFEGEYPKLLRLYNDLWKRLQQYSQHIQGNFNASGTTDLYVDLQHMEDDAQDIFIPKKPDYDPEKALKDSLQPYEAAYLSKSLSRLFDPINLVFPPGGRNPPSSDELDGIIKTIASELNVAAVDTNLTLAVSKNVAKTIQLYSVKSEQLLSTQGDASQVIGPLTEGQRRNVAVVNSLYKLHQSVTKVVSSQSSFPLAAEQTIISALKAIHALMENAVQPLLTSVGDAIEAIIITMHQEDFSGSLSSSGKPDVPCSLYMKELQGFIARVMSDYFKHFECLDFVFDNTEAIAQRAVELFIRHASLIRPLGEGGKMRLAADFAQMELAVGPFCRRVSDLGKSYRMLRSFRPLLFQASEHVASSPALGDVIPFSIIIQFLFTRAPAELKSPFQRAEWSHTRFSQWLDDHPSEKDRLLLIRGALEAYVQSVRSREGKEFAPVYPIMVQLLQKAMSALQ

SEQ ID NO: 3797 - protein, 405 aa, Homo sapiens
MEPGAGGRNTARAQRAGSPNTPPPREQERKLEQEKLSGVVKSVHRRLRKKYREVGDFDKIWREHCEDEETLCEYAVAMKNLADNHWAKTCEGEGRIEWCCSVCREYFQNGGKRKALEKDEKRAVLATKTTPALNMHESSQLEGHLTNLSFTNPEFITELLQASGKIRLLDVGSCFNPFLKFEEFLTVGIDIVPAVESVYKCDFLNLQLQQPLQLAQDAIDAFLKQLKNPIDSLPGELFHVVVFSLLLSYFPSPYQRWICCKKAHELLVLNGLLLIITPDSSHQNRHAMMMKSWKIAIESLGFKRFKYSKFSHMHLMAFRKISLKTTSDLVSRNYPGMLYIPQDFNSIEDEEYSNPSCYVRSDIEDEQLAYGFTELPDAPYDSDSGESQASSIPFYELEDPILLLS

SEQ ID NO: 3798 - protein, 296 aa, Homo sapiens
MESMAVATDGGERPGVPAGSGLSASQRRAELRRRKLLMNSEQRINRIMGFHRPGSGAEEESQTKSKQQDSDKLNSLSVPSVSKRVVLGDSVSTGTTDQQGGVAEVKGTQLGDKLDSFIKPPECSSDVNLELRQRNRGDLTADSVQRGSRHGLEQYLSRFEEAMKLRKQLISEKPSQEDGNTTEEFDSFRIFRLVGCALLALGVRAFVCKYLSIFAPFLTLQLAYMGLYKYFPKSEKKIKTTVLTAALLLSGIPAEVINRSMDTYSKMGEVFTDLCVYFFTFIFCHELLDYWGSEVP

SEQ ID NO: 3799 - protein, 685 aa, Homo sapiens
MLWFSGVGALAERYCRRSPGITCCVLLLLNCSGVPMSLASSFLTGSVAKCENEGEVLQIPFITDNPCIMCVCLNKEVTCKREKCPVLSRDCALAIKQRGACCEQCKGCTYEGNTYNSSFKWQSPAEPCVLRQCQEGVVTESGVRCVVHCKNPLEHLGMCCPTCPGCVFEGVQYQEGEEFQPEGSKCTKCSCTGGRTQCVREVCPILSCPQHLSHIPPGQCCPKCLGQRKVFDLPFGSCLFRSDVYDNGSSFLYDNCTACTCRDSTVVCKRKCSHPGGCDQGQEGCCEECLLRVPPEDIKVCKFGNKIFQDGEMWSSINCTICACVKGRTECRNKQCIPISSCPQGKILNRKGCCPICTEKPGVCTVFGDPHYNTFDGRTFNFQGTCQYVLTKDCSSPASPFQVLVKNDARRTRSFSWTKSVELVLGESRVSLQQHLTVRWNGSRIALPCRAPHFHIDLDGYLLKVTTKAGLEISWDGDSFVEVMAAPHLKGKLCGLCGNYNGHKRDDLIGGDGNFKFDVDDFAESWRVESNEFCNRPQRKPVPELCQGTVKVKLRAHRECQKLKSWEFQTCHSTVDYATFYRSCVTDMCECPVHKNCYCESFLAYTRACQREGIKVHWEPQQNCAATQCKHGAVYDTCGPGCIKTCDNWNEIGPCNKPCVAGCHCPANLVLHKGRCIKPVLCPQR

SEQ ID NO: 3800 - protein, 679 aa, Homo sapiens
MISASRAAAARLVGAAASRGPTAARHQDSWNGLSHEAFRLVSRRDYASEAIKGAVVGIDLGTTNSCVAVMEGKQAKVLENAEGARTTPSVVAFTADGERLVGMPAKRQAVTNPNNTFYATKRLIGRRYDDPEVQKDIKNVPFKIVRASNGDAWVEAHGKLYSPSQIGAFVLMKMKETAENYLGHTAKNAVITVPAYFNDSQRQATKDAGQISGLNVLRVINEPTAAALAYGLDKSEDKVIAVYDLGGGTFDISILEIQKGVFEVKSTNGDTFLGGEDFDQALLRHIVKEFKRETGVDLTKDNMALQRVREAAEKAKCELSSSVQTDINLPYLTMDSSGPKHLNMKLTRAQFEGIVTDLIRRTIAPCQKAMQDAEVSKSDIGEVILVGGMTRMPKVQQTVQDLFGRAPSKAVNPDEAVAIGAAIQGGVLAGDVTDVLLLDVTPLSLGIETLGGVFTKLINRNTTIPTKKSQVFSTAADGQTQVEIKVCQGEREMAGDNKLLGQFTLIGIPPAPRGVPQIEVTFDIDANGIVHVSAKDKGTGREQQIVIQSSGGLSKDDIENMVKNAEKYAEEDRRKKERVEAVNMAEGIIHDTETKMEEFKDQLPADECNKLKEEISKMRELLARKDSETGENIRQAASSLQQASLKLFEMAYKKMASEREGSGSSGTGEQKEDQKEEKQ

SEQ ID NO: 3801 - protein, 339 aa, Homo sapiens
MESRKDITNQEELWKMKPRRNLEEDDYLHKDTGETSMLKRPVLLHLHQTAHADEFDCPSELQHTQELFPQWHLPIKIAAIIASLTFLYTLLREVIHPLATSHQQYFYKIPILVINKVLPMVSITLLALVYLPGVIAAIVQLHNGTKYKKFPHWLDKWMLTRKQFGLLSFFFAVLHAIYSLSYPMRRSYRYKLLNWAYQQVQQNKEDAWIEHDVWRMEIYVSLGIVGLAILALLAVTSIPSVSDSLTWREFHYIQSKLGIVSLLLGTIHALIFAWNKWIDIKQFVWYTPPTFMIAVFLPIVVLIFKSILFLPCLRKKILKIRHGWEDVTKINKTEICSQL

SEQ ID NO: 3802 - protein, 610 aa, Homo sapiens
MAQEIDLSALKELEREAILQVLYRDQAVQNTEEERTRKLKTHLQHLRWKGAKNTDWEHKEKCCARCQQVLGFLLHRGAVCRGCSHRVCAQCRVFLRGTHAWKCTVCFEDRNVKIKTGEWFYEERAKKFPTGGKHETVGGQLLQSYQKLSKISVVPPTPPPVSESQCSRSPGRLQEFGQFRGFNKSVENLFLSLATHVKKLSKSQNDMTSEKHLLATGPRQCVGQTERRSQSDTAVNVTTRKVSAPDILKPLNQEDPKCSTNPILKQQNLPSSPAPSTIFSGGFRHGSLISIDSTCTEMGNFDNANVTGEIEFAIHYCFKTHSLEICIKACKNLAYGEEKKKKCNPYVKTYLLPDRSSQGKRKTGVQRNTVDPTFQETLKYQVAPAQLVTRQLQVSVWHLGTLARRVFLGEVIIPLATWDFEDSTTQSFRWHPLRAKAEKYEDSVPQSNGELTVRAKLVLPSRPRKLQEAQEGTDQPSLHGQLCLVVLGAKNLPVRPDGTLNSFVKGCLTLPDQQKLRLKSPVLRKQACPQWKHSFVFSGVTPAQLRQSSLELTVWDQALFGMNDRLLGGTRLGSKGDTAVGGDACSLSKLQWQKVLSSPNLWTDMTLVLH

SEQ ID NO: 3803 - protein, 135 aa, Homo sapiens
MATVQQLEGRWRLVDSKGFDEYMKELGVGIALRKMGAMAKPDCIITCDGKNLTIKTESTLKTTQFSCTLGEKFEETTADGRKTQTVCNFTDGALVQHQEWDGKESTITRKLKDGKLVVECVMNNVTCTRIYEKVE

SEQ ID NO: 3804 - protein, 462 aa, Homo sapiens
MLLLARCLLLVLVSSLLVCSGLACGPGRGFGKRRHPKKLTPLAYKQFIPNVAEKTLGASGRYEGKISRNSERFKELTPNYNPDIIFKDEENTGADRLMTQRCKDKLNALAISVMNQWPGVKLRVTEGWDEDGHHSEESLHYEGRAVDITTSDRDRSKYGMLARLAVEAGFDWVYYESKAHIHCSVKAENSVAAKSGGCFPGSATVHLEQGGTKLVKDLSPGDRVLAADDQGRLLYSDFLTFLDRDDGAKKVFYVIETREPRERLLLTAAHLLFVAPHNDSATGEPEASSGSGPPSGGALGPRALFASRVRPGQRVYVVAERDGDRRLLPAAVHSVTLSEEAAGAYAPLTAQGTILINRVLASCYAVIEEHSWAHRAFAPFRLAHALLAALAPARTDRGGDSGGGDRGGGGGRVALTAPGAADAPGAGATAGIHWYSQLLYQIGTWLLDSEALHPLGMAVKSS

SEQ ID NO: 3805 - protein, 1894 aa, Homo sapiens
MAPEAGATLRAPRRLSWAALLLLAALLPVASSAAASVDHPLKPRHVKLLSTKMGLKVTWDPPKDATSRPVEHYNIAYGKSLKSLKYIKVNAETYSFLIEDVEPGVVYFVLLTAENHSGVSRPVYRAESPPGGEWIEIDGFPIKGPGPFNETVTEKEVPNKPLRVRVRSSDDRLSVAWKAPRLSGAKSPRRSRGFLLGYGESGRKMNYVPLTRDERTHEIKKLASESVYVVSLQSMNSQGRSQPVYRAALTKRKISEEDELDVPDDISVRVMSSQSVLVSWVDPVLEKQKKVVASRQYTVRYREKGELARWDYKQIANRRVLIENLIPDTVYEFAVRISQGERDGKWSTSVFQRTPESAPTTAPENLNVWPVNGKPTVVAASWDALPETEGKVKEYILSYAPALKPFGAKSLTYPGDTTSALVDGLQPGERYLFKIRATNRRGLGPHSKAFIVAMPTTSKADVEQNTEDNGKPEKPEPSSPSPRAPASSQHPSVPASPQGRNAKDLLLDLKNKILANGGAPRKPQLRAKKAEELDLQSTEITGEEELGSREDSPMSPSDTQDQKRTLRPPSRHGHSVVAPGRTAVRARMPALPRREGVDKPGFSLATQPRPGAPPSASASPAHHASTQGTSHRPSLPASLNDNDLVDSDEDERAVGSLHPKGAFAQPRPALSPSRQSPSSVLRDRSSVHPGAKPASPARRTPHSGAAEEDSSASAPPSRLSPPHGGSSRLLPTQPHLSSPLSKGGKDGEDAPATNSNAPSRSTMSSSVSSHLSSRTQVSEGAEASDGESHGDGDREDGGRQAEATAQTLRARPASGHFHLLRHKPFAANGRSPSRFSIGRGPRLQPSSSPQSTVPSRAHPRVPSHSDSHPKLSSGIHGDEEDEKPLPATVVNDHVPSSSRQPISRGWEDLRRSPQRGASLHRKEPIPENPKSTGADTHPQGKYSSLASKAQDVQQSTDADTEGHSPKAQPGSTDRHASPARPPAARSQQHPSVPRRMTPGRAPQQQPPPPVATSQHHPGPQSRDAGRSPSQPRLSLTQAGRPRPTSQGRSHSSSDPYTASSRGMLPTALQNQDEDAQGSYDDDSTEVEAQDVRAPAHAARAKEAAASLPKHQQVESPTGAGAGGDHRSQRGHAASPARPSRPGGPQSRARVPSRAAPGKSEPPSKRPLSSKSQQSVSAEDDEEEDAGFFKGGKEDLLSSSVPKWPSSSTPRGGKDADGSLAKEEREPAIALAPRGGSLAPVKRPLPPPPGSSPRASHVPSRLPPRSAATVSPVAGTHPWPQYTTRAPPGHFSTTPMLSLRQRMMHARFRNPLSRQPARPSYRQGYNGRPNVEGKVLPGSNGKPNGQRIINGPQGTKWVVDLDRGLVLNAEGRYLQDSHGNPLRIKLGGDGRTIVDLEGTPVVSPDGLPLFGQGRHGTPLANAQDKPILSLGGKPLVGLEVIKKTTHPPTTTMQPTTTTTPLPTTTTPRPTTATTRRTTTTRRTTTRRPTTTVRTTTRTTTTTTPTPTTPIPTCPPGTLERHDDDGNLIMSSNGIPECYAEEDEFSGLETDTAVPTEEAYVIYDEDYEFETSRPPTTTEPSTTATTPRVIPEEGAISSFPEEEFDLAGRKRFVAPYVTYLNKDPSAPCSLTDALDHFQVDSLDEIIPNDLKKSDLPPQHAPRNITVVAVEGCHSFVIVDWDKATPGDVVTGYLVYSASYEDFIRNKWSTQASSVTHLPIENLKPNTRYYFKVQAQNPHGYGPISPSVSFVTESDNPLLVVRPPGGEPIWIPFAFKHDPSYTDCHGRQYVKRTWYRKFVGVVLCNSLRYKIYLSDNLKDTFYSIGDSWGRGEDHCQFVDSHLDGRTGPQSYVEALPTIQGYYRQYRQEPVRFGNIGFGTPYYYVGWYECGVSIPGKW

SEQ ID NO: 3806 - protein, 1366 aa, Homo sapiens
MLSFVDTRTLLLLAVTLCLATCQSLQEETVRKGPAGDRGPRGERGPPGPPGRDGEDGPTGPPGPPGPPGPPGLGGNFAAQYDGKGVGLGPGPMGLMGPRGPPGAAGAPGPQGFQGPAGEPGEPGQTGPAGARGPAGPPGKAGEDGHPGKPGRPGERGVVGPQGARGFPGTPGLPGFKGIRGHNGLDGLKGQPGAPGVKGEPGAPGENGTPGQTGARGLPGERGRVGAPGPAGARGSDGSVGPVGPAGPIGSAGPPGFPGAPGPKGEIGAVGNAGPAGPAGPRGEVGLPGLSGPVGPPGNPGANGLTGAKGAAGLPGVAGAPGLPGPRGIPGPVGAAGATGARGLVGEPGPAGSKGESGNKGEPGSAGPQGPPGPSGEEGKRGPNGEAGSAGPPGPPGLRGSPGSRGLPGADGRAGVMGPPGSRGASGPAGVRGPNGDAGRPGEPGLMGPRGLPGSPGNIGPAGKEGPVGLPGIDGRPGPIGPAGARGEPGNIGFPGPKGPTGDPGKNGDKGHAGLAGARGAPGPDGNNGAQGPPGPQGVQGGKGEQGPPGPPGFQGLPGPSGPAGEVGKPGERGLHGEFGLPGPAGPRGERGPPGESGAAGPTGPIGSRGPSGPPGPDGNKGEPGVVGAVGTAGPSGPSGLPGERGAAGIPGGKGEKGEPGLRGEIGNPGRDGARGAPGAVGAPGPAGATGDRGEAGAAGPAGPAGPRGSPGERGEVGPAGPNGFAGPAGAAGQPGAKGERGAKGPKGENGVVGPTGPVGAAGPAGPNGPPGPAGSRGDGGPPGMTGFPGAAGRTGPPGPSGISGPPGPPGPAGKEGLRGPRGDQGPVGRTGEVGAVGPPGFAGEKGPSGEAGTAGPPGTPGPQGLLGAPGILGLPGSRGERGLPGVAGAVGEPGPLGIAGPPGARGPPGAVGSPGVNGAPGEAGRDGNPGNDGPPGRDGQPGHKGERGYPGNIGPVGAAGAPGPHGPVGPAGKHGNRGETGPSGPVGPAGAVGPRGPSGPQGIRGDKGEPGEKGPRGLPGLKGHNGLQGLPGIAGHHGDQGAPGSVGPAGPRGPAGPSGPAGKDGRTGHPGTVGPAGIRGPQGHQGPAGPPGPPGPPGPPGVSGGGYDFGYDGDFYRADQPRSAPSLRPKDYEVDATLKSLNNQIETLLTPEGSRKNPARTCRDLRLSHPEWSSGYYWIDPNQGCTMDAIKVYCDFSTGETCIRAQPENIPAKNWYRSSKDKKHVWLGETINAGSQFEYNVEGVTSKEMATQLAFMRLLANYASQNITYHCKNSIAYMDEETGNLKKAVILQGSNDVELVAEGNSRFTYTVLVDGCSKKTNEWGKTIIEYKTNKPSRLPFLDIAPLDIGGADQEFFVDIGPVCFK

SEQ ID NO: 3807 - protein, 797 aa, Homo sapiens
MAALAYNLGKREINHYFSVRSAKVLALVAVLLLAACHLASRRYRGNDSCEYLLSSGRFLGEKVWQPHSCMMHKYKISEAKNCLVDKHIAFIGDSRIRQLFYSFVKIINPQFKEEGNKHENIPFEDKTASVKVDFLWHPEVNGSMKQCIKVWTEDSIAKPHVIVAGAATWSIKIHNGSSEALSQYKMNITSIAPLLEKLAKTSDVYWVLQDPVYEDLLSENRKMITNEKIDAYNEAAVSILNSSTRNSKSNVKMFSVSKLIAQETIMESLDGLHLPESSRETTAMILMNVYCNKILKPVDGSCCQPRPPVTLIQKLAACFFTLSIIGYLIFYIIHRNAHRKNKPCTDLESGEEKKNIINTPVSSLEILLQSFCKLGLIMAYFYMCDRANLFMKENKFYTHSSFFIPIIYILVLGVFYNENTKETKVLNREQTDEWKGWMQLVILIYHISGASTFLPVYMHIRVLVAAYLFQTGYGHFSYFWIKGDFGIYRVCQVLFRLNFLVVVLCIVMDRPYQFYYFVPLVTVWFMVIYVTLALWPQIIQKKANGNCFWHFGLLLKLGFLLLFICFLAYSQGAFEKIFSLWPLSKCFELKGNVYEWWFRWRLDRYVVFHGMLFAFIYLALQKRQILSEGKGEPLFSNKISNFLLFISVVSFLTYSIWASSCKNKAECNELHPSVSVVQILAFILIRNIPGYARSVYSSFFAWFGKISLELFICQYHIWLAADTRGILVLIPGNPMLNIIVSTFIFVCVAHEISQITNDLAQIIIPKDNSSLLKRLACIAAFFCGLLILSSIQDKSKH

SEQ ID NO: 3808 - protein, 125 aa, Homo sapiens
MDHKPLLQERPPAYNLEAGQGDYACGPHGYGAIPAAPPPPPYPYLVTGIPTHHPRVYNIHSRTVTRYPANSIVVVGGCPVCRVGVLEDCFTFLGIFLAIILFPFGFICCFALRKRRCPNCGATFA

SEQ ID NO: 3809 - protein, 1503 aa, Homo sapiens
MPGPPALRRRLLLLLLVLLIAGSAGAAPLPQTGAGEAPPAAEVSSSFVILCVCSLIILIVLIANCVSCCKDPEIDFKEFEDNFDDEIDFTPPAEDTPSVQSPAEVFTLSVPNISLPAPSQFQPSVEGLKSQVARHSLNYIQEIGNGWFGKVLLGEIYTGTSVARVIVKELKASANPKEQDTFLKNGEPYYILQHPNILQCVGQCVEAIPYLLVFEFCDLGDLKAYLRSEQEHMRGDSQTMLLQRMACEVAAGLAAMHKLHFLHSDLALRNCFLTSDLNVKVGDYGIGFSRYKEDYIETDDKKVFPLRWTAPELVTSFQDRLLTADQTKYSNIWSLGVTLWELFDNAAQPYSNLSNLDVLNQVIRERDTKLPKPQLEQPYSDRWYEVLQFCWLSPEKRPAAEDVHRLLTYLRLQSQRDSEVDFEQQWNALKPNTNSRDSSNNAAFPILDHFARDRLGREMEEVLTVTETSQGLSFEYVWEAAKHDHFDERSRGHLDEGLSYTSIFYPVEVFESSLSDPGPGKQDDSGQDVPLRVPGVVPVFDAHNLSVGSDYYIQLEEKSGSNLELDYPPALLTTDMDNPERTGPELSQLTALRSVELEESSTDEDFFQSSTDPKDSSLPGDLHVTSGPESPFNNIFNDVDKSEDLPSHQKIFDLMELNGVQADFKPATLSSSLDNPKESVITGHFEKEKPRKIFDSEPLCLSDNLMHQDNFDPLNVQELSENFLFLQEKNLLKGSLSSKEHINDLQTELKNAGFTEAMLETSCRNSLDTELQFAENKPGLSLLQENVSTKGDDTDVMLTGDTLSTSLQSSPEVQVPPTSFETEETPRRVPPDSLPTQGETQPTCLDVIVPEDCLHQDISPDAVTVPVEILSTDARTHSLDNRSQDSPGESEETLRLTESDSVLADDILASRVSVGSSLPELGQELHNKPFSEDHHSHRRLEKNLEAVETLNQLNSKDAAKEAGLVSALSSDSTSQDSLLEDSLSAPFPASEPSLETPDSLESVDVHEALLDSLGSHTPQKLVPPDKPADSGYETENLESPEWTLHPAPEGTADSEPATTGDGGHSGLPPNPVIVISDAGDGHRGTEVTPETFTAGSQGSYRDSAYFSDNDSEPEKRSEEVPGTSPSALVLVQEQPLPEPVLPEQSPAAQDSCLEARKSQPDESCLSALHNSSDLELRATPEPAQTGVPQQVHPTEDEASSPWSVLNAELSSGDDFETQDDRPCTLASTGTNTNELLAYTNSALDKSLSSHSEGPKLKEPDIEGKYLGKLGVSGMLDLSEDGMDADEEDENSDDSDEDLRAFNLHSLSSESEDETEHPVPIILSNEDGRHLRSLLKPTAANAPDPLPEDWKKEKKAVTFFDDVTVYLFDQETPTKELGPCGGEACGPDLSGPAPASGSPYLSRCINSESSTDEEGGGFEWDDDFSPDPFMSKTTSNLLSSKPSLQTSKYFSPPPPARSTEQSWPHSAPYSRFSISPANIASFSLTHLTDSDIEQGGSSEDGEKD

SEQ ID NO: 3810 - protein, 1554 aa, Homo sapiens
MREAAAALVPPPAFAVTPAAAMEEPPPPPPPPPPPPEPETESEPECCLAARQEGTLGDSACKSPESDLEDFSDETNTENLYGTSPPSTPRQMKRMSTKHQRNNVGRPASRSNLKEKMNAPNQPPHKDTGKTVENVEEYSYKQEKKIRAALRTTERDRKKNVQCSFMLDSVGGSLPKKSIPDVDLNKPYLSLGCSNAKLPVSVPMPIARPARQTSRTDCPADRLKFFETLRLLLKLTSVSKKKDREQRGQENTSGFWLNRSNELIWLELQAWHAGRTINDQDFFLYTARQAIPDIINEILTFKVDYGSFAFVRDRAGFNGTSVEGQCKATPGTKIVGYSTHHEHLQRQRVSFEQVKRIMELLEYIEALYPSLQALQKDYEKYAAKDFQDRVQALCLWLNITKDLNQKLRIMGTVLGIKNLSDIGWPVFEIPSPRPSKGNEPEYEGDDTEGELKELESSTDESEEEQISDPRVPEIRQPIDNSFDIQSRDCISKKLERLESEDDSLGWGAPDWSTEAGFSRHCLTSIYRPFVDKALKQMGLRKLILRLHKLMDGSLQRARIALVKNDRPVEFSEFPDPMWGSDYVQLSRTPPSSEEKCSAVSWEELKAMDLPSFEPAFLVLCRVLLNVIHECLKLRLEQRPAGEPSLLSIKQLVRECKEVLKGGLLMKQYYQFMLQEVLEDLEKPDCNIDAFEEDLHKMLMVYFDYMRSWIQMLQQLPQASHSLKNLLEEEWNFTKEITHYIRGGEAQAGKLFCDIAGMLLKSTGSFLEFGLQESCAEFWTSADDSSASDEIRRSVIEISRALKELFHEARERASKALGFAKMLRKDLEIAAEFRLSAPVRDLLDVLKSKQYVKVQIPGLENLQMFVPDTLAEEKSIILQLLNAAAGKDCSKDSDDVLIDAYLLLTKHGDRARDSEDSWGTWEAQPVKVVPQVETVDTLRSMQVDNLLLVVMQSAHLTIQRKAFQQSIEGLMTLCQEQTSSQPVIAKALQQLKNDALELCNRISNAIDRVDHMFTSEFDAEVDESESVTLQQYYREAMIQGYNFGFEYHKEVVRLMSGEFRQKIGDKYISFARKWMNYVLTKCESGRGTRPRWATQGFDFLQAIEPAFISALPEDDFLSLQALMNECIGHVIGKPHSPVTAIHRNSPRPMKVPRCHSDPPNPHLIIPTPEGFRGSSVPENDRLASIAAELQFRSLSRHSSPTEERDEPAYPRGDSSGSTRRSWELRTLISQSKDTASKLGPIEAIQKSVRLFEEKRYREMRRKNIIGQVCDTPKSYDNVMHVGLRKVTFKWQRGNKIGEGQYGKVYTCISVDTGELMAMKEIRFQPNDHKTIKETADELKIFEGIKHPNLVRYFGVELHREEMYIFMEYCDEGTLEEVSRLGLQEHVIRLYSKQITIAINVLHEHGIVHRDIKGANIFLTSSGLIKLGDFGCSVKLKNNAQTMPGEVNSTLGTAAYMAPEVITRAKGEGHGRAADIWSLGCVVIEMVTGKRPWHEYEHNFQIMYKVGMGHKPPIPERLSPEGKDFLSHCLESDPKMRWTASQLLDHSFVKVCTDEE

SEQ ID NO: 3811 - protein, 631 aa, Homo sapiens
MFYAHFVLSKRGPLAKIWLAAHWDKKLTKAHVFECNLESSVESIISPKVKMALRTSGHLLLGVVRIYHRKAKYLLADCNEAFIKIKMAFRPGVVDLPEENREAAYNAITLPEEFHDFDQPLPDLDDIDVAQQFSLNQSRVEEITMREEVGNISILQENDFGDFGMDDREIMREGSAFEDDDMLVSTTTSNLLLESEQSTSNLNEKINHLEYEDQYKDDNFGEGNDGGILDDKLISNNDGGIFDDPPALSEAGVMLPEQPAHDDMDEDDNVSMGGPDSPDSVDPVEPMPTMTDQTTLVPNEEEAFALEPIDITVKETKAKRKRKLIVDSVKELDSKTIRAQLSDYSDIVTTLDLAPPTKKLMMWKETGGVEKLFSLPAQPLWNNRLLKLFTRCLTPLVPEDLRKRRKGGEADNLDEFLKEFENPEVPREDQQQQHQQRDVIDEPIIEEPSRLQESVMEASRTNIDESAMPPPPPQGVKRKAGQIDPEPVMPPQQVEQMEIPPVELPPEEPPNICQLIPELELLPEKEKEKEKEKEDDEEEEDEDASGGDQDQEERRWNKRTQQMLHGLQRALAKTGAESISLLELCRNTNRKQAAAKFYSFLVLKKQQAIELTQEEPYSDIIATPGPRFHII

SEQ ID NO: 3812 - protein, 178 aa, Homo sapiens
MSTPPLAASGMAPGPFAGPQAQQAAREVNTASLCRIGQETVQDIVYRTMEIFQLLRNMQLPNGVTYHTGTYQDRLTKLQDNLRQLSVLFRKLRLVYDKCNENCGGMDPIPVEQLIPYVEEDGSKNDDRAGPPRFASEERREIAEVNKKLKQKNQQLKQIMDQLRNLIWDINAMLAMRN

SEQ ID NO: 3813 - protein, 401 aa, Homo sapiens
MNNLLCCALVFLDISIKWTTQETFPPKYLHYDEETSHQLLCDKCPPGTYLKQHCTAKWKTVCAPCPDHYYTDSWHTSDECLYCSPVCKELQYVKQECNRTHNRVCECKEGRYLEIEFCLKHRSCPPGFGVVQAGTPERNTVCKRCPDGFFSNETSSKAPCRKHTNCSVFGLLLTQKGNATHDNICSGNSESTQKCGIDVTLCEEAFFRFAVPTKFTPNWLSVLVDNLPGTKVNAESVERIKRQHSSQEQTFQLLKLWKHQNKDQDIVKKIIQDIDLCENSVQRHIGHANLTFEQLRSLMESLPGKKVGAEDIEKTIKACKPSDQILKLLSLWRIKNGDQDTLKGLMHALKHSKTYHFPKTVTQSLKKTIRFLHSFTMYKLYQKLFLEMIGNQVQSVKISCL

SEQ ID NO: 3814 - protein, 264 aa, Homo sapiens
MRTLWMALCALSRLWPGAQAGCAEAGRCCPGRDPACFARGWRLDRVYGTCFCDQACRFTGDCCFDYDRACPARPCFVGEWSPWSGCADQCKPTTRVRRRSVQQEPQNGGAPCPPLEERAGCLEYSTPQGQDCGHTYVPAFITTSAFNKERTRQATSPHWSTHTEDAGYCMEFKTESLTPHCALENWPLTRWMQYLREGYTVCVDCQPPAMNSVSLRCSGDGLDSDGNQTLHWQAIGNPRCQGTWKKVRRVDQCSCPAVHSFIFI

SEQ ID NO: 3815 - protein, 387 aa, Homo sapiens
MTRDEALPDSHSAQDFYENYEPKEILGRGVSSVVRRCIHKPTSQEYAVKVIDVTGGGSFSPEEVRELREATLKEVDILRKVSGHPNIIQLKDTYETNTFFFLVFDLMKRGELFDYLTEKVTLSEKETRKIMRALLEVICTLHKLNIVHRDLKPENILLDDNMNIKLTDFGFSCQLEPGERLREVCGTPSYLAPEIIECSMNEDHPGYGKEVDMWSTGVIMYTLLAGSPPFWHRKQMLMLRMIMSGNYQFGSPEWDDYSDTVKDLVSRFLVVQPQNRYTAEEALAHPFFQQYLVEEVRHFSPRGKFKVIALTVLASVRIYYQYRRVKPVTREIVIRDPYALRPLRRLIDAYAFRIYGHWVKKGQQQNRAALFENTPKAVLLSLAEEDY

SEQ ID NO: 3816 - protein, 915 aa, Homo sapiens
MPRGSRARGSKRKRSWNTECPSFPGERPLQVRRAGLRTAGAAASLSEAWLRCGEGFQNTSGNPSLTAEEKTITEKHLELCPRPKQETTTSKSTSGLTDITWSSSGSDLSDEDKTLSQLQRDELQFIDWEIDSDRAEASDCDEFEDDEGAVEISDCASCASNQSLTSDEKLSELPKPSSIEILEYSSDSEKEDDLENVLLIDSESPHKYHVQFASDARQIMERLIDPRTKSTETILHTPQKPTAKFPRTPENSAKKKLLRGGLAERLNGLQNRERSAISLWRHQCISYQKTLSGRKSGVLTVKILELHEECAMQVAMCEQLLGSPATSSSQSVAPRPGAGLKVLFTKETAGYLRGRPQDTVRIFPPWQKLIIPSGSCPVILNTYFCEKVVAKEDSEKTCEVYCPDIPLPRRSISLAQMFVIKGLTNNSPEIQVVCSGVATTGTAWTHGHKEAKQRIPTSTPLRDSLLDVVESQGAASWPGAGVRVVVQRVYSLPSRDSTRGQQGASSGHTDPAGTRACLLVQDACGMFGEVHLEFTMSKARQLEGKSCSLVGMKVLQKVTRGRTAGIFSLIDTLWPPAIPLKTPGRDQPCEEIKTHLPPPALCYILTAHPNLGQIDIIDEDPIYKLYQPPVTRCLRDILQMNDLGTRCSFYATVIYQKPQLKSLLLLEQREIWLLVTDVTLQTKEERDPRLPKTLLVYVAPLCVLGSEVLEALAGAAPHSLFFKDALRDQGRIVCAERTVLLLQKPLLSVVSGASSCELPGPVMLDSLDSATPVNSICSVQGTVVGVDESTAFSWPVCDMCGNGRLEQRPEDRGAFSCGDCSRVVTSPVLKRHLQVFLDCRSRPQCRVKVKLLQRSISSLLRFAAGEDGSYEVKSVLGKEVGLLNCFVQSVTAHPTSCIGLEEIELLSAGGASAEH

SEQ ID NO: 3817 - protein, 435 aa, Homo sapiens
MPHLENVVLCRESQVSILQSLFGERHHFSFPSIFIYGHTASGKTYVTQTLLKTLELPHVFVNCVECFTLRLLLEQILNKLNHLSSSEDGCSTEITCETFNDFVRLFKQVTTAENLKDQTVYIVLDKAEYLRDMEANLLPGFLRLQELADRNVTVLFLSEIVWEKFRPNTGCFEPFVLYFPDYSIGNLQKILSHDHPPEYSADFYAAYINILLGVFYTVCRDLKELRHLAVLNFPKYCEPVVKGEASERDTRKLWRNIEPHLKKAMQTVYLREISSSQWEKLQKDDTDPGQLKGLSAHTHVELPYYSKFILIAAYLASYNPARTDKRFFLKHHGKIKKTNFLKKHEKTSNHLLGPKPFPLDRLLAILYSIVDSRVAPTANIFSQITSLVTLQLLTLVGHDDQLDGPKYKCTVSLDFIRAIARTVNFDIIKYLYDFL

SEQ ID NO: 3818 - protein, 97 aa, Homo sapiens
MRIIALLAAILLVALQVRAGPLQARGDEAPGQEQRGPEDQDISISFAWDKSSALQVSGSTRGMVCSCRLVFCRRTELRVGNCLIGGVSFTYCCTRVD

SEQ ID NO: 3819 - protein, 100 aa, Homo sapiens
MRTLTILTAVLLVALQAKAEPLQAEDDPLQAKAYEADAQEQRGANDQDFAVSFAEDASSSLRALGSTRAFTCHCRRSCYSTEYSYGTCTVMGINHRFCCL

SEQ ID NO: 3820 - protein, 505 aa, Homo sapiens
MPLVEETSLLEDSSVTFPVVIIGNGPSGICLSYMLSGYRPYLSSEAIHPNTILNSKLEEARHLSIVDQDLEYLSEGLEGRSSNPVAVLFDTLLHPDADFGYDYPSVLHWKLEQHHYIPHVVLGKGPPGGAWHNMEGSMLTISFGSWMELPGLKFKDWVSSKRRSLKGDRVMPEEIARYYKHYVKVMGLQKNFRENTYITSVSRLYRDQDDDDIQDRDISTKHLQIEKSNFIKRNWEIRGYQRIADGSHVPFCLFAENVALATGTLDSPAHLEIEGEDFPFVFHSMPEFGAAINKGKLRGKVDPVLIVGSGLTAADAVLCAYNSNIPVIHVFRRRVTDPSLIFKQLPKKLYPEYHKVYHMMCTQSYSVDSNLLSDYTSFPEHRVLSFKSDMKCVLQSVSGLKKIFKLSAAVVLIGSHPNLSFLKDQGCYLGHKSSQPITCKGNPVEIDTYTYECIKEANLFALGPLVGDNFVRFLKGGALGVTRCLATRQKKKHLFVERGGGDGIA

SEQ ID NO: 3821 - protein, 68 aa, Homo sapiens
MRTSYLLLFTLCLLLSEMASGGNFLTGLGHRSDHYNCVSSGGQCLYSACPIFTKIQGTCYRGKAKCCK

SEQ ID NO: 3822 - protein, 855 aa, Homo sapiens
MAALGVAEAVAAPHPAEGAETAEAVELSRALSRLLPGLEADSKPGRRRALEALRRALEEPGPAADPTAFQGPWARLLLPRLLRCLSDPAEGCRALAVHLLDLGLRRAARPRDALPRLLPALAARLAGPVPARRPPEACEELRLALVQLLGLAVDLCGAALAPHLDDALRALRCSLLDPFAAVRRESCSCAAALAQATPDHFHMQSESLIGPLMQTISHQHWKVRVAAIEATGAVIHFGNGKSVDDVLSHFAQRLFDDVPQVRRAVASVVGGWLLCLRDRYSFFHKLIPLLLSSLNDEVPEVRQLAASLWEDVGLQWQKENEEDLKDKLDFAPPTPPHYPPHERRPVLGCRELVFRNLSKILPALCHDITDWVVGTRVKSAQLLPVLLLHAEDHATQHLEVVLRTLFQACTDEEAAVVQSCTRSAELVGTFVSPEVFLKLILSTLKKTPSASGLLVLASAMRGCPREALQPHLAAIATELAQAHICQASENDLYLERLLLCVQALVSVCHEDCGVASLQLLDVLLTIVALAGATGLRDKAQETMDSLAMVEGVSSCQDLYRKHIGPLLERVTASHLDWTAHSPELLQFSVIVAQSGPALGEALPHVVPTLRACLQPSQDPQMRLKLFSILSTVLLRATDTINSQGQFPSYLETVTKDILAPNLQWHAGRTAAAIRTAAVSCLWALTSSEVLSAEQIRDVQETLMPQVLTTLEEDSKMTRLISCRIINTFLKTSGGMTDPEKLIRIYPELLKRLDDVSNDVRMAAASTLVTWLQCVKGANAKSYYQSSVQYLYRELLVHLDDPERAIQDAILEVLKEGSGLFPDLLVRETEAVIHKHRSATYCEQLLQHVQAVPATQ

SEQ ID NO: 3823 - protein, 497 aa, Homo sapiens
MTVFLSFAFLAAILTHIGCSNQRRSPENSGRRYNRIQHGQCAYTFILPEHDGNCRESTTDQYNTNALQRDAPHVEPDFSSQKLQHLEHVMENYTQWLQKLENYIVENMKSEMAQIQQNAVQNHTATMLEIGTSLLSQTAEQTRKLTDVETQVLNQTSRLEIQLLENSLSTYKLEKQLLQQTNEILKIHEKNSLLEHKILEMEGKHKEELDTLKEEKENLQGLVTRQTYIIQELEKQLNRATTNNSVLQKQQLELMDTVHNLVNLCTKEVLLKGGKREEEKPFRDCADVYQAGFNKSGIYTIYINNMPEPKKVFCNMDVNGGGWTVIQHREDGSLDFQRGWKEYKMGFGNPSGEYWLGNEFIFAITSQRQYMLRIELMDWEGNRAYSQYDRFHIGNEKQNYRLYLKGHTGTAGKQSSLILHGADFSTKDADNDNCMCKCALMLTGGWWFDACGPSNLNGMFYTAGQNHGKLNGIKWHYFKGPSYSLRSTTMMIRPLDF

SEQ ID NO: 3824 - protein, 436 aa, Homo sapiens
MLLSPKFSLSTIHIRLTAKGLLRNLRLPSGFRRSTVVFHTVEKSRQKNPRSLCIQPQTAPDALPPEKTLELTQYKTKCENQSGFILQLKQLLACGNTKFEALTVVIQHLLSEREEALKQHKTLSQELVNLRGELVTASTTCEKLEKARNELQTVYEAFVQQHQAEKTERENRLKEFYTREYEKLRDTYIEEAEKYKMQLQEQFDNLNAAHETSKLEIEASHSEKLELLKKAYEASLSEIKKGHEIEKKSLEDLLSEKQESLEKQINDLKSENDALNEKLKSEEQKRRAREKANLKNPQIMYLEQELESLKAVLEIKNEKLHQQDIKLMKMEKLVDNNTALVDKLKRFQQENEELKARMDKHMAISRQLSTEQAVLQESLEKESKVNKRLSMENEELLWKLHNGDLCSPKRSPTSSAIPLQSPRNSGSFPSPSISPR

SEQ ID NO: 3825 - protein, 82 aa, Homo sapiens
MRQRLLPSVTSLLLVALLFPGSSQARHVNHSATEALGELRERAPGQGTNGFQLLRHAVKRDLLPPRTPPYQGTGQQHRQRCG

SEQ ID NO: 3826 - protein, 103 aa, Homo sapiens
MRQRLLPSVTSLLLVALLFPGSSQARHVNHSATEALGELRERAPGQGTNGFQLLRHAVKRDLLPPRTPPYQVHISHREARGPSFRICVDFLGPRWARGCSTGN

SEQ ID NO: 3827 - protein, 904 aa, Homo sapiens
MAAIRALQQWCRQQCEGYRDVNICNMTTSFRDGLAFCAILHRHRPDLINFSALKKENIYENNKLAFRVAEEHLGIPALLDAEDMVALKVPDRLSILTYVSQYYNYFHGRSPIGGMAGVKRASEDSEEEPSGKKAPVQAAKLPSPAPARKPPLSPAQTNPVVQRRNEGAGGPPPKTDQALAGSLVSSTCGVCGKHVHLVQRHLADGRLYHRSCFRCKQCSCTLHSGAYKATGEPGTFVCTSHLPAAASASPKLTGLVPRQPGAMGVDSRTSCSPQKAQEANKARPSAWEPAAGNSPARASVPAAPNPAATSATSVHVRSPARPSESRLAPTPTEGKVRPRVTNSSPMGWSSAAPCTAAAASHPAVPPSAPDPRPATPQGGGAPRVAAPQTTLSSSSTSAATVDPPAWTPSASRTQQARNKFFQTSAVPPGTSLSGRGPTPSLVLSKDSSKEQARNFLKQALSALEEAGAPAPGRPSPATAAVPSSQPKTEAPQASPLAKPLQSSSPRVLGLPSRMEPPAPLSTSSTSQASALPPAGRRNLAESSGVGRVGAGSRPKPEAPMAKGKSTTLTQDMSTSLQEGQEDGPAGWRANLKPVDRRSPAERTLKPKEPRALAEPRAGEAPRKVSGSFAGSVHITLTPVRPDRTPRPASPGPSLPARSPSPPRRRRLAVPASLDVCDNWLRPEPPGQEARVQSWKEEEKKPHLQGKPGRPLSPANVPALPGETVTSPVRLHPDYLSPEEIQRQLQDIERRLDALELRGVELEKRLRAAEGDDAEDSLMVDWFWLIHEKQLLLRQESELMYKSKAQRLEEQQLDIEGELRRLMAKPEALKSLQERRREQELLEQYVSTVNDRSDIVDSLDEDRLREQEEDQMLRDMIEKLGLQRKKSKFRLSKIWSPKSKSSPSQ

SEQ ID NO: 3828 - protein, 260 aa, Homo sapiens
MQKYEKLEKIGEGTYGTVFKAKNRETHEIVALKRVRLDDDDEGVPSSALREICLLKELKHKNIVRLHDVLHSDKKLTLVFEFCDQDLKKYFDSCNGDLDPEIVKNGELKLADFGLARAFGIPVRCYSAEVVTLWYRPPDVLFGAKLYSTSIDMWSAGCIFAELANAGRPLFPGNDVDDQLKRIFRLLGTPTEEQWPSMTKLPDYKPYPMYPATTSLVNVVPKLNATGRDLLQNLLKCNPVQRISAEEALQHPYFSDFCPP

SEQ ID NO: 3829 - protein, 549 aa, Homo sapiens
MRRPRGEPGPRAPRPTEGATCAGPGESWSPSPNSMLRVLLSAQTSPARLSGLLLIPPVQPCCLGPSKWGDRPVGGGPSAGPVQGLQRLLEQAKSPGELLRWLGQNPSKVRAHHYSVALRRLGQLLGSRPRPPPVEQVTLQDLSQLIIRNCPSFDIHTIHVCLHLAVLLGFPSDGPLVCALEQERRLRLPPKPPPPLQPLLRGGQGLEAALSCPRFLRYPRQHLISSLAEARPEELTPHVMVLLAQHLARHRLREPQLLEAIAHFLVVQETQLSSKVVQKLVLPFGRLNYLPLEQQFMPCLERILAREAGVAPLATVNILMSLCQLRCLPFRALHFVFSPGFINYISGTPHALIVRRYLSLLDTAVELELPGYRGPRLPRRQQVPIFPQPLITDRARCKYSHKDIVAEGLRQLLGEEKYRQDLTVPPGYCTDFLLCASSSGAVLPVRTQDPFLPYPPRSCPQGQAASSATTRDPAQRVVLVLRERWHFCRDGRVLLGSRALRERHLGLMGYQLLPLPFEELESQRGLPQLKSYLRQKLQALGLRWGPEGG

SEQ ID NO: 3830 - protein, 246 aa, Homo sapiens
MTLIEGVGDEVTVLFSVLACLLVLALAWVSTHTAEGGDPLPQPSGTPTPSQPSAAMAATDSMRGEAPGAETPSLRHRGQAAQPEPSTGFTATPPAPDSPQEPLVLRLKFLNDSEQVARAWPHDTIGSLKRTQFPGREQQVRLIYQGQLLGDDTQTLGSLHLPPNCVLHCHVSTRVGPPNPPCPPGSEPGPSGLEIGSLLLPLLLLLLLLLWYCQIQYRPFFPLTATLGLAGFTLLLSLLAFAMYRP

SEQ ID NO: 3831 - protein, 113 aa, Homo sapiens
MAALGSPSHTFRGLLRELRYLSAATGRPYRDTAAYRYLVKAFRAHRVTSEKLCRAQHELHFQAATYLCLLRSIRKHVALHQEFHGKGERSVEESAGLVGLKLPHQPGGKGWEP

SEQ ID NO: 3832 - protein, 394 aa, Homo sapiens
MALEVGDMEDGQLSDSDSDMTVAPSDRPLQLPKVLGGDSAMRAFQNTATACAPVSHYRAVESVDSSEESFSDSDDDSCLWKRKRQKCFNPPPKPEPFQFGQSSQKPPVAGGKKINNIWGAVLQEQNQDAVATELGILGMEGTIDRSRQSETYNYLLAKKLRKESQEHTKDLDKELDEYMHGGKKMGSKEEENGQGHLKRKRPVKDRLGNRPEMNYKGRYEITAEDSQEKVADEISFRLQEPKKDLIARVVRIIGNKKAIELLMETAEVEQNGGLFIMNGSRRRTPGGVFLNLLKNTPSISEEQIKDIFYIENQKEYENKKAARKRRTQVLGKKMKQAIKSLNFQEDDDTSRETFASDTNEALASLDESQEGHAEAKLEAEEAIEVDHSHDLDIF

SEQ ID NO: 3833 - protein, 75 aa, Homo sapiens
MAPEVLPKPRMRGLLARRLRNHMAVAFVLSLGVAALYKFRVADQRKKAYADFYRNYDVMKDFEEMRKAGIFQSVK

SEQ ID NO: 3834 - protein, 312 aa, Homo sapiens
MGSKALPAPIPLHPSLQLTNYSFLQAVNTFPATVDHLQGLYGLSAVQTMHMNHWTLGYPNVHEITRSTITEMAAAQGLVDARFPFPALPFTTHLFHPKQGAIAHVLPALHKDRPRFDFANLAVAATQEDPPKMGDLSKLSPGLGSPISGLSKLTPDRKPSRGRLPSKTKKEFICKFCGRHFTKSYNLLIHERTHTDERPYTCDICHKAFRRQDHLRDHRYIHSKEKPFKCQECGKGFCQSRTLAVHKTLHMQESPHKCPTCGRTFNQRSNLKTHLLTHTDIKPYSCEQCGKVFRRNCDLRRHSLTHTPRQDF

SEQ ID NO: 3835 - protein, 315 aa, Homo sapiens
MTGQGQSASGSSAWSTVFRHVRYENLIAGVSGGVLSNLALHPLDLVKIRFAVSDGLELRPKYNGILHCLTTIWKLDGLRGLYQGVTPNIWGAGLSWGLYFFFYNAIKSYKTEGRAERLEATEYLVSAAEAGAMTLCITNPLWVTKTRLMLQYDAVVNSPHRQYKGMFDTLVKIYKYEGVRGLYKGFVPGLFGTSHGALQFMAYELLKLKYNQHINRLPEAQLSTVEYISVAALSKIFAVAATYPYQVVRARLQDQHMFYSGVIDVITKTWRKEGVGGFYKGIAPNLIRVTPACCITFVVYENVSHFLLDLREKRK

SEQ ID NO: 3836 - protein, 597 aa, Homo sapiens
MQWPPPWRRSPLVSATPPPGPTRGLLCPRRVSEAGDSSTEGARTGHRHYVTPAESAMEGRSQPLPSLRPASPTNAPAHGRGSDCTAKEPPLANVCRQNYGAAQDPVEPAGRRSASHVTGSSLGKAEVACGRRWRWAELLADTSWSPAGRATEMKVKMLSRNPDNYVRETKLDLQRVPRNYDPALHPFEVPREYIRALNATKLERVFAKPFLASLDGHRDGVNCLAKHPEKLATVLSGACDGEVRIWNLTQRNCIRTIQAHEGFVRGICTRFCGTSFFTVGDDKTVKQWKMDGPGYGDEEEPLHTILGKTVYTGIDHHWKEAVFATCGQQVDIWDEQRTNPICSMTWGFDSISSVKFNPIETFLLGSCASDRNIVLYDMRQATPLKKVILDMRTNTICWNPMEAFIFTAANEDYNLYTFDMRALDTPVMVHMDHVSAVLDVDYSPTGKEFVSASFDKSIRIFPVDKSRSREVYHTKRMQHVICVKWTSDSKYIMCGSDEMNIRLWKANASEKLGVLTSREKAAKDYNQKLKEKFQHYPHIKRIARHRHLPKSIYSQIQEQRIMKEARRRKEVNRIKHSKPGSVPLVSEKKKHVVAVVK

SEQ ID NO: 3837 - protein, 1812 aa, Homo sapiens
MAVDSAMELLFLDTFKHPSAEQSSHIDVVRFPCVVYINEVRVIPPGVRAHSSLPDNRAYGETSPHTFQLDLFFNNVSKPSAPVFDRLGSLEYDENTSIIFRPNSKVNTDGLVLRGWYNCLTLAIYGSVDRVISHDRDSPPPPPPPPPPPQPQPSLKRNPKHADGEKEDQFNGSPPRPQPRGPRTPPGPPPPDDDEDDPVPLPVSGDKEEDAPHREDYFEPISPDRNSVPQEGQYSDEGEVEEEQQEEGEEDEDDVDVEEEEDEDEDDRRTVDSIPEEEEEDEEEEGEEDEEGEGDDGYEQISSDEDGIADLERETFKYPNFDVEYTAEDLASVPPMTYDPYDRELVPLLYFSCPYKTTFEIEISRMKDQGPDKENSGAIEASVKLTELLDLYREDRGAKWVTALEEIPSLIIKGLSYLQLKNTKQDSLGQLVDWTMQALNLQVALRQPIALNVRQLKAGTKLVSSLAECGAQGVTGLLQAGVISGLFELLFADHVSSSLKLNAFKALDSVISMTEGMEAFLRGRQNEKSGYQKLLELILLDQTVRVVTAGSAILQKCHFYEVLSEIKRLGDHLAEKTSSLPNHSEPDHDTDAGLERTNPEYENEVEASMDMDLLESSNISEGEIERLINLLEEVFHLMETAPHTMIQQPVKSFPTMARITGPPERDDPYPVLFRYLHSHHFLELVTLLLSIPVTSAHPGVLQATKDVLKFLAQSQKGLLFFMSEYEATNLLIRALCHFYDQDEEEGLQSDGVIDDAFALWLQDSTQTLQCITELFSHFQRCTASEETDHSDLLGTLHNLYLITFNPVGRSAVGHVFSLEKNLQSLITLMEYYSKEALGDSKSKKSVAYNYACILILVVVQSSSDVQMLEQHAASLLKLCKADENNAKLQELGKWLEPLKNLRFEINCIPNLIEYVKQNIDNLMTPEGVGLTTALRVLCNVACPPPPVEGQQKDLKWNLAVIQLFSAEGMDTFIRVLQKLNSILTQPWRLHVNMGTTLHRVTTISMARCTLTLLKTMLTELLRGGSFEFKDMRVPSALVTLHMLLCSIPLSGRLDSDEQKIQNDIIDILLTFTQGVNEKLTISEETLANNTWSLMLKEVLSSILKVPEGFFSGLILLSELLPLPLPMQTTQVIEPHDISVALNTRKLWSMHLHVQAKLLQEIVRSFSGTTCQPIQHMLRRICVQLCDLASPTALLIMRTVLDLIVEDLQSTSEDKEKQYTSQTTRLLALLDALASHKACKLAILHLINGTIKGDERYAEIFQDLLALVRSPGDSVIRQQCVEYVTSILQSLCDQDIALILPSSSEGSISELEQLSNSLPNKELMTSICDCLLATLANSESSYNCLLTCVRTMMFLAEHDYGLFHLKSSLRKNSSALHSLLKRVVSTFSKDTGELASSFLEFMRQILNSDTIGCCGDDNGLMEVEGAHTSRTMSINAAELKQLLQSKEESPENLFLELEKLVLEHSKDDDNLDSLLDSVVGLKQMLESSGDPLPLSDQDVEPVLSAPESLQNLFNNRTAYVLADVMDDQLKSMWFTPFQAEEIDTDLDLVKVDLIELSEKCCSDFDLHSELERSFLSEPSSPGRTKTTKGFKLGKHKHETFITSSGKSEYIEPAKRAHVVPPPRGRGRGGFGQGIRPHDIFRQRKQNTSRPPSMHVDDFVAAESKEVVPQDGIPPPKRPLKVSQKISSRGGFSGNRGGRGAFHSQNRFFTPPASKGNYSRREGTRGSSWSAQNTPRGNYNESRGGQSNFNRGPLPPLRPLSSTGYRPSPRDRASRGRGGLGPSWASANSGSGGSRGKFVSGGSGRGRHVRSFTR

SEQ ID NO: 3838 - protein, 296 aa, Homo sapiens
MTLNNVTMRQGTVGMQPQQQRWSIPADGRHLMVQKEPHQYSHRNRHSATPEDHCRRSWSSDSTDSVISSESGNTYYRVVLIGEQGVGKSTLANIFAGVHDSMDSDCEVLGEDTYERTLMVDGESATIILLDMWENKGENEWLHDHCMQVGDAYLIVYSITDRASFEKASELRIQLRRARQTEDIPIILVGNKSDLVRCREVSVSEGRACAVVFDCKFIETSAAVQHNVKELFEGIVRQVRLRRDSKEKNERRLAYQKRKESMPRKARRFWGKIVAKNNKNMAFKLKSKSCHDLSVL

SEQ ID NO: 3839 - protein, 163 aa, Homo sapiens
MEHYRKAGSVELPAPSPMPQLPPDTLEMRVRDGSKIRNLLGLALGRLEGGSARHVVFSGSGRAAGKAVSCAEIVKRRVPGLHQLTKLRFLQTEDSWVPASPDTGLDPLTVRRHVPAVWVLLSRDPLDPNECGYQPPGAPPGLGSMPSSSCGPRSRRRARDTRS

SEQ ID NO: 3840 - protein, 240 aa, Homo sapiens
MSRLLPLLRSRTARSLRPGPAAAAAPRPPSWCCCGRGLLALAPPGGLPGGPRRLGTHPKKEPMEALNTAQGARDFIYSLHSTERSCLLKELHRFESIAIAQEKLEAPPPTPGQLRYVFIHNAIPFIGFGFLDNAIMIVAGTHIEMSIGIILGISTMAAAALGNLVSDLAGLGLAGYVEALASRLGLSIPDLTPKQVDMWQTRLSTHLGKAVGVTIGCILGMFPLIFFGGGEEDEKLETKS

SEQ ID NO: 3841 - protein, 502 aa, Homo sapiens
MASKKLGADFHGTFSYLDDVPFKTGDKFKTPAKVGLPIGFSLPDCLQVVREVQYDFSLEKKTIEWAEEIKKIEEAEREAECKIAEAEAKVNSKSGPEGDSKMSFSKTHSTATMPPPINPILASLQHNSILTPTRVSSSATKQKVLSPPHIKADFNLADFECEEDPFDNLELKTIDEKEELRNILVGTTGPIMAQLLDNNLPRGGSGSVLQDEEVLASLERATLDFKPLHKPNGFITLPQLGNCEKMSLSSKVSLPPIPAVSNIKSLSFPKLDSDDSNQKTAKLASTFHSTSCLRNGTFQNSLKPSTQSSASELNGHHTLGLSALNLDSGTEMPALTSSQMPSLSVLSVCTEESSPPNTGPTVTPPNFSVSQVPNMPSCPQAYSELQMLSPSERQCVETVVNMGYSYECVLRAMKKKGENIEQILDYLFAHGQLCEKGFDPLLVEEALEMHQCSEEKMMEFLQLMSKFKEMGFELKDIKEVLLLHNNDQDNALEDLMARAGAS

SEQ ID NO: 3842 - protein, 1288 aa, Homo sapiens
MASVAWAVLKVLLLLPTQTWSPVGAGNPPDCDAPLASALPRSSFSSSSELSSSHGPGFSRLNRRDGAGGWTPLVSNKYQWLQIDLGERMEVTAVATQGGYGSSDWVTSYLLMFSDGGRNWKQYRREESIWGFPGNTNADSVVHYRLQPPFEARFLRFLPLAWNPRGRIGMRIEVYGCAYKSEVVYFDGQSALLYRLDKKPLKPIRDVISLKFKAMQSNGILLHREGQHGNHITLELIKGKLVFFLNSGNAKLPSTIAPVTLTLGSLLDDQHWHSVLIELLDTQVNFTVDKHTHHFQAKGDSSYLDLNFEISFGGIPTPGRSRAFRRKSFHGCLENLYYNGVDVTELAKKHKPQILMMGNVSFSCPQPQTVPVTFLSSRSYLALPGNSGEDKVSVTFQFRTWNRAGHLLFGELRRGSGSFVLFLKDGKLKLSLFQPGQSPRNVTAGAGLNDGQWHSVSFSAKWSHMNVVVDDDTAVQPLVAVLIDSGDTYYFGGCLDNSSGSGCKSPLGGFQGCLRLITIGDKAVDPILVQQGALGSFRDLQIDSCGITDRCLPSYCEHGGECSQSWDTFSCDCLGTGYTGETCHSSLYEQSCEAHKHRGNPSGLYYIDADGSGPLGPFLVYCNMTADAAWTVVQHGGPDAVTLRGAPSGHPRSAVSFAYAAGAGQLRSAVNLAERCEQRLALRCGTARRPDSRDGTPLSWWVGRTNETHTSWGGSLPDAQKCTCGLEGNCIDSQYYCNCDAGRNEWTSDTIVLSQKEHLPVTQIVMTDAGRPHSEAAYTLGPLLCRGDQSFWNSASFNTETSYLHFPAFHGELTADVCFFFKTTVSSGVFMENLGITDFIRIELRAPTEVTFSFDVGNGPCEVTVQSPTPFNDNQWHHVRAERNVKGASLQVDQLPQKMQPAPADGHVRLQLNSQLFIGGTATRQRGFLGCIRSLQLNGVALDLEERATVTPGVEPGCAGHCSTYGHLCRNGGRCREKRRGVTCDCAFSAYDGPFCSNEISAYFATGSSMTYHFQEHYTLSENSSSLVSSLHRDVTLTREMITLSFRTTRTPSLLLYVSSFYEEYLSVILANNGSLQIRYKLDRHQNPDAFTFDFKNMADGQLHQVKINREEAVVMVEVNQSTKKQVILSSGTEFNAVKSLILGKVLEAAGADPDTRRAATSGFTGCLSAVRFGRAAPLKAALRPSGPSRVTVRGHVAPMARCAAGAASGSPARELAPRLAGGAGRSGPADEGEPLVNADRRDSAVIGGVIAVVIFILLCITAIAIRIYQQRKLRKENESKVSKKEEC

SEQ ID NO: 3843 - protein, 369 aa, Homo sapiens
MADSAQAQKLVYLVTGGCGFLGEHVVRMLLQREPRLGELRVFDQHLGPWLEELKTGPVRVTAIQGDVTQAHEVAAAVAGAHVVIHTAGLVDVFGRASPKTIHEVNVQGTRNVIEACVQTGTRFLVYTSSMEVVGPNTKGHPFYRGNEDTPYEAVHRHPYPCSKALAEWLVLEANGRKVRGGLPLVTCALRPTGIYGEGHQIMRDFYRQGLRLGGWLFRAIPASVEHGRVYVGNVAWMHVLAARELEQRATLMGGQVYFCYDGSPYRSYEDFNMEFLGPCGLRLVGARPLLPYWLLVFLAALNALLQWLLRPLVLYAPLLNPYTLAVANTTFTVSTDKAQRHFGYEPLFSWEDSRTRTILWVQAATGSAQ

SEQ ID NO: 3844 - protein, 462 aa, Homo sapiens
MQLRKMQTVKKEQASLDASSNVDKMMVLNSALTEVSEDSTTGEELLLSEGSVGKNKSSACRRKREFIPDEKKDAMYWEKRRKNNEAAKRSREKRRLNDLVLENKLIALGEENATLKAELLSLKLKFGLISSTAYAQEIQKLSNSTAVYFQDYQTSKSNVSSFVDEHEPSMVSSSCISVIKHSPQSSLSDVSEVSSVEHTQESSVQGSCRSPENKFQIIKQEPMELESYTREPRDDRGSYTASIYQNYMGNSFSGYSHSPPLLQVNRSSSNSPRTSETDDGVVGKSSDGEDEQQVPKGPIHSPVELKHVHATVVKVPEVNSSALPHKLRIKAKAMQIKVEAFDNEFEATQKLSSPIDMTSKRHFELEKHSAPSMVHSSLTPFSVQVTNIQDWSLKSEHWHQKELSGKTQNSFKTGVVEMKDSGYKVSDPENLYLKQGIANLSAEVVSLKRLIATQPISASDSG

SEQ ID NO: 3845 - protein, 229 aa, Homo sapiens
MKSSDIDQDLFTDSYCKVCSAQLISESQRVAHYESRKHASKVRLYYMLHPRDGGCPAKRLRSENGSDADMVDKNKCCTLCNMSFTSAVVADSHYQGKIHAKRLKLLLGEKTPLKTTATPLSPLKPPRMDTAPVVASPYQRRDSDRYCGLCAAWFNNPLMAQQHYDGKKHKKNAARVALLEQLGTTLDMGELRGLRRNYRCTICSVSLNSIEQYHAHLKGSKHQTNLKNK

SEQ ID NO: 3846 - protein, 235 aa, Homo sapiens
MKYVFYLGVLAGTFFFADSSVQKEDPAPYLVYLKSHFNPCVGVLIKPSWVLAPAHCYLPNLKVMLGNFKSRVRDGTEQTINPIQIVRYWNYSHSAPQDDLMLIKLAKPAMLNPKVQPLTLATTNVRPGTVCLLSGLDWSQENSGRHPDLRQNLEAPVMSDRECQKTEQGKSHRNSLCVKFVKVFSRIFGEVAVATVICKDKLQGIEVGHFMGGDVGIYTNVYKYVSWIENTAKDK

SEQ ID NO: 3847 - protein, 437 aa, Homo sapiens
MKCLGKRRGQAAAFLPLCWLFLKILQPGHSHLYNNRYAGDKVIRFIPKTEEEAYALKKISYQLKVDLWQPSSISYVSEGTVTDVHIPQNGSRALLAFLQEANIQYKVLIEDLQKTLEKGSSLHTQRNRRSLSGYNYEVYHSLEEIQNWMHHLNKTHSGLIHMFSIGRSYEGRSLFILKLGRRSRLKRAVWIDCGIHAREWIGPAFCQWFVKEALLTYKSDPAMRKMLNHLYFYIMPVFNVDGYHFSWTNDRFWRKTRSRNSRFRCRGVDANRNWKVKWCDEGASMHPCDDTYCGPFPESEPEVKAVANFLRKHRKHIRAYLSFHAYAQMLLYPYSYKYATIPNFRCVESAAYKAVNALQSVYGVRYRYGPASTTLYVSSGSSMDWAYKNGIPYAFAFELRDTGYFGFLLPEMLIKPTCTETMLAVKNITMHLLKKCP

SEQ ID NO: 3848 - protein, 501 aa, Homo sapiens
MSSSGTPDLPVLLTDLKIQYTKIFINNEWHDSVSGKKFPVFNPATEEELCQVEEGDKEDVDKAVKAARQAFQIGSPWRTMDASERGRLLYKLADLIERDRLLLATMESMNGGKLYSNAYLNDLAGCIKTLRYCAGWADKIQGRTIPIDGNFFTYTRHEPIGVCGQIIPWNFPLVMLIWKIGPALSCGNTVVVKPAEQTPLTALHVASLIKEAGFPPGVVNIVPGYGPTAGAAISSHMDIDKVAFTGSTEVGKLIKEAAGKSNLKRVTLELGGKSPCIVLADADLDNAVEFAHHGVFYHQGQCCIAASRIFVEESIYDEFVRRSVERAKKYILGNPLTPGVTQGPQIDKEQYDKILDLIESGKKEGAKLECGGGPWGNKGYFVQPTVFSNVTDEMRIAKEEIFGPVQQIMKFKSLDDVIKRANNTFYGLSAGVFTKDIDKAITISSALQAGTVWVNCYGVVSAQCPFGGFKMSGNGRELGEYGFHEYTEVKTVTVKISQKNS

SEQ ID NO: 3849 - protein, 871 aa, Homo sapiens
MGEGGLPPAFQLLLRACDQGDTETARRLLEPGAAEPAERGAEPEAGAEPAGAEVAGPGAAAAGAVGAPVPVDCSDEAGNTALQFAAAGGHEPLVRFLLRRGASVNSRNHYGWSALMQAARFGHVSVAHLLLDHGADVNAQNRLGASVLTVASRGGHLGVVKLLLEAGAFVDHHHPSGEQLGLGGSRDEPLDITALMAAIQHGHEAVVRLLMEWGADPNHAARTVGWSPLMLAALTGRLGVAQQLVEKGANPDHLSVLEKTAFEVALDCKHRDLVDYLDPLTTVRPKTDEEKRRPDIFHALKMGNFQLVKEIADEDPSHVNLVNGDGATPLMLAAVTGQLALVQLLVERHADVDKQDSVHGWTALMQATYHGNKEIVKYLLNQGADVTLRAKNGYTAFDLVMLLNDPDTELVRLLASVCMQVNKDKGRPSHQPPLPHSKVRQPWSIPVLPDDKGGLKSWWNRMSNRFRKLKLMQTLPRGLSSNQPLPFSDEPEPALDSTMRAAPQDKTSRSALPDAAPVTKDNGPGSTRGEKEDTLLTTMLRNGAPLTRLPSDKLKAVIPPFLPPSSFELWSSDRSRTRHNGKADPMKTALPQRASRGHPVGGGGTDTTPVRPVKFPSLPRSPASSANSGNFNHSPHSSGGSSGVGVSRHGGELLNRSGGSIDNVLSQIAAQRKKAAGLLEQKPSHRSSPVGPAPGSSPSELPASPAGGSAPVGKKLETSKRPPSGTSTTSKSTSPTLTPSPSPKGHTAESSVSSSSSHRQSKSSGGSSSGTITDEDELTGILKKLSLEKYQPIFEEQEVDMEAFLTLTDGDLKELGIKTDGSRQQILAAISELNAGKGRERQILQETIHNFHSSFESSASNTRAPGNSPCA

SEQ ID NO: 3850 - protein, 1796 aa, Homo sapiens
MKIFQRKMRYWLLPPFLAIVYFCTIVQGQVAPPTRLRYNVISHDSIQISWKAPRGKFGGYKLLVTPTSGGKTNQLNLQNTATKAIIQGLMPDQNYTVQIIAYNKDKESKPAQGQFRIKDLEKRKDPKPRVKVVDRGNGSRPSSPEEVKFVCQTPAIADIVILVDGSWSIGRFNFRLVRHFLENLVTAFDVGSEKTRIGLAQYSGDPRIEWHLNAFSTKDEVIEAVRNLPYKGGNTLTGLALNYIFENSFKPEAGSRTGVSKIGILITDGKSQDDIIPPSRNLRESGVELFAIGVKNADVNELQEIASEPDSTHVYNVAEFDLMHTVVESLTRTLCSRVEEQDREIKASAHAITGPPTELITSEVTARSFMVNWTHAPGNVEKYRVVYYPTRGGKPDEVVVDGTVSSTVLKNLMSLTEYQIAVFAIYAHTASEGLRGTETTLALPMASDLLLYDVTENSMRVKWDAVPGASGYLILYAPLTEGLAGDEKEMKIGETHTDIELSGLLPNTEYTVTVYAMFGEEASDPVTGQETTLALSPPRNLRISNVGSNSARLTWDPTSRQINGYRIVYNNADGTEINEVEVDPITTFPLKGLTPLTEYTIAIFSIYDEGQSEPLTGVFTTEEVPAQQYLEIDEVTTDSFRVTWHPLSADEGLHKLMWIPVYGGKTEEVVLKEEQDSHVIEGLEPGTEYEVSLLAVLDDGSESEVVTAVGTTLDSFWTEPATTIVPTTSVTSVFQTGIRNLVVGDETTSSLRVKWDISDSDVQQFRVTYMTAQGDPEEEVIGTVMVPGSQNNLLLKPLLPDTEYKVTVTPIYTDGEGVSVSAPGKTLPSSGPQNLRVSEEWYNRLRITWDPPSSPVKGYRIVYKPVSVPGPTLETFVGADINTILITNLLSGMDYNVKIFASQASGFSDALTGMVKTLFLGVTNLQAKHVEMTSLCAHWQVHRHATAYRVVIESLQDRQKQESTVGGGTTRHCFYGLQPDSEYKISVYTKLQEIEGPSVSIMEKTQSLPTRPPTFPPTIPPAKEVCKAAKADLVFMVDGSWSIGDENFNKIISFLYSTVGALNKIGTDGTQVAMVQFTDDPRTEFKLNAYKTKETLLDAIKHISYKGGNTKTGKAIKYVRDTLFTAESGTRRGIPKVIVVITDGRSQDDVNKISREMQLDGYSIFAIGVADADYSELVSIGSKPSARHVFFVDDFDAFKKIEDELITFVCETASATCPVVHKDGIDLAGFKMMEMFGLVEKDFSSVEGVSMEPGTFNVFPCYQLHKDALVSQPTRYLHPEGLPSDYTISFLFRILPDTPQEPFALWEILNKNSDPLVGVILDNGGKTLTYFNYDQSGDFQTVTFEGPEIRKIFYGSFHKLHIVVSETLVKVVIDCKQVGEKAMNASANITSDGVEVLGKMVRSRGPGGNSAPFQLQMFDIVCSTSWANTDKCCELPGLRDDESCPDLPHSCSCSETNEVALGPAGPPGGPGLRGPKGQQGEPGPKGPDGPRGEIGLPGPQGPPGPQGPSGLSIQGMPGMPGEKGEKGDTGLPGPQGIPGGVGSPGRDGSPGQRGLPGKDGSSGPPGPPGPIGIPGTPGVPGITGSMGPQGALGPPGVPGAKGERGERGDLQSQAMVRSVARQVCEQLIQSHMARYTAILNQIPSHSSSIRTVQGPPGEPGRPGSPGAPGEQGPPGTPGFPGNAGVPGTPGERGLTGIKGEKGNPGVGTQGPRGPPGPAGPSGESRPGSPGPPGSPGPRGPPGHLGVPGPQGPSGQPGYCDPSSCSAYGVRAPHPDQPEFTPVQDELEAMELWGPGV

SEQ ID NO: 3851 - protein, 873 aa, Homo sapiens
MASRRKSTTPCMVLASEQDPDLELISDLDEGPPVLTPVENTRAESISSDEEVHESVDSDNQQNKKVEGGYECKYCTFQTPDLNMFTFHVDSEHPNVVLNSSYVCVECNFLTKRYDALSEHNLKYHPGEENFKLTMVKRNNQTIFEQTINDLTFDGSFVKEENAEQAESTEVSSSGISISKTPIMKMMKNKVENKRIAVHHNSVEDVPEEKENEIKPDREEIVENPSSSASESNTSTSIVNRIHPSTASTVVTPAAVLPGLAQVITAVSAQQNSNLIPKVLIPVNSIPTYNAALDNNPLLLNTYNKFPYPTMSEITVLSAQAKYTEEQIKIWFSAQRLKHGVSWTPEEVEEARRKQFNGTVHTVPQTITVIPTHISTGSNGLPSILQTCQIVGQPGLVLTQVAGTNTLPVTAPIALTVAGVPSQNNIQKSQVPAAQPTAETKPATAAVPTSQSVKHETALVNPDSFGIRAKKTKEQLAELKVSYLKNQFPHDSEIIRLMKITGLTKGEIKKWFSDTRYNQRNSKSNQCLHLNNDSSTTIIIDSSDETTESPTVGTAQPKQSWNPFPDFTPQKFKEKTAEQLRVLQASFLNSSVLTDEELNRLRAQTKLTRREIDAWFTEKKKSKALKEEKMEIDESNAGSSKEEAGETSPADESGAPKSGSTGKICKKTPEQLHMLKSAFVRTQWPSPEEYDKLAKESGLARTDIVSWFGDTRYAWKNGNLKWYYYYQSANSSSMNGLSSLRKRGRGRPKGRGRGRPRGRPRGSKRINNWDRGPSLIKFKTGTAILKDYYLKHKFLNEQDLDELVNKSHMGYEQVREWFAERQRRSELGIELFEENEEEDEVIDDQEEDEEETDDSDTWEPPRHVKRKLSKSDD

SEQ ID NO: 3852 - protein, 245 aa, Homo sapiens
MAQEEGGSLPEVRARVRAAHGIPDLAQKLHFYDRWAPDYDQDVATLLYRAPRLAVDCLTQALPGPPHSALILDVACGTGLVAAELRAPGFLQLHGVDGSPGMLEQAQAPGLYQRLSLCTLGQEPLPSPEGTFDAVLIVGALSDGQVPCNAIPELHVTKPGGLVCLTTRTNSSNLQYKEALEATLDRLEQAGMWEGLVAWPVDRLWTAGSWLPPSWRWYPASLPRMASSPALSTCTESGRRPRLRK

SEQ ID NO: 3853 - protein, 354 aa, Homo sapiens
MYREWVVVNVFMMLYVQLVQGSSNEHGPVKRSSQSTLERSEQQIRAASSLEELLRITHSEDWKLWRCRLRLKSFTSMDSRSASHRSTRFAATFYDIETLKVIDEEWQRTQCSPRETCVEVASELGKSTNTFFKPPCVNVFRCGGCCNEESLICMNTSTSYISKQLFEISVPLTSVPELVPVKVANHTGCKCLPTAPRHPYSIIRRSIQIPEEDRCSHSKKLCPIDMLWDSNKCKCVLQEENPLAGTEDHSHLQEPALCGPHMMFDEDRCECVCKTPCPKDLIQHPKNCSCFECKESLETCCQKHKLFHPDTCSCEDRCPFHTRPCASGKTACAKHCRFPKEKRAAQGPHSRKNP

SEQ ID NO: 3854 - protein, 1460 aa, Homo sapiens
MVKLDIHTLAHHLKQERLYVNSEKQLIQRLNADVLKTAEKLYRTAWIAKQQRINLDRLIITSAEASPAECCQHAKILEDTQFVDGYKQLGFQETAYGEFLSRLRENPRLIASSLVAGEKLNQENTQSVIYTVFTSLYGNCIMQEDESYLLQVLRYLIEFELKESDNPRRLLRRGTCAFSILFKLFSEGLFSAKLFLTATLHEPIMQLLVEDEDHLETDPNKLIERFSPSQQEKLFGEKGSDRFRQKVQEMVESNEAKLVALVNKFIGYLKQNTYCFPHSLRWIVSQMYKTLSCVDRLEVGEVRAMCTDLLLACFICPAVVNPEQYGIISDAPINEVARFNLMQVGRLLQQLAMTGSEEGDPRTKSSLGKFDKSCVAAFLDVVIGGRAVETPPLSSVNLLEGLSRTVVYITYSQLITLVNFMKSVMSGDQLREDRMALDNLLANLPPAKPGKSSSLEMTPYNTPQLSPATTPANKKNRLPIATRSRSRTNMLMDLHMDHEGSSQETIQEVQPEEVLVISLGTGPQLTPGMMSENEVLNMQLSDGGQGDVPVDENKLHGKPDKTLRFSLCSDNLEGISEGPSNRSNSVSSLDLEGESVSELGAGPSGSNGVEALQLLEHEQATTQDNLDDKLRKFEIRDMMGLTDDRDISETVSETWSTDVLGSDFDPNIDEDRLQEIAGAAAENMLGSLLCLPGSGSVLLDPCTGSTISETTSEAWSVEVLPSDSEAPDLKQEERLQELESCSGLGSTSDDTDVREVSSRPSTPGLSVVSGISATSEDIPNKIEDLRSECSSDFGGKDSVTSPDMDEITHGAHQLTSPPSQSESLLAMFDPLSSHEGASAVVRPKVHYARPSHPPPDPPILEGAVGGNEARLPNFGSHVLTPAEMEAFKQRHSYPERLVRSRSSDIVSSVRRPMSDPSWNRRPGNEERELPPAAAIGATSLVAAPHSSSSSPSKDSSRGETEERKDSDDEKSDRNRPWWRKRFVSAMPKAPIPFRKKEKQEKDKDDLGPDRFSTLTDDPSPRLSAQAQVAEDILDKYRNAIKRTSPSDGAMANYESTEVMGDGESAHDSPRDEALQNISADDLPDSASQAAHPQDSAFSYRDAKKKLRLALCSADSVAFPVLTHSTRNGLPDHTDPEDNEIVCFLKVQIAEAINLQDKNLMAQLQETMRCVCRFDNRTCRKLLASIAEDYRKRAPYIAYLTRCRQGLQTTQAHLERLLQRVLRDKEVANRYFTTVCVRLLLESKEKKIREFIQDFQKLTAADDKTAQVEDFLQFLYGAMAQDVIWQNASEEQLQDAQLAIERSVMNRIFKLAFYPNQDGDILRDQVLHEHIQRLSKVVTANHRALQIPEVYLREAPWPSAQSEIRTISAYKTPRDKVQCILRMCSTIMNLLSLANEDSVPGADDFVPVLVFVLIKANPPCLLSTVQYISSFYASCLSGEESYWWMQFTAAVEFIKTIDDRK

SEQ ID NO: 3855 - protein, 690 aa, Homo sapiens
MNLRSVFTVEQQRILQRYYENGMTNQSKNCFQLILQCAQETKLDFSVVRTWVGNKRRKMSSKNSESGTATTGTSLSAPDITVRNVVNIARPSSQQSSWTSANNDVIVTGIYSPASSSSRQGTNKHTDTQITEAHKIPIQKTATKNDTEFQLHIPVQRQVAHCKNASLLLGEKTIILSRQTSVLNAGNSVFNHAKKNYGNSSVQASEMTVPQKPSVCHRPCKIEPVGIQRSYKPEHTGPALHNLCGQKPTIRDPYCRTQNLEIREVFSLAVSDYPQRILGGNAPQKPSSAEGNCLSIAMETGDAEDEYAREEELASMRAQIPSYSRFYESGSSLRAENQSTTLPGPGRNMPNSQMVNIRDMSDNVLYQNRNYHLTPRTSLHTASSTMYSNTNPLRSNFSPHFASSNQLRLSQNQNNYQISGNLTVPWITGCSRKRALQDRTQFSDRDLATLKKYWDNGMTSLGSVCREKIEAVATELNVDCEIVRTWIGNRRRKYRLMGIEVPPPRGGPADFSEQPESGSLSALTPGEEAGPEVGEDNDRNDEVSICLSEGSSQEEPNEVVPNDARAHKEEDHHAVTTDNVKIEIIDDEESDMISNSEVEQVNSFLDYKNEEVKFIENELEIQKQKYFKLQTFVRSLILAMKADDKEQQQALLSDLPPELEEMDFNHASLEPDDTSFSVSSLSEKNVSESL

SEQ ID NO: 3856 - protein, 1146 aa, Homo sapiens
MGPAPAGEQLRGATGEPEVMEPALEGTGKEGKKASSRKRTLAEPPAKGLLQPVKLSRAELYKEPTNEELNRLRETEILFHSSLLRLQVEELLKEVRLSEKKKDRIDAFLREVNQRVVRVPSVPETELTDQAWLPAGVRVPLHQVPYAVKGCFRFLPPAQVTVVGSYLLGTCIRPDINVDVALTMPREILQDKDGLNQRYFRKRALYLAHLAHHLAQDPLFGSVCFSYTNGCHLKPSLLLRPRGKDERLVTVRLHPCPPPDFFRPCRLLPTKNNVRSAWYRGQSPAGDGSPEPPTPRYNTWVLQDTVLESHLQLLSTILSSAQGLKDGVALLKVWLRQRELDKGQGGFTGFLVSMLVVFLVSTRKIHTTMSGYQVLRSVLQFLATTDLTVNGISLCLSSDPSLPALADFHQAFSVVFLDSSGHLNLCADVTASTYHQVQHEARLSMMLLDSRADDGFHLLLMTPKPMIRAFDHVLHLRPLSRLQAACHRLKLWPELQDNGGDYVSAALGPLTTLLEQGLGARLNLLAHSRPPVPEWDISQDPPKHKDSGTLTLGLLLRPEGLTSVLELGPEADQPEAAKFRQFWGSRSELRRFQDGAIREAVVWEAASMSQKRLIPHQVVTHLLALHADIPETCVHYVGGPLDALIQGLKETSSTGEEALVAAVRCYDDLSRLLWGLEGLPLTVSAVQGAHPVLRYTEVFPPTPVRPAFSFYETLRERSSLLPRLDKPCPAYVEPMTVVCHLEGSGQWPQDAEAVQRVRAAFQLRLAELLTQQHGLQCRATATHTDVLKDGFVFRIRVAYQREPQILKEVQSPEGMISLRDTAASLRLERDTRQLPLLTSALHGLQQQHPAFSGVARLAKRWVRAQLLGEGFADESLDLVAAALFLHPEPFTPPSSPQVGFLRFLFLVSTFDWKNNPLFVNLNNELTVEEQVEIRSGFLAARAQLPVMVIVTPQDRKNSVWTQDGPSAQILQQLVVLAAEALPMLEKQLMDPRGPGDIRTVFRPPLDIYDVLIRLSPRHIPRHRQAVDSPAASFCRGLLSQPGPSSLMPVLGYDPPQLYLTQLREAFGDLALFFYDQHGGEVIGVLWKPTSFQPQPFKASSTKGRMVMSRGGELVMVPNVEAILEDFAVLGEGLVQTVEARSERWTV

SEQ ID NO: 3857 - protein, 672 aa, Homo sapiens
MQKASVLLFLAWVCFLFYAGIALFTSGFLLTRLELTNHSSCQEPPGPGSLPWGSQGKPGACWMASRFSRVVLVLIDALRFDFAQPQHSHVPREPPVSLPFLGKLSSLQRILEIQPHHARLYRSQVDPPTTTMQRLKALTTGSLPTFIDAGSNFASHAIVEDNLIKQLTSAGRRVVFMGDDTWKDLFPGAFSKAFFFPSFNVRDLDTVDNGILEHLYPTMDSGEWDVLIAHFLGVDHCGHKHGPHHPEMAKKLSQMDQVIQGLVERLENDTLLVVAGDHGMTTNGDHGGDSELEVSAALFLYSPTAVFPSTPPEEPEVIPQVSLVPTLALLLGLPIPFGNIGEVMAELFSGGEDSQPHSSALAQASALHLNAQQVSRFLHTYSAATQDLQAKELHQLQNLFSKASADYQWLLQSPKGAEATLPTVIAELQQFLRGARAMCIESWARFSLSFLLLHLLAAGIPVTTPGPFTVPWQAVSAWALMATQTFYSTGHQPVFPAIHWHAAFVGFPEGHGSCTWLPALLVGANTFASHLLFAVGCPLLLLWPFLCESQGLRKRQQPPGNEADARVRPEEEEEPLMEMRLRDAPQHFYAALLQLGLKYLFILGIQILACALAASILRRHLMVWKVFAPKFIFEAVGFIVSSVGLLLGIALVMRVDGAVSSWFRQLFLAQQR

SEQ ID NO: 3858 - protein, 651 aa, Homo sapiens
MKDYDELLKYYELHETIGTGGFAKVKLACHILTGEMVAIKIMDKNTLGSDLPRIKTEIEALKNLRHQHICQLYHVLETANKIFMVLEYCPGGELFDYIISQDRLSEEETRVVFRQIVSAVAYVHSQGYAHRDLKPENLLFDEYHKLKLIDFGLCAKPKGNKDYHLQTCCGSLAYAAPELIQGKSYLGSEADVWSMGILLYVLMCGFLPFDDDNVMALYKKIMRGKYDVPKWLSPSSILLLQQMLQVDPKKRISMKNLLNHPWIMQDYNYPVEWQSKNPFIHLDDDCVTELSVHHRNNRQTMEDLISLWQYDHLTATYLLLLAKKARGKPVRLRLSSFSCGQASATPFTDIKSNNWSLEDVTASDKNYVAGLIDYDWCEDDLSTGAATPRTSQFTKYWTESNGVESKSLTPALCRTPANKLKNKENVYTPKSAVKNEEYFMFPEPKTPVNKNQHKREILTTPNRYTTPSKARNQCLKETPIKIPVNSTGTDKLMTGVISPERRCRSVELDLNQAHMEETPKRKGAKVFGSLERGLDKVITVLTRSKRKGSARDGPRRLKLHYNVTTTRLVNPDQLLNEIMSILPKKHVDFVQKGYTLKCQTQSDFGKVTMQFELEVCQLQKPDVVGIRRQRLKGDAWVYKRLVEDILSSCKV

SEQ ID NO: 3859 - protein, 776 aa, Homo sapiens
MSEAVRVPSPATPLVVAAPAPEERKGKESEREKLPPIVSAGAGATAGLDRGAKGQISTFSSFISAVSPKKEAAENRSSPAHLVFPNIKNVREPPPICLDVRQKQRTSMDASSSEMKAPVLPEPILPIQPKTVKDFQEDVEKVKSSGDWKAVHDFYLTTFDSFPELNAAFKKDATASFNTIEDSGINAKFVNAVYDTLLNTPQDVQKTVLKGIINSLLREWKGPRTKDDLRAYFILLQNPQFNNTSTYVIYAHLLRQIATLVEADHHFLVHWFKKLSQKRFKQLVERLLQFISLRLFPAKPEEFPPITKCSWWIPSAAKVLALLNTANNLVHPPLIPYTDFYNSTLDHIDLMEEYHTWQNFGNSHRFSFCQYPFVISVAAKKIIIQRDSEQQMINIARQSLVDKVSRRQRPDMNILFLNMKVRRTHLVSDSLDELTRKRADLKKKLKVTFVGEAGLDMGGLTKEWFLLLIRQIFHPDYGMFTYHKDSHCHWFSSFKCDNYSEFRLVGILMGLAVYNSITLDIRFPPCCYKKLLSPPIIPSDQNIPVGICNVTVDDLCQIMPELAHGLSELLSHEGNVEEDFYSTFQVFQEEFGIIKSYNLKPGGDKISVTNQNRKEYVQLYTDFLLNKSIYKQFAAFYYGFHSVCASNALMLLRPEEVEILVCGSPDLDMHALQRSTQYDGYAKTDLTIKYFWDVVLGFPLDLQKKLLHFTTGSDRVPVGGMADLNFKISKNETSTNCLPVAHTCFNQLCLPPYKSKKDLKQKLIIGISNSEGFGLE

SEQ ID NO: 3860 - protein, 555 aa, Homo sapiens
MLLFLSVPQPRPPGARTRAGAARVARWRRLRLQQLRRLRGLLRVLRGRPGAGSRRRGRMALCGQAAGAASLPSELIVHIFSFLPAPDRLRASASCSHWRECLFYPALWPQLRICLRVSPAEQPRLEFLMRKCGWFVRELRVEFAAENYLSGGGPGDGGGADTGTGGEEVEALQLSARWLEVLRTYLELVLCVLVSIRNNRNLQKFSLFGDISVLQQQGSLSNTYLSKVDPDGKKIKQIQQLFEEILSNSRQLKWLSCGFMLEIVTPTSLSSLSNAVANTMEHLSLLDNNIPGNSTLITAVELERFVNLHSLALDFCDFTAEMARVLTDSNHVPLQRLSLLVHNVSVMHKSLDNMPNDEHWKALSRKSTSFRVYIMAFDIKSEDMLKILKPSIPLERIHFDSYITCVSGAIVDLISRQYDKFLTHFILMNDVIDTSGFPDLSDNRNEDPLVLLAWRCTKLSLLAIHGYTVWAHNLIAIARLRGSDLKVLEVTEESIDFDQGELADQDVDPVHNLIEQVSLGLGQPWHAVMDIESLSVFTEPNRHFYREMQSFSEDI

SEQ ID NO: 3861 - protein, 719 aa, Homo sapiens
MEKILFYLFLIGIAVKAQICPKRCVCQILSPNLATLCAKKGLLFVPPNIDRRTVELRLADNFVTNIKRKDFANMTSLVDLTLSRNTISFITPHAFADLRNLRALHLNSNRLTKITNDMFSGLSNLHHLILNNNQLTLISSTAFDDVFALEELDLSYNNLETIPWDAVEKMVSLHTLSLDHNMIDNIPKGTFSHLHKMTRLDVTSNKLQKLPPDPLFQRAQVLATSGIISPSTFALSFGGNPLHCNCELLWLRRLSREDDLETCASPPLLTGRYFWSIPEEEFLCEPPLITRHTHEMRVLEGQRATLRCKARGDPEPAIHWISPEGKLISNATRSLVYDNGTLDILITTVKDTGAFTCIASNPAGEATQIVDLHIIKLPHLLNSTNHIHEPDPGSSDISTSTKSGSNTSSSNGDTKLSQDKIVVAEATSSTALLKFNFQRNIPGIRMFQIQYNGTYDDTLVYRMIPPTSKTFLVNNLAAGTMYDLCVLAIYDDGITSLTATRVVGCIQFTTEQDYVRCHFMQSQFLGGTMIIIIGGIIVASVLVFIIILMIRYKVCNNNGQHKVTKVSNVYSQTNGAQIQGCSVTLPQSVSKQAVGHEENAQCCKATSDNVIQSSETCSSQDSSTTTSALPPSWTSSTSVSQKQKRKTGTKPSTEPQNEAVTNVESQNTNRNNSTALQLASRPPDSVTEGPTSKRAHIKPNALLTNVDQIVQETQRLELI

SEQ ID NO: 3862 - protein, 71 aa, Homo sapiens
MAGMALARAWKQMSWFYYQYLLVTALYMLEPWERTVFNSMLVSIVGMALYTGYVFMPQHIMAILHYFEIVQ

SEQ ID NO: 3863 - protein, 1432 aa, Homo sapiens
MSEKKLETTAQQRKCPEWMNVQNKRCAVEERKACVRKSVFEDDLPFLEFTGSIVYSYDASDCSFLSEDISMSLSDGDVVGFDMEWPPLYNRGKLGKVALIQLCVSESKCYLFHVSSMSVFPQGLKMLLENKAVKKAGVGIEGDQWKLLRDFDIKLKNFVELTDVANKKLKCTETWSLNSLVKHLLGKQLLKDKSIRCSNWSKFPLTEDQKLYAATDAYAGFIIYRNLEILDDTVQRFAINKEEEILLSDMNKQLTSISEEVMDLAKHLPHAFSKLENPRRVSILLKDISENLYSLRRMIIGSTNIETELRPSNNLNLLSFEDSTTGGVQQKQIREHEVLIHVEDETWDPTLDHLAKHDGEDVLGNKVERKEDGFEDGVEDNKLKENMERACLMSLDITEHELQILEQQSQEEYLSDIAYKSTEHLSPNDNENDTSYVIESDEDLEMEMLKHLSPNDNENDTSYVIESDEDLEMEMLKSLENLNSGTVEPTHSKCLKMERNLGLPTKEEEEDDENEANEGEEDDDKDFLWPAPNEEQVTCLKMYFGHSSFKPVQWKVIHSVLEERRDNVAVMATGYGKSLCFQYPPVYVGKIGLVISPLISLMEDQVLQLKMSNIPACFLGSAQSENVLTDIKLGKYRIVYVTPEYCSGNMGLLQQLEADIGITLIAVDEAHCISEWGHDFRDSFRKLGSLKTALPMVPIVALTATASSSIREDIVRCLNLRNPQITCTGFDRPNLYLEVRRKTGNILQDLQPFLVKTSSHWEFEGPTIIYCPSRKMTQQVTGELRKLNLSCGTYHAGMSFSTRKDIHHRFVRDEIQCVIATIAFGMGINKADIRQVIHYGAPKDMESYYQEIGRAGRDGLQSSCHVLWAPADINLNRHLLTEIRNEKFRLYKLKMMAKMEKYLHSSRCRRQIILSHFEDKQVQKASLGIMGTEKCCDNCRSRLDHCYSMDDSEDTSWDFGPQAFKLLSAVDILGEKFGIGLPILFLRGSNSQRLADQYRRHSLFGTGKDQTESWWKAFSRQLITEGFLVEVSRYNKFMKICALTKKGRNWLHKANTESQSLILQANEELCPKKLLLPSSKTVSSGTKEHCYNQVPVELSTEKKSNLEKLYSYKPCDKISSGSNISKKSIMVQSPEKAYSSSQPVISAQEQETQIVLYGKLVEARQKHANKMDVPPAILATNKILVDMAKMRPTTVENVKRIDGVSEGKAAMLAPLLEVIKHFCQTNSVQTDLFSSTKPQEEQKTSLVAKNKICTLSQSMAITYSLFQEKKMPLKSIAESRILPLMTIGMHLSQAVKAGCPLDLERAGLTPEVQKIIADVIRNPPVNSDMSKISLIRMLVPENIDTYLIHMAIEILKHGPDSGLQPSCDVNKRRCFPGSEEICSSSKRSKEEVGINTETSSAERKRRLPVWFAKGSDTSKKLMDKTKRGGLFS

SEQ ID NO: 3864 - protein, 166 aa, Homo sapiens
MASGVTVNDEVIKVFNDMKVRKSSTQEEIKKRKKAVLFCLSDDKRQIIVEEAKQILVGDIGDTVEDPYTSFVKLLPLNDCRYALYDATYETKESKKEDLVFIFWAPESAPLKSKMIYASSKDAIKKKFTGIKHEWQVNGLDDIKDRSTLGEKLGGNVVVSLEGKPL

SEQ ID NO: 3865 - protein, 622 aa, Homo sapiens
MAENTEGDLNSNLLHAPYHTGDPQLDTAIGQWLRWDKNPKTKEQIENLLRNGMNKELRDRLCCRMTFGTAGLRSAMGAGFCYINDLTVIQSTQGMYKYLERCFSDFKQRGFVVGYDTRGQVTSSCSSQRLAKLTAAVLLAKDVPVYLFSRYVPTPFVPYAVQKLKAVAGVMITASHNRKEDNGYKVYWETGAQITSPHDKEILKCIEECVEPWNGSWNDNLVDTSPLKRDPLQDICRRYMEDLKKICFYRELNSKTTLKFVHTSFHGVGHDYVQLAFKVFGFKPPIPVPEQKDPDPDFSTVKCPNPEEGESVLELSLRLAEKENARVVLATDPDADRLAAAELQENGCWKVFTGNELAALFGWWMFDCWKKNKSRNADVKNVYMLATTVSSKILKAIALKEGFHFEETLPGFKWIGSRIIDLLENGKEVLFAFEESIGFLCGTSVLDKDGVSAAVVVAEMASYLETMNITLKQQLVKVYEKYGYHISKTSYFLCYEPPTIKSIFERLRNFDSPKEYPKFCGTFAILHVRDVTTGYDSSQPNKKSVLPVSKNSQMITFTFQNGCVATLRTSGTEPKIKYYAEMCASPDQSDTALLEEELKKLIDALIENFLQPSKNGLIWRSV

SEQ ID NO: 3866 - protein, 255 aa, Homo sapiens
MVWKWMPLLLLLVCVATMCSAQDRTDLLNVCMDAKHHKTKPGPEDKLHDQCSPWKKNACCTASTSQELHKDTSRLYNFNWDHCGKMEPACKRHFIQDTCLYECSPNLGPWIQQVNQSWRKERFLDVPLCKEDCQRWWEDCHTSHTCKSNWHRGWDWTSGVNKCPAGALCRTFESYFPTPAALCEGLWSHSYKVSNYSRGSGRCIQMWFDSAQGNPNEEVARFYAAAMHVNAGEMLHGTGGLLLSLALMLQLWLLG

SEQ ID NO: 3867 - protein, 1258 aa, Homo sapiens
MASACGAPGPGGALGSQAPSWYHRDLSRAAAEELLARAGRDGSFLVRDSESVAGAFALCVLYQKHVHTYRILPDGEDFLAVQTSQGVPVRRFQTLGELIGLYAQPNQGLVCALLLPVEGEREPDPPDDRDASDGEDEKPPLPPRSGSTSISAPTGPSSPLPAPETPTAPAAESAPNGLSTVSHDYLKGSYGLDLEAVRGGASHLPHLTRTLATSCRRLHSEVDKVLSGLEILSKVFDQQSSPMVTRLLQQQNLPQTGEQELESLVLKLSVLKDFLSGIQKKALKALQDMSSTAPPAPQPSTRKAKTIPVQAFEVKLDVTLGDLTKIGKSQKFTLSVDVEGGRLVLLRRQRDSQEDWTTFTHDRIRQLIKSQRVQNKLGVVFEKEKDRTQRKDFIFVSARKREAFCQLLQLMKNKHSKQDEPDMISVFIGTWNMGSVPPPKNVTSWFTSKGLGKTLDEVTVTIPHDIYVFGTQENSVGDREWLDLLRGGLKELTDLDYRPIAMQSLWNIKVAVLVKPEHENRISHVSTSSVKTGIANTLGNKGAVGVSFMFNGTSFGFVNCHLTSGNEKTARRNQNYLDILRLLSLGDRQLNAFDISLRFTHLFWFGDLNYRLDMDIQEILNYISRKEFEPLLRVDQLNLEREKHKVFLRFSEEEISFPPTYRYERGSRDTYAWHKQKPTGVRTNVPSWCDRILWKSYPETHIICNSYGCTDDIVTSDHSPVFGTFEVGVTSQFISKKGLSKTSDQAYIEFESIEAIVKTASRTKFFIEFYSTCLEEYKKSFENDAQSSDNINFLKVQWSSRQLPTLKPILADIEYLQDQHLLLTVKSMDGYESYGECVVALKSMIGSTAQQFLTFLSHRGEETGNIRGSMKVRVPTERLGTRERLYEWISIDKDEAGAKSKAPSVSRGSQEPRSGSRKPAFTEASCPLSRLFEEPEKPPPTGRPPAPPRAAPREEPLTPRLKPEGAPEPEGVAAPPPKNSFNNPAYYVLEGVPHQLLPPEPPSPARAPVPSATKNKVAITVPAPQLGHHRHPRVGEGSSSDEESGGTLPPPDFPPPPLPDSAIFLPPSLDPLPGPVVRGRGGAEARGPPPPKAHPRPPLPPGPSPASTFLGEVASGDDRSCSVLQMAKTLSEVDYAPAGPARSALLPGPLELQPPRGLPSDYGRPLSFPPPRIRESIQEDLAEEAPCLQGGRASGLGEAGMSAWLRAIGLERYEEGLVHNGWDDLEFLSDITEEDLEEAGVQDPAHKRLLLDTLQLSK

SEQ ID NO: 3868 - protein, 319 aa, Homo sapiens
MASSAAGCVVIVGSGVIGRSWAMLFASGGFQVKLYDIEQQQIRNALENIRKEMKLLEQAGSLKGSLSVEEQLSLISGCPNIQEAVEGAMHIQECVPEDLELKKKIFAQLDSIIDDRVILSSSTSCLMPSKLFAGLVHVKQCIVAHPVNPPYYIPLVELVPHPETAPTTVDRTHALMKKIGQCPMRVQKEVAGFVLNRLQYAIISEAWRLVEEGIVSPSDLDLVMSEGLGMRYAFIGPLETMHLNAEGMLSYCDRYSEGIKHVLQTFGPIPEFSRATAEKVNQDMCMKVPDDPEHLAARRQWRDECLMRLAKLKSQVQPQ

SEQ ID NO: 3869 - protein, 416 aa, Homo sapiens
MKRERGALSRASRALRLAPFVYLLLIQTDPLEGVNITSPVRLIHGTVGKSALLSVQYSSTSSDRPVVKWQLKRDKPVTVVQSIGTEVIGTLRPDYRDRIRLFENGSLLLSDLQLADEGTYEVEISITDDTFTGEKTINLTVDVPISRPQVLVASTTVLELSEAFTLNCSHENGTKPSYTWLKDGKPLLNDSRMLLSPDQKVLTITRVLMEDDDLYSCMVENPISQGRSLPVKITVYRRSSLYIILSTGGIFLLVTLVTVCACWKPSKRKQKKLEKQNSLEYMDQNDDRLKPEADTLPRSGEQERKNPMALYILKDKDSPETEENPAPEPRSATEPGPPGYSVSPAVPGRSPGLPIRSARRYPRSPARSPATGRTHSSPPRAPSSPGRSRSASRTLRTAGVHIIREQDEAGPVEISA

SEQ ID NO: 3870 - protein, 1555 aa, Homo sapiens
MSEQTPAEAGAAGAREDACRDYQSSLEDLTFNSKPHINMLTILAEENLPFAKEIVSLIEAQTAKAPSSEKLPVMYLMDSIVKNVGREYLTAFTKNLVATFICVFEKVDENTRKSLFKLRSTWDEIFPLKKLYALDVRVNSLDPAWPIKPLPPNVNTSSIHVNPKFLNKSPEEPSTPGTVVSSPSISTPPIVPDIQKNLTQEQLIRQQLLAKQKQLLELQQKKLELELEQAKAQLAVSLSVQQETSNLGPGSAPSKLHVSQIPPMAVKAPHQVPVQSEKSRPGPSLQIQDLKGTNRDPRLNRISQHSHGKDQSHRKEFLMNTLNQSDTKTSKTIPSEKLNSSKQEKSKSGEKITKKELDQLDSKSKSKSKSPSPLKNKLSHTKDLKNQESESMRLSDMNKRDPRLKKHLQDKTDGKDDDVKEKRKTAEKKDKDEHMKSSEHRLAGSRNKIINGIVQKQDTITEESEKQGTKPGRSSTRKRSRSRSPKSRSPIIHSPKRRDRRSPKRRQRSMSPTSTPKAGKIRQSGAKQSHMEEFTPPSREDRNAKRSTKQDIRDPRRMKKTEEERPQETTNQHSTKSGTEPKENVENWQSSKSAKRWKSGWEENKSLQQVDEHSKPPHLRHRESWSSTKGILSPRAPKQQQHRLSVDANLQIPKELTLASKRELLQKTSERLASGEITQDDFLVVVHQIRQLFQYQEGVREEQRSPFNDRFPLKRPRYEDSDKPFVDSPASRFAGLDTNQRLTALAEDRPLFDGPSRPSVARDGPTKMIFEGPNKLSPRIDGPPTPASLRFDGSPGQMGGGGPLRFEGPQGQLGGGCPLRFEGPPGPVGTPLRFEGPIGQAGGGGFRFEGSPGLRFEGSPGGLRFEGPGGQPVGGLRFEGHRGQPVGGLRFEGPHGQPVGGLRFDNPRGQPVGGLRFEGGHGPSGAAIRFDGPHGQPGGGIRFEGPLLQQGVGMRFEGPHGQSVAGLRFEGQHNQLGGNLRFEGPHGQPGVGIRFEGPLVQQGGGMRFEGPSVPGGGLRIEGPLGQGGPRFEGCHALRFDGQPGQPSLLPRFDGLHGQPGPRFERTPGQPGPQRFDGPPGQQVQPRFDGVPQRFDGPQHQQASRFDIPLGLQGTRFDNHPSQRLESVSFNQTGPYNDPPGNAFNAPSQGLQFQRHEQIFDSPQGPNFNGPHGPGNQSFSNPLNRASGHYFDEKNLQSSQFGNFGNIPAPMTVGNIQASQQVLSGVAQPVAFGQGQQFLPVHPQNPGFVQNPSGALPKAYPDNHLSQVDVNELFSKLLKTGILKLSQTDSATTQVSEVTAQPPPEEEEDQNEDQDVPDLTNFTVEELKQRYDSVINRLYTGIQCYSCGMRFTTSQTDVYADHLDWHYRQNRTEKDVSRKVTHRRWYYSLTDWIEFEEIADLEERAKSQFFEKVHEEVVLKTQEAAKEKEFQSVPAGPAGAVESCEICQEQFEQYWDEEEEEWHLKNAIRVDGKIYHPSCYEDYQNTSSFDCTPSPSKTPVENPLNIMLNIVKNELQEPCDSPKVKEERIDTPPACTEESIATPSEIKTENDTVESV

SEQ ID NO: 3871 - protein, 212 aa, Homo sapiens
MRSRLLLSVAHLPTIRETTEEMLLGGPGQEPPPSPSLDDYVRSISRLAQPTSVLDKATAQGQPRPPHRPAQACRKGRPAVSLRDITARFSGQQPTLPMADTVDPLDWLFGESQEKQPSQRDLPRRTGPSAGLWGPHRQMDSSKPMGAPRGRLCEARMPGHSLARPPQDGQQSSDLRSWTFGQSAQAMASRHRPRPSSVLRTLYSHLPVIHEL

SEQ ID NO: 3872 - protein, 224 aa, Homo sapiens
MRLAKPKAGISRSSSQGKAYENKRKTGRQRQKWGMTIRFDSSFSRLRRSLDDKPYKCTECEKSFSQSSTLFQHQKIHTGKKSHKCADCGKSFFQSSNLIQHRRIHTGEKPYKCDECGESFKQSSNLIQHQRIHTGEKPYQCDECGRCFSQSSHLIQHQRTHTGEKPYQCSECGKCFSQSSHLRQHMKVHKEEKPRKTRGKNIRVKTHLPSWKAGTGRKSVAGLR

SEQ ID NO: 3873 - protein, 406 aa, Homo sapiens
MADGNEDLRADDLPGPAFESYESMELACPAERSGHVAVSDGRHMFVWGGYKSNQVRGLYDFYLPREELWIYNMETGRWKKINTEGDVPPSMSGSCAVCVDRVLYLFGGHHSRGNTNKFYMLDSRSTDRVLQWERIDCQGIPPSSKDKLGVWVYKNKLIFFGGYGYLPEDKVLGTFEFDETSFWNSSHPRGWNDHVHILDTETFTWSQPITTGKAPSPRAAHACATVGNRGFVFGGRYRDARMNDLHYLNLDTWEWNELIPQGICPVGRSWHSLTPVSSDHLFLFGGFTTDKQPLSDAWTYCISKNEWIQFNHPYTEKPRLWHTACASDEGEVIVFGGCANNLLVHHRAAHSNEILIFSVQPKSLVRLSLEAVICFKEMLANSWNCLPKHLLHSVNQRFGSNNTSGS

SEQ ID NO: 3874 - protein, 1076 aa, Homo sapiens
MKSRFSTIDLRAVLAELNASLLGMRVNNVYDVDNKTYLIRLQKPDFKATLLLESGIRIHTTEFEWPKNMMPSSFAMKCRKHLKSRRLVSAKQLGVDRIVDFQFGSDEAAYHLIIELYDRGNIVLTDYEYVILNILRFRTDEADDVKFAVRERYPLDHARAAEPLLTLERLTEIVASAPKGELLKRVLNPLLPYGPALIEHCLLENGFSGNVKVDEKLETKDIEKVLVSLQKAEDYMKTTSNFSGKGYIIQKREIKPSLEADKPVEDILTYEEFHPFLFSQHSQCPYIEFESFDKAVDEFYSKIEGQKIDLKALQQEKQALKKLDNVRKDHENRLEALQQAQEIDKLKGELIEMNLQIVDRAIQVVRSALANQIDWTEIGLIVKEAQAQGDPVASAIKELKLQTNHVTMLLRNPYLLSEEEDDDVDGDVNVEKNETEPPKGKKKKQKNKQLQKPQKNKPLLVDVDLSLSAYANAKKYYDHKRYAAKKTQKTVEAAEKAFKSAEKKTKQTLKEVQTVTSIQKARKVYWFEKFLWFISSENYLIIGGRDQQQNEIIVKRYLTPGDIYVHADLHGATSCVIKNPTGEPIPPRTLTEAGTMALCYSAAWDARVITSAWWVYHHQVSKTAPTGEYLTTGSFMIRGKKNFLPPSYLMMGFSFLFKVDESCVWRHQGERKVRVQDEDMETLASCTSELISEEMEQLDGGDTSSDEDKEEHETPVEVELMTQVDQEDITLQSGRDELNEELIQEESSEDEGEYEEVRKDQDSVGEMKDEGEETLNYPDTTIDLSHLQPQRSIQKLASKEESSNSSDSKSQSRRHLSAKERREMKKKKLPSDSGDLEALEGKDKEKESTVHIETHQNTSKNVAAVQPMKRGQKSKMKKMKEKYKDQDEEDRELIMKLLGSAGSNKEEKGKKGKKGKTKDEPVKKQPQKPRGGQRVSDNIKKETPFLEVITHELQDFAVDDPHDDKEEQDLDQQGNEENLFDSLTGQPHPEDVLLFAIPICAPYTTMTNYKYKVKLTPGVQKKGKAAKTALNSFMHSKEATAREKDLFRSVKDTDLSRNIPGKVKVSAPNLLNVKRK

SEQ ID NO: 3875 - protein, 175 aa, Homo sapiens
MGKVLSKIFGNKEMRILMLGLDAAGKTTILYKLKLGQSVTTIPTVGFNVETVTYKNVKFNVWDVGGQDKIRPLWRHYYTGTQGLIFVVDCADRDRIDEARQELHRIINDREMRDAIILIFANKQDLPDAMKPHEIQEKLGLTRIRDRNWYVQPSCATSGDGLYEGLTWLTSNYKS

SEQ ID NO: 3876 - protein, 377 aa, Homo sapiens
MAAPRWSASGPWIRGNGQGCGSLFTLVSKPFCAAAAASTAINAQRLAEKLRAQKREQDTKKEPVSTNAVQRRVQEIVRFTRQLQRVHPNVLAKALTRGILHQDKNLVVINKPYGLPVHGGPGVQLCITDVLPILAKMLHGHKAEPLHLCHRLDKETTGVMVLAWDKDMAHQVQELFRTRQVVKKYWAITVHVPMPSAGVVDIPIVEKEAQGQQQHHKMTLSPSYRMDDGKMVKVRRSRNAQVAVTQYQVLSSTLSSALVELQPITGIKHQLRVHLSFGLDCPILGDHKYSDWNRLAPQKLSVGTLKKLGLEQSKARYIPLHLHARQLILPALGSGKEELNLVCKLPRFFVHSLHRLRLEMPNEDQNENNEAKCLGAQ

SEQ ID NO: 3877 - protein, 476 aa, Homo sapiens
MGIKFLEVIKPFCAVLPEIQKPERKIQFREKVLWTAITLFIFLVCCQIPLFGIMSSDSADPFYWMRVILASNRGTLMELGISPIVTSGLIMQLLAGAKIIEVGDTPKDRALFNGAQKLFGMIITIGQAIVYVMTGMYGDPAEMGAGICLLIIIQLFVAGLIVLLLDELLQKGYGLGSGISLFIATNICETIVWKAFSPTTINTGRGTEFEGAVIALFHLLATRTDKVRALREAFYRQNLPNLMNLIATVFVFAVVIYFQGFRVDLPIKSARYRGQYSSYPIKLFYTSNIPIILQSALVSNLYVISQMLSVRFSGNFLVNLLGQWADVSGGGPARSYPVGGLCYYLSPPESMGAIFEDPVHVVVYIIFMLGSCAFFSKTWIEVSGSSAKDVAKQLKEQQMVMRGHRDTSMVHELNRYIPTAAAFGGLCIGALSVLADFLGAIGSGTGILLAVTIIYQYFEIFVKEQAEVGGMGALFF

SEQ ID NO: 3878 - protein, 191 aa, Homo sapiens
MRLLALAAAALLARAPAPEVCAALNVTVSPGPVVDYLEGENATLLCHVSQKRRKDSLLAVRWFFAHSFDSQEALMVKMTKLRVVQYYGNFSRSAKRRRLRLLEEQRGALYRLSVLTLQPSDQGHYVCRVQEISRHRNKWTAWSNGSSATEMRGVSSHPVERGAFLGISLVILPHSLPFTADLTMASFLQSS

SEQ ID NO: 3879 - protein, 415 aa, Homo sapiens
MAASISGYTFSAVCFHSANSNADHEGFLLGEVRQEETFSISDSQISNTEFLQVIEIHNHQPCSKLFSFYDYASKVNEESLDRILKDRRKKVIGWYRFRRNTQQQMSYREQVLHKQLTRILGVPDLVFLLFSFISTANNSTHALEYVLFRPNRRYNQRISLAIPNLGNTSQQEYKVSSVPNTSQSYAKVIKEHGTDFFDKDGVMKDIRAIYQVYNALQEKVQAVCADVEKSERVVESCQAEVNKLRRQITQRKNEKEQERRLQQAVLSRQMPSESLDPAFSPRMPSSGFAAEGRSTLGDAEASDPPPPYSDFHPNNQESTLSHSRMERSVFMPRPQAVGSSNYASTSAGLKYPGSGADLPPPQRAAGDSGEDSDDSDYENLIDPTEPSNSEYSHSKDSRPMAHPDEDPRNTQTSQI

SEQ ID NO: 3880 - protein, 256 aa, Homo sapiens
MAAAVGRLLRASVARHVSAIPWGISATAALRPAACGRTSLTNLLCSGSSQAKLFSTSSSCHAPAVTQHAPYFKGTAVVNGEFKDLSLDDFKGKYLVLFFYPLDFTFVCPTEIVAFSDKANEFHDVNCEVVAVSVDSHFSHLAWINTPRKNGGLGHMNIALLSDLTKQISRDYGVLLEGSGLALRGLFIIDPNGVIKHLSVNDLPVGRSVEETLRLVKAFQYVETHGEVCPANWTPDSPTIKPSPAASKEYFQKVNQ

SEQ ID NO: 3881 - protein, 1469 aa, Homo sapiens
MDVDAEREKITQEIKELERILDPGSSGSHVEISESSLESDSEADSLPSEDLDPADPPISEEERWGEASNDEDDPKDKTLPEDPETCLQLNMVYQEVIQEKLAEANLLLAQNREQQEELMRDLAGSKGTKVKDGKSLPPSTYMGHFMKPYFKDKVTGVGPPANEDTREKAAQGIKAFEELLVTKWKNWEKALLRKSVVSDRLQRLLQPKLLKLEYLHQKQSKVSSELERQALEKQGREAEKEIQDINQLPEEALLGNRLDSHDWEKISNINFEGSRSAEEIRKFWQNSEHPSINKQEWSREEEERLQAIAAAHGHLEWQKIAEELGTSRSAFQCLQKFQQHNKALKRKEWTEEEDRMLTQLVQEMRVGSHIPYRRIVYYMEGRDSMQLIYRWTKSLDPGLKKGYWAPEEDAKLLQAVAKYGEQDWFKIREEVPGRSDAQCRDRYLRRLHFSLKKGRWNLKEEEQLIELIEKYGVGHWAKIASELPHRSGSQCLSKWKIMMGKKQGLRRRRRRARHSVRWSSTSSSGSSSGSSGGSSSSSSSSSEEDEPEQAQAGEGDRALLSPQYMVPDMDLWVPARQSTSQPWRGGAGAWLGGPAASLSPPKGSSASQGGSKEASTTAAAPGEETSPVQVPARAHGPVPRSAQASHSADTRPAGAEKQALEGGRRLLTVPVETVLRVLRANTAARSCTQKEQLRQPPLPTSSPGVSSGDSVARSHVQWLRHRATQSGQRRWRHALHRRLLNRRLLLAVTPWVGDVVVPCTQASQRPAVVQTQADGLREQLQQARLASTPVFTLFTQLFHIDTAGCLEVVRERKALPPRLPQAGARDPPVHLLQASSSAQSTPGHLFPNVPAQEASKSASHKGSRRLASSRVERTLPQASLLASTGPRPKPKTVSELLQEKRLQEARAREATRGPVVLPSQLLVSSSVILQPPLPHTPHGRPAPGPTVLNVPLSGPGAPAAAKPGTSGSWQEAGTSAKDKRLSTMQALPLAPVFSEAEGTAPAASQAPALGPGQISVSCPESGLGQSQAPAASRKQGLPEAPPFLPAAPSPTPLPVQPLSLTHIGGPHVATSVPLPVTWVLTAQGLLPVPVPAVVSLPRPAGTPGPAGLLATLLPPLTETRAAQGPRAPALSSSWQPPANMNREPEPSCRTDTPAPPTHALSQSPAEADGSVAFVPGEAQVAREIPEPRTSSHADPPEAEPPWSGRLPAFGGVIPATEPRGTPGSPSGTQEPRGPLGLEKLPLRQPGPEKGALDLEKPPLPQPGPEKGALDLGLLSQEGEAATQQWLGGQRGVRVPLLGSRLPYQPPALCSLRALSGLLLHKKALEHKATSLVVGGEAERPAGALQASLGLVRGQLQDNPAYLLLRARFLAAFTLPALLATLAPQGVRTTLSVPSRVGSESEDEDLLSELELADRDGQPGCTTATCPIQGAPDSGKCSASSCLDTSNDPDDLDVLRTRHARHTRKRRRLV

SEQ ID NO: 3882 - protein, 1164 aa, Homo sapiens
MAQQANVGELLAMLDSPMLGVRDDVTAVFKENLNSDRGPMLVNTLVDYYLETSSQPALHILTTLQEPHDKHLLDRINEYVGKAATRLSILSLLGHVIRLQPSWKHKLSQAPLLPSLLKCLKMDTDVVVLTTGVLVLITMLPMIPQSGKQHLLDFFDIFGRLSSWCLKKPGHVAEVYLVHLHASVYALFHRLYGMYPCNFVSFLRSHYSMKENLETFEEVVKPMMEHVRIHPELVTGSKDHELDPRRWKRLETHDVVIECAKISLDPTEASYEDGYSVSHQISARFPHRSADVTTSPYADTQNSYGCATSTPYSTSRLMLLNMPGQLPQTLSSPSTRLITEPPQATLWSPSMVCGMTTPPTSPGNVPPDLSHPYSKVFGTTAGGKGTPLGTPATSPPPAPLCHSDDYVHISLPQATVTPPRKEERMDSARPCLHRQHHLLNDRGSEEPPGSKGSVTLSDLPGFLGDLASEEDSIEKDKEEAAISRELSEITTAEAEPVVPRGGFDSPFYRDSLPGSQRKTHSAASSSQGASVNPEPLHSSLDKLGPDTPKQAFTPIDLPCGSADESPAGDRECQTSLETSIFTPSPCKIPPPTRVGFGSGQPPPYDHLFEVALPKTAHHFVIRKTEELLKKAKGNTEEDGVPSTSPMEVLDRLIQQGADAHSKELNKLPLPSKSVDWTHFGGSPPSDEIRTLRDQLLLLHNQLLYERFKRQQHALRNRRLLRKVIKAAALEEHNAAMKDQLKLQEKDIQMWKVSLQKEQARYNQLQEQRDTMVTKLHSQIRQLQHDREEFYNQSQELQTKLEDCRNMIAELRIELKKANNKVCHTELLLSQVSQKLSNSESVQQQMEFLNRQLLVLGEVNELYLEQLQNKHSDTTKEVEMMKAAYRKELEKNRSHVLQQTQRLDTSQKRILELESHLAKKDHLLLEQKKYLEDVKLQARGQLQAAESRYEAQKRITQVFELEILDLYGRLEKDGLLKKLEEEKAEAAEAAEERLDCCNDGCSDSMVGHNEEASGHNGETKTPRPSSARGSSGSRGGGGSSSSSSELSTPEKPPHQRAGPFSSRWETTMGEASASIPTTVGSLPSSKSFLGMKARELFRNKSESQCDEDGMTSSLSESLKTELGKDLGVEAKIPLNLDGPHPSPPTPDSVGQLHIMDYNETHHEHS

SEQ ID NO: 3883 - protein, 305 aa, Homo sapiens
MASRQPEVPALEASAPLGKMSLPIGIYRRAVSYDDTLEDPAPMTPPPSDMGSVPWKPVIPERKYQHLAKVEEGEASLPSPAMTLSSAIDSVDKVPVVKAKATHVIMNSLITKQTQESIQHFERQAGLRDAGYTPHKGLTTEETKYLRVAEALHKLKLQSGEVTKEERQPASAQSTPSTTPHSSPKQRPRGWFTSGSSTALPGPNPSTMDSGSGDKDRNLSDKWSLFGPRSLQKYDSGSFATQAYRGAQKPSPLELIRAQANRMAEDPAALKPPKMDIPVMEGKKQPPRAHNLKPRDLNVLTPTGF

SEQ ID NO: 3884 - protein, 486 aa, Homo sapiens
MRSGAERRGSSAAASPGSPPPGRARPAGSDAPSALPPPAAGQPRARDSGDVRSQPRPLFQWSKWKKRMGSSMSAATARRPVFDDKEDVNFDHFQILRAIGKGSFGKVCIVQKRDTEKMYAMKYMNKQQCIERDEVRNVFRELEILQEIEHVFLVNLWYSFQDEEDMFMVVDLLLGGDLRYHLQQNVQFSEDTVRLYICEMALALDYLRGQHIIHRDVKPDNILLDERGHAHLTDFNIATIIKDGERATALAGTKPYMAPEIFHSFVNGGTGYSFEVDWWSVGVMAYELLRGWRPYDIHSSNAVESLVQLFSTVSVQYVPTWSKEMVALLRKLLTVNPEHRLSSLQDVQAAPALAGVLWDHLSEKRVEPGFVPNKGRLHCDPTFELEEMILESRPLHKKKKRLAKNKSRDNSRDSSQSENDYLQDCLDAIQQDFVIFNREKLKRSQDLPREPLPAPESRDAAEPVEDEAERSALPMCGPICPSAGSG

SEQ ID NO: 3885 - protein, 156 aa, Homo sapiens
MAPARAGFCPLLLLLLLGLWVAEIPVSAKPKGMTSSQWFKIQHMQPSPQACNSAMKNINKHTKRCKDLNTFLHEPFSSVAATCQTPKIACKNGDKNCHQSHGAVSLTMCKLTSGKHPNCRYKEKRQNKSYVVACKPPQKKDSQQFHLVPVHLDRVL

SEQ ID NO: 3886 - protein, 1519 aa, Homo sapiens
MEPEPVEDCVQSTLAALYPPFEATAPTLLGQVFQVVERTYREDALRYTLDFLVPAKHLLAKVQQEACAQYSGFLFFHEGWPLCLHEQVVVQLAALPWQLLRPGDFYLQVVPSAAQAPRLALKCLAPGGGRVQEVPVPNEACAYLFTPEWLQGINKDRPTGRLSTCLLSAPSGIQRLPWAELICPRFVHKEGLMVGHQPSTLPPELPSGPPGLPSPPLPEEALGTRSPGDGHNAPVEGPEGEYVELLEVTLPVRGSPTDAEGSPGLSRVRTVPTRKGAGGKGRHRRHRAWMHQKGLGPRGQDGARPPGEGSSTGASPESPPGAEAVPEAAVLEVSEPPAEAVGEASGSCPLRPGELRGGGGGGQGAEGPPGTPRRTGKGNRRKKRAAGRGALSRGGDSAPLSPGDKEDASHQEALGNLPSPSEHKLPECHLVKEEYEGSGKPESEPKELKTAGEKEPQLSEACGPTEEGAGERELEGPGLLCMAGHTGPEGPLSDTPTPPLETVQEGKGDNIPEEALAVSVSDHPDVAWDLMASGFLILTGGVDQSGRALLTITPPCPPEEPPPSRDTLNTTLHYLHSLLRPDLQTLGLSVLLDLRQAPPLPPALIPALSQLQDSGDPPLVQRLLILIHDDLPTELCGFQGAEVLSENDLKRVAKPEELQWELGGHRDPSPSHWVEIHQEVVRLCRLCQGVLGSVRQAIEELEGAAEPEEEEAVGMPKPLQKVLADPRLTALQRDGGAILMRLRSTPSSKLEGQGPATLYQEVDEAIHQLVRLSNLHVQQQEQRQCLRRLQQVLQWLSGPGEEQLASFAMPGDTLSALQETELRFRAFSAEVQERLAQAREALALEENATSQKVLDIFEQRLEQVESGLHRALRLQRFFQQAHEWVDEGFARLAGAGPGREAVLAALALRRAPEPSAGTFQEMRALALDLGSPAALREWGRCQARCQELERRIQQHVGEEASPRGYRRRRADGASSGGAQWGPRSPSPSLSSLLLPSSPGPRPAPSHCSLAPCGEDYEEEGPELAPEAEGRPPRAVLIRGLEVTSTEVVDRTCSPREHVLLGRARGPDGPWGVGTPRMERKRSISAQQRLVSELIACEQDYVATLSEPVPPPGPELTPELRGTWAAALSARERLRSFHRTHFLRELQGCATHPLRIGACFLRHGDQFSLYAQYVKHRHKLENGLAALSPLSKGSMEAGPYLPRALQQPLEQLTRYGRLLEELLREAGPELSSECRALGAAVQLLREQEARGRDLLAVEAVRGCEIDLKEQGQLLHRDPFTVICGRKKCLRHVFLFEHLLLFSKLKGPEGGSEMFVYKQAFKTADMGLTENIGDSGLCFELWFRRRRAREAYTLQATSPEIKLKWTSSIAQLLWRQAAHNKELRVQQMVSMGIGNKPFLDIKALGERTLSALLTGRAARTRASVAVSSFEHAGPSLPGLSPGACSLPARVEEEAWDLDVKQISLAPETLDSSGDVSPGPRNSPSLQPPHPGSSTPTLASRGILGLSRQSHARALSDPTTPL

SEQ ID NO: 3887 - protein, 303 aa, Homo sapiens
MADDQGCIEEQGVEDSANEDSVDAKPDRSSFVPSLFSKKKKNVTMRSIKTTRDRVPTYQYNMNFEKLGKCIIINNKNFDKVTGMGVRNGTDKDAEALFKCFRSLGFDVIVYNDCSCAKMQDLLKKASEEDHTNAACFACILLSHGEENVIYGKDGVTPIKDLTAHFRGDRCKTLLEKPKLFFIQACRGTELDDGIQADSGPINDTDANPRYKIPVEADFLFAYSTVPGYYSWRSPGRGSWFVQALCSILEEHGKDLEIMQILTRVNDRVARHFESQSDDPHFHEKKQIPCVVSMLTKELYFSQ

SEQ ID NO: 3888 - protein, 580 aa, Homo sapiens
MSDTWSSIQAHKKQLDSLRERLQRRRKQDSGHLDLRNPEAALSPTFRSDSPVPTAPTSGGPKPSTASAVPELATDPELEKKLLHHLSDLALTLPTDAVSICLAISTPDAPATQDGVESLLQKFAAQELIEVKRGLLQDDAHPTLVTYADHSKLSAMMGAVAEKKGPGEVAGTVTGQKRRAEQDSTTVAAFASSLVSGLNSSASEPAKEPAKKSRKHAASDVDLEIESLLNQQSTKEQQSKKVSQEILELLNTTTAKEQSIVEKFRSRGRAQVQEFCDYGTKEECMKASDADRPCRKLHFRRIINKHTDESLGDCSFLNTCFHMDTCKYVHYEIDACMDSEAPGSKDHTPSQELALTQSVGGDSSADRLFPPQWICCDIRYLDVSILGKFAVVMADPPWDIHMELPYGTLTDDEMRRLNIPVLQDDGFLFLWVTGRAMELGRECLNLWGYERVDEIIWVKTNQLQRIIRTGRTGHWLNHGKEHCLVGVKGNPQGFNQGLDCDVIVAEVRSTSHKPDEIYGMIERLSPGTRKIELFGRPHNVQPNWITLGNQLDGIHLLDPDVVARFKQRYPDGIISKPKNL

SEQ ID NO: 3889 - protein, 345 aa, Homo sapiens
MVAALLGGGGEARGGTVPGAWLCLMALLQLLGSAPRGSGLAHGRRLICWQALLQCQGEPECSYAYNQYAEACAPVLAQHGGGDAPGAAAAAFPASAASFSSRWRCPSHCISALIQLNHTRRGPALEDCDCAQDENCKSTKRAIEPCLPRTSGGGAGGPGAGGVMGCTEARRRCDRDSRCNLALSRYLTYCGKVFNGLRCTDECRTVIEDMLAMPKAALLNDCVCDGLERPICESVKENMARLCFGAELGNGPGSSGSDGGLDDYYDEDYDDEQRTGGAGGEQPLDDDDGVPHPPRPGSGAAASGGRGDLPYGPGRRSSGGGGRLAPRGAWTPLASILLLLLGPLF

SEQ ID NO: 3890 - protein, 1190 aa, Homo sapiens
MTSRFGKTYSRKGGNGSSKFDEVFSNKRTTLSTKWGETTFMAKLGQKRPNFKPDIQEIPKKPKVEEESTGDPFGFDSDDESLPVSSKNLAQVKCSSYSESSEAAQLEEVTSVLEANSKISHVVVEDTVVSDKCFPLEDTLLGKEKSTNRIVEDDASISSCNKLITSDKVENFHEEHEKNSHHIHKNADDSTKKPNAETTVASEIKETNDTWNSQFGKRPESPSEISPIKGSVRTGLFEWDNDFEDIRSEDCILSLDSDPLLEMKDDDFKNRLENLNEAIEEDIVQSVLRPTNCRTYCRANKTKSSQGASNFDKLMDGTSQALAKANSESSKDGLNQAKKGGVSCGTSFRGTVGRTRDYTVLHPSCLSVCNVTIQDTMERSMDEFTASTPADLGEAGRLRKKADIATSKTTTRFRPSNTKSKKDVKLEFFGFEDHETGGDEGGSGSSNYKIKYFGFDDLSESEDDEDDDCQVERKTSKKRTKTAPSPSLQPPPESNDNSQDSQSGTNNAENLDFTEDLPGVPESVKKPINKQGDKSKENTRKIFSGPKRSPTKAVYNARHWNHPDSEELPGPPVVKPQSVTVRLSSKEPNQKDDGVFKAPAPPSKVIKTVTIPTQPYQDIVTALKCRREDKELYTVVQHVKHFNDVVEFGENQEFTDDIEYLLSGLKSTQPLNTRCLSVISLATKCAMPSFRMHLRAHGMVAMVFKTLDDSQHHQNLSLCTAALMYILSRDRLNMDLDRASLDLMIRLLELEQDASSAKLLNEKDMNKIKEKIRRLCETVHNKHLDLENITTGHLAMETLLSLTSKRAGDWFKEELRLLGGLDHIVDKVKECVDHLSRDEDEEKLVASLWGAERCLRVLESVTVHNPENQSYLIAYKDSQLIVSSAKALQHCEELIQQYNRAEDSICLADSKPLPHQNVTNHVGKAVEDCMRAIIGVLLNLTNDNEWGSTKTGEQDGLIGTALNCVLQVPKYLPQEQRFDIRVLGLGLLINLVEYSARNRHCLVNMETSCSFDSSICSGEGDDSLRIGGQVHAVQALVQLFLERERAAQLAESKTDELIKDAPTTQHDKSGEWQETSGEIQWVSTEKTDGTEEKHKKEEEDEELDLNKALQHAGKHMEDCIVASYTALLLGCLCQESPINVTTVREYLPEGDFSIMTEMLKKFLSFMNLTCAVGTTGQKSISRVIEYLEHC

SEQ ID NO: 3891 - protein, 1281 aa, Homo sapiens
MPIVMARDLEETASSSEDEEVISQEDHPCIMWTGGCRRIPVLVFHADAILTKDNNIRVIGERYHLSYKIVRTDSRLVRSILTAHGFHEVHPSSTDYNLMWTGSHLKPFLLRTLSEAQKVNHFPRSYELTRKDRLYKNIIRMQHTHGFKAFHILPQTFLLPAEYAEFCNSYSKDRGPWIVKPVASSRGRGVYLINNPNQISLEENILVSRYINNPLLIDDFKFDVRLYVLVTSYDPLVIYLYEEGLARFATVRYDQGAKNIRNQFMHLTNYSVNKKSGDYVSCDDPEVEDYGNKWSMSAMLRYLKQEGRDTTALMAHVEDLIIKTIISAELAIATACKTFVPHRSSCFELYGFDVLIDSTLKPWLLEVNLSPSLACDAPLDLKIKASMISDMFTVVGFVCQDPAQRASTRPIYPTFESSRRNPFQKPQRCRPLSASDAEMKNLVGSAREKGPGKLGGSVLGLSMEEIKVLRRVKEENDRRGGFIRIFPTSETWEIYGSYLEHKTSMNYMLATRLFQDRMTADGAPELKIESLNSKAKLHAALYERKLLSLEVRKRRRRSSRLRAMRPKYPVITQPAEMNVKTETESEEEEEVALDNEDEEQEASQEESAGFLRENQAKYTPSLTALVENTPKENSMKVREWNNKGGHCCKLETQELEPKFNLMQILQDNGNLSKMQARIAFSAYLQHVQIRLMKDSGGQTFSASWAAKEDEQMELVVRFLKRASNNLQHSLRMVLPSRRLALLERRRILAHQLGDFIIVYNKETEQMAEKKSKKKVEEEEEDGVNMENFQEFIRQASEAELEEVLTFYTQKNKSASVFLGTHSKISKNNNNYSDSGAKGDHPETIMEEVKIKPPKQQQTTEIHSDKLSRFTTSAEKEAKLVYSNSSSGPTATLQKIPNTHLSSVTTSDLSPGPCHHSSLSQIPSAIPSMPHQPTILLNTVSASASPCLHPGAQNIPSPTGLPRCRSGSHTIGPFSSFQSAAHIYSQKLSRPSSAKAGSCYLNKHHSGIAKTQKEGEDASLYSKRYNQSMVTAELQRLAEKQAARQYSPSSHINLLTQQVTNLNLATGIINRSSASAPPTLRPIISPSGPTWSTQSDPQAPENHSSSPGSRSLQTGGFAWEGEVENNVYSQATGVVPQHKYHPTAGSYQLQFALQQLEQQKLQSRQLLDQSRARHQAIFGSQTLPNSNLWTMNNGAGCRISSATASGQKPTTLPQKVVPPPSSCASLVPKPPPNHEQVLRRATSQKASKGSSAEGQLNGLQSSLNPAAFVPITSSTDPAHTKI

SEQ ID NO: 3892 - protein, 424 aa, Homo sapiens [sequence omitted]

SEQ ID NO: 3893 - protein, 427 aa, Homo sapiens
MHLIDYLLLLLVGLLALSHGQLHVEHDGESCSNSSHQQILETGEGSPSLKIAPANADFAFRFYYLIASETPGKNIFFSPLSISAAYAMLSLGACSHSRSQILEGLGFNLTELSESDVHRGFQHLLHTLNLPGHGLETRVGSALFLSHNLKFLAKFLNDTMAVYEAKLFHTNFYDTVGTIQLINDHVKKETRGKIVDLVSELKKDVLMVLVNYIYFKALWEKPFISSRTTPKDFYVDENTTVRVPMMLQDQEHHWYLHDRYLPCSVLRMDYKGDATVFFILPNQGKMREIEEVLTPEMLMRWNNLLRKRNFYKKLELHLPKFSISGSYVLDQILPRLGFTDLFSKWADLSGITKQQKLEASKSFHKATLDVDEAGTEAAAATSFAIKFFSAQTNRHILRFNRPFLVVIFSTSTQSVLFLGKVVDPTKP

SEQ ID NO: 3894 - protein, 317 aa, Homo sapiens
MASYLYGVLFAVGLCAPIYCVSPANAPSAYPRPSSTKSTPASQVYSLNTDFAFRLYRRLVLETPSQNIFFSPARINSHVKKKTQGKVVDIIQGLDLLTAMVLVNHIFFKAKWEKPFHPEYTRKNFPFLVGEQVTVHVPMMHQKEQFAFGVDTELNCFVLQMDYKGDAVAFFVLPSKGKMRQLEQALSARTLRKWSHSLQKRWIEVFIPRFSISASYNLETILPKMGIQNVFDKNADFSGIAKRDSLQVSKATHKAVLDVSEEGTEATAATTTKFIVRSKDGPSYFTVSFNRTFLMMITNKATDGILFLGKVENPTKS

SEQ ID NO: 3895 - protein, 439 aa, Homo sapiens
MNLLPNIESPVTRQEKMATVWDEAEQDGIGEEVLKMSTEEIIQRTRLLDSEIKIMKSEVLRVTHELQAMKDKIKENSEKIKVNKTLPYLVSNVIELLDVDPNDQEEDGANIDLDSQRKGKCAVIKTSTRQTYFLPVIGLVDAEKLKPGDLVGVNKDSYLILETLPTEYDSRVKAMEVDERPTEQYSDIGGLDKQIQELVEAIVLPMNHKEKFENLGIQPPKGVLMYGPPGTGKTLLARACAAQTKATFLKLAGPQLVQMFIGDGAKLVRDAFALAKEKAPSIIFIDELDAIGTKRFDSEKAGDREVQRTMLELLNQLDGFQPNTQVKVIAATNRVDILDPALLRSGRLDRKIEFPMPNEEARARIMQIHSRKMNVSPDVNYEELARCTDDFNGAQCKAVCVEAGMIALRRGATELTHEDYMEGILEVQAKKKANLQYYA

SEQ ID NO: 3896 - protein, 159 aa, Homo sapiens
MPFTLHLRSRLPSAIRSLILQKKPNIRNTSSMAGELRPASLVVLPRSLAPAFERFCQVNTGPLPLLGQSEPEKWMLPPQGAISETSLRDLHSAWHRTSLMTVAQERAALPTVLTPSPITWRLSWLRSLRSWRKSSPGEIPLALPSVHSIAQARNPPVQD

SEQ ID NO: 3897 - protein, 782 aa, Homo sapiens
MTSIIKLTTLSGVQEESALCYLLQVDEFRFLLDCGWDEHFSMDIIDSLRKHVHQIDAVLLSHPDPLHLGALPYAVGKLGLNCAIYATIPVYKMGQMFMYDLYQSRHNTEDFTLFTLDDVDAAFDKIQQLKFSQIVNLKGKGHGLSITPLPAGHMIGGTIWKIVKDGEEEIVYAVDFNHKREIHLNGCSLEMLSRPSLLITDSFNATYVQPRRKQRDEQLLTNVLETLRGDGNVLIAVDTAGRVLELAQLLDQIWRTKDAGLGVYSLALLNNVSYNVVEFSKSQVEWMSDKLMRCFEDKRNNPFQFRHLSLCHGLSDLARVPSPKVVLASQPDLECGFSRDLFIQWCQDPKNSIILTYRTTPGTLARFLIDNPSEKITEIELRKRVKLEGKELEEYLEKEKLKKEAAKKLEQSKEADIDSSDESDIEEDIDQPSAHKTKHDLMMKGEGSRKGSFFKQAKKSYPMFPAPEERIKWDEYGEIIKPEDFLVPELQATEEEKSKLESGLTNGDEPMDQDLSDVPTKCISTTESIEIKARVTYIDYEGRSDGDSIKKIINQMKPRQLIIVHGPPEASQDLAECCRAFGGKDIKVYMPKLHETVDATSETHIYQVRLKDSLVSSLQFCKAKDAELAWIDGVLDMRVSKVDTGVILEEGELKDDGEDSEMQVEAPSDSSVIAQQKAMKSLFGDDEKETGEESEIIPTLEPLPPHEVPGHQSVFMNEPRLSDFKQVLLREGIQAEFVGGVLVCNNQVAVRRTETGRIGLEGCLCQDFYRIRDLLYEQYAIV

SEQ ID NO: 3898 - protein, 351 aa, Homo sapiens
MTLRLLEDWCRGMDMNPRKALLIAGISQSCSVAEIEEALQAGLAPLGEYRLLGRMFRRDENRKVALVGLTAETSHALVPKEIPGKGGIWRVIFKPPDPDNTFLSRLNEFLAGEGMTVGELSRALGHENGSLDPEQGMIPEMWAPMLAQALEALQPALQCLKYKKLRVFSGRESPEPGEEEFGRWMFHTTQMIKAWQVPDVEKRRRLLESLRGPALDVIRVLKINNPLITVDECLQALEEVFGVTDNPRELQVKYLTTYQKDEEKLSAYVLRLEPLLQKLVQRGAIERDAVNQARLDQVIAGAVHKTIRRELNLPEDGPAPGFLQLLVLIKDYEAAEEEEALLQAILEGNFT

SEQ ID NO: 3899 - protein, 410 aa, Homo sapiens
MGANASNYPHSCSPRVGGNSQAQQTFIGTSSYSQQGYGCESKLYSLDHGHEKPQDKKKRTSGLATLKKKFIKRRKSNRSADHAKQMRELLSGWDVRDVNALVEEYEGTSALKELSLQASLARPEARTLQKDMADLYEYKYCTDVDLIFQETCFPVHRAILAARCPFFKTLLSSSPEYGAEIIMDINTAGIDMPMFSALLHYLYTGEFGMEDSRFQNVDILVQLSEEFGTPNSLDVDMRGLFDYMCYYDVVLSFSSDSELVEAFGGNQNCLDEELKAHKAVISARSPFFRNLLQRRIRTGEEITDRTLRTPTRIILDESIIPKKYATVILHCMYTDVVDLSVLHCSPSVGSLSEVQALVAGKPNMTRAEEAMELYHIALFLEFNMLAQEETTVIRPACAAELSNSCLLPQS

SEQ ID NO: 3900 - protein, 1002 aa, Homo sapiens
MAAHEWDWFQREELIGQISDIRVQNLQVERENVQKRTFTRWINLHLEKCNPPLEVKDLFVDIQDGKILMALLEVLSGRNLLHEYKSSSHRIFRLNNIAKALKFLEDSNVKLVSIDAAEIADGNPSLVLGLIWNIILFFQIKELTGNLSRNSPSSSLSPGSGGTDSDSSFPPTPTAERSVAISVKDQRKAIKALLAWVQRKTRKYGVAVQDFAGSWRSGLAFLAVIKAIDPSLVDMKQALENSTRENLEKAFSIAQDALHIPRLLEPEDIMVDTPDEQSIMTYVAQFLERFPELEAEDIFDSDKEVPIESTFVRIKETPSEQESKVFVLTENGERTYTVNHETSHPPPSKVFVCDKPESMKEFRLDGVSSHALSDSSTEFMHQIIDQVLQGGPGKTSDISEPSPESSILSSRKENGRSNSLPIKKTVHFEADTYKDPFCSKNLSLCFEGSPRVAKESLRQDGHVLAVEVAEEKEQKQESSKIPESSSDKVAGDIFLVEGTNNNSQSSSCNGALESTARHDEESHSLSPPGENTVMADSFQIKVNLMTVEALEEGDYFEAIPLKASKFNSDLIDFASTSQAFNKVPSPHETKPDEDAEAFENHAEKLGKRSIKSAHKKKDSPEPQVKMDKHEPHQDSGEEAEGCPSAPEETPVDKKPEVHEKAKRKSTRPHYEEEGEDDDLQGVGEELSSSPPSSCVSLETLGSHSEEGLDFKPSPPLSKVSVIPHDLFYFPHYEVPLAAVLEAYVEDPEDLKNEEMDLEEPEGYMPDLDSREEEADGSQSSSSSSVPGESLPSASDQVLYLSRGGVGTTPASEPAPLAPHEDHQQRETKENDPMDSHQSQESPNLENIANPLEENVTKESISSKKKEKRKHVDHVESSLFVAPGSVQSSDDLEEDSSDYSIPSRTSHSDSSIYLRRHTHRSSESDHFSYVQLRNAADLDDRRNRILTRKANSSGEAMSLGSHSPQSDSLTQLVQQPDMMYFILFLWLLVYCLLLFPQLDVSRL

SEQ ID NO: 3901 - protein, 838 aa, Homo sapiens
MPMDLILVVWFCVCTARTAEDMKPPVLSLIWRTRVLKSLLQQSLQGVVGFGMDPDLQMDIVTELDLVNTTLGVAQVSGMHNASKAFLFQDIEREIHAAPHVSEKLIQLFRNKSEFTILATVQQKPSTSGVILSIRELEHSYFELESSGLRDEIRYHYIHNGKPRTEALPYRMADGQWHKVALSVSASHLLLHVDCNRIYERVIDPPDTNLPPGINLWLGQRNQKHGLFKGIIQDGKIIFMPNGYITQCPNLNHTCPTCSDFLSLVQGIMDLQELLAKMTAKLNYAETRLSQLENCHCEKTCQVSGLLYRDQDSWVDGDHCRNCTCKSGAVECRRMSCPPLNCSPDSLPVHIAGQCCKVCRPKCIYGGKVLAEGQRILTKSCRECRGGVLVKITEMCPPLNCSEKDHILPENQCCRVCRGHNFCAEGPKCGENSECKNWNTKATCECKSGYISVQGDSAYCEDIDECAAKMHYCHANTVCVNLPGLYRCDCVPGYIRVDDFSCTEHDECGSGQHNCDENAICTNTVQGHSCTCKPGYVGNGTICRAFCEEGCRYGGTCVAPNKCVCPSGFTGSHCEKDIDECSEGIIECHNHSRCVNLPGWYHCECRSGFHDDGTYSLSGESCIDIDECALRTHTCWNDSACINLAGGFDCLCPSGPSCSGDCPHEGGLKHNGQVWTLKEDRCSVCSCKDGKIFCRRTACDCQNPSADLFCCPECDTRVTSQCLDQNGHKLYRSGDNWTHSCQQCRCLEGEVDCWPLTCPNLSCEYTAILEGECCPRCVSDPCLADNITYDIRKTCLDSYGVSRLSGSVWTMAGSPCTTCKCKNGRVCCSVDFECLQNN

SEQ ID NO: 3902 - protein, 425 aa, Homo sapiens
MAAVATCGSVAASTGSAVATASKSNVTSFQRRGPRASVTNDSGPRLVSIAGTRPSVRNGQLLVSTGLPALDQLLGGGLAVGTVLLIEEDKYNIYSPLLFKYFLAEGIVNGHTLLVASAKEDPANILQELPAPLLDDKCKKEFDEDVYNHKTPESNIKMKIAWRYQLLPKMEQIGPVSSSRFGHYYDASKRMPQELIEASNWHGFFLPEKISSTLKVEPCSLTPGYTKLLQFIQNIIYEEGFDGSNPQKKQRNILRIGIQNLGSPLWGDDICCAENGGNSHSLTKFLYVLRGLLRTSLSACIITMPTHLIQNKAIIARVTTLSDVVVGLESFIGSERETNPLYKDYHGLIHIRQIPRLNNLICDESDVKDLAFKLKRKLFTIERLHLPPDLSDTVSRSSKMDLAESAKRLGPGCGMMAGGKKHLDF

SEQ ID NO: 3903 - protein, 302 aa, Homo sapiens
MSSLSGKVQTVLGLVEPSKLGRTLTHEHLAMTFDCCYCPPPPCQEAISKEPIVMKNLYWIQKNAYSHKENLQLNQETEAIKEELLYFKANGGGALVENTTTGISRDTQTLKRLAEETGVHIISGAGFYVDATHSSETRAMSVEQLTDVLMNEILHGADGTSIKCGIIGEIGCSWPLTESERKVLQATAHAQAQLGCPVIIHPGRSSRAPFQIIRILQEAGADISKTVMSHLDRVRLLVEEGCEDRILVAHDIHTKTRLMKYGGHGYSHILTNVVPKMLLRGITENVLDKILIENPKQWLTFK

SEQ ID NO: 3904 - protein, 255 aa, Homo sapiens
MVLLLVILIPVLVSSAGTSAHYEMLGTCRMVCDPYGGTKAPSTAATPDRGLMQSLPTFIQGPKGEAGRPGKAGPRGPPGEPGPPGPMGPPGEKGEPGRQGLPGPPGAPGLNAAGAISAATYSTVPKIAFYAGLKRQHEGYEVLKFDDVVTNLGNHYDPTTGKFTCSIPGIYFFTYHVLMRGGDGTSMWADLCKNNQVRASAIAQDADQNYDYASNSVVLHLEPGDEVYIKLDGGKAHGGNNNKYSTFSGFIIYAD

SEQ ID NO: 3905 - protein, 778 aa, Homo sapiens
MQQESERCRVRARRPDMALYVPKARRGAVLLKTGDEEESCGSPNSVVKEKQKESSLSQKEVFKDKPEARRLNINPDRKEHNCREEKKSSTKLRMDTCLQKTNRVCSKRGTTESKEVLSQGQQQGAPNAGVITNAPLQRHFKPKKVECLEVETTDVTGHERILLSQACLEISEAQVPSKPFQNVEFCDFSRHEPDGEAFEDKDLEGRIETDTKVLEILYEFPRVFSSVMKPENMIVPIKLSSDSEIVQQSMQTSDGILNPSSGGITTTSVPGSPDGVFDQTCVDFEVESVGGIANSTGFILDQKDTDSIPATMGHISLSESTNDTVSPVMIRECEKNDSTADELHVKHEPPDTAVLAHETHRDSGFKNVGDITNKACMMDTTGMSCSDHVTVDSPYVVAVRIADETSINTRSFSKFVGMSADATPLHVARSGNDTEDFSNPSACSDIYGESISSHFTESTGKLIESLSDCASSLPIKKIAGSNYNTFLDSELSMLNGTKVLSDSAVGIDLGSTGDTTEALHELRTAEEFKTEEQDDSGSIEFGVSFPDRESSSMETSIEPKATETSHTEGITAIEESWESMFNDDGDCLDPRLLQELSGNTKSRESIQEPRSDYYNHEVPDIDLSDCEFPHVIEIYDFPQEFHTEDLLRVFCSYQKKGFDIKWVDDTHALGVFSSPITARDALGIKHTMVKIRPLSQATRAAKAKARAYAEFLQPAKERPETSAALARRLVISALGVRSKQSKTEREAELKKLQEARERKRLEAKQREDIWEGRDQSTV

SEQ ID NO: 3906 - protein, 499 aa, Homo sapiens
MDTSPLCFSILLVLCIFIQSSALGQSLKPEPFGRRAQAVETNKTLHEMKTRFLLFGETNQGCQIRINHPDTLQECGFNSSLPLVMIIHGWSVDGVLENWIWQMVAALKSQPAQPVNVGLVDWITLAHDHYTIAVRNTRLVGKEVAALLRWLEESVQLSRSHVHLIGYSLGAHVSGFAGSSIGGTHKIGRITGLDAAGPLFEGSAPSNRLSPDDANFVDAIHTFTREHMGLSVGIKQPIGHYDFYPNGGSFQPGCHFLELYRHIAQHGFNAITQTIKCSHERSVHLFIDSLLHAGTQSMAYPCGDMNSFSQGLCLSCKKGRCNTLGYHVRQEPRSKSKRLFLVTRAQSPFKVYHYQFKIQFINQTETPIQTTFTMSLLGTKEKMQKIPITLGKGIASNKTYSFLITLDVDIGELIMIKFKWENSAVWANVWDTVQTIIPWSTGPRHSGLVLKTIRVKAGETQQRMTFCSENTDDLLLRPTQEKIFVKCEIKSKTSKRKIR

SEQ ID NO: 3907 - protein, 519 aa, Homo sapiens
MPFNGEKQCVGEDQPSDSDSSRFSESMASLSDYECSRQSFASDSSSKSSSPASTSPPRVVTFDEVMATARNLSNLTLAHEIAVNENFQLKQEALPEKSLAGRVKHIVHQAFWDVLDSELNADPPEFEHAIKLFEEIREILLSFLTPGGNRLRNQICEVLDTDLIRQQAEHSAVDIQGLANYVISTMGKLCAPVRDNDIRELKATGNIVEVLRQIFHVLDLMQMDMANFTIMSLRPHLQRQLVEYERTKFQEILEETPSALDQTTEWIKESVNEELFSLSESALTPGAENTSKPSLSPTLVLNNSYLKLLQWDYQKKELPETLMTDGARLQELTEKLNQLKIIACLSLITNNMVGAITGGLPELASRLTRISAVLLEGMNKETFNLKEVLNSIGIQTCVEVNKTLMERGLPTLNAEIQANLIGQFSSIEEEDNPIWSLIDKRIKLYMRRLLCLPSPQKCMPPMPGGLAVIQQELEALGSQYANIVNLNKQVYGPFYANILRKLLFNEEAMGKVDASPPTN

SEQ ID NO: 3908 - protein, 444 aa, Homo sapiens
MSEETATSDNDNSYARVRAVVMTRDDSSGGWLPLGGSGLSSVTVFKVPHQEENGCADFFIRGERLRDKMVVLECMLKKDLIYNKVTPTFHHWKIDDKKFGLTFQSPADARAFDRGIRRAIEDISQGCPESKNEAEGADDLQANEEDSSSSLVKDHLFQQETVVTSEPYRSSNIRPSPFEDLNARRVYMQSQANQITFGQPGLDIQSRSMEYVQRQISKECGSLKSQNRVPLKSIRHVSFQDEDEIVRINPRDILIRRYADYRHPDMWKNDLERDDADSSIQFSKPDSKKSDYLYSCGDETKLSSPKDSVVFKTQPSSLKIKKSKRRKEDGERSRCVYCQERFNHEENVRGKCQDAPDPIKRCIYQVSCMLCAESMLYHCMSDSEGDFSDPCSCDTSDDKFCLRWLALVALSFIVPCMCCYVPLRMCHRCGEACGCCGGKHKAAG

SEQ ID NO: 3909 - protein, 538 aa, Homo sapiens
MSFSATILFSPPSGSEARCCCCACKSETNGGNTGSQGGNPPPSTPITVTGHGLAVQSSEQLLHVIYQRVDKAVGLAEAALGLARANNELLKRLQEEVGDLRQGKVSIPDEDGESRAHSSPPEEPGPLKESPGEAFKALSAVEEECDSVGSGVQVVIEELRQLGAASVGPGPLGFPATQRDMRLPGCTLAASEAAPLLNPLVDDYVASEGAVQRVLVPAYAKQLSPATQLAIQRATPETGPENGTKLPPPRPEDMLNAAAALDSALEESGPGSTGELRHSLGLTVSPCRTRGSGQKNSRRKRDLVLSKLVHNVHNHITNDKRFNGSESIKSSWNISVVKFLLEKLKQELVTSPHNYTDKELKGACVAYFLTKRREYRNSLNPFKGLKEKEEKKLRSRRYRLFANRSSIMRHFGPEDQRLWNDVTEELMSDEEDSLNEPGVWVARPPRFRAQRLTELCYHLDANSKHGTKANRVYGPPSDRLPSAEAQLLPPELYNPNFQEEEDEGGDENAPGSPSFDQPHKTCCPDLNSFIEIKVEKDE

SEQ ID NO: 3910 - protein, 310 aa, Homo sapiens
MALRRPPRLRLCARLPDFFLLLLFRGCLIGAVNLKSSNRTPVVQEFESVELSCIITDSQTSDPRIEWKKIQDEQTTYVFFDNKIQGDLAGRAEILGKTSLKIWNVTRRDSALYRCEVVARNDRKEIDEIVIELTVQVKPVTPVCRVPKAVPVGKMATLHCQESEGHPRPHYSWYRNDVPLPTDSRANPRFRNSSFHLNSETGTLVFTAVHKDDSGQYYCIASNDAGSARCEEQEMEVYDLNIGGIIGGVLVVLAVLALITLGICCAYRRGYFINNKQDGESYKNPGKPDGVNYIRTDEEGDFRHKSSFVI

SEQ ID NO: 3911 - protein, 292 aa, Homo sapiens
MASRSKRRAVESGVPQPPDPPVQRDEEEEKEVENEDEDDDDSDKEKDEEDEVIDEEVNIEFEAYSLSDNDYDGIKKLLQQLFLKAPVNTAELTDLLIQQNHIGSVIKQTDVSEDSNDDMDEDEVFGFISLLNLTERKGTQCVEQIQELVLRFCEKNCEKSMVEQLDKFLNDTTKPVGLLLSERFINVPPQIALPMYQQLQKELAGAHRTNKPCGKCYFYLLISKTFVEAGKNNSKKKPSNKKKAALMFANAEEEFFYEEQGKPEVLGGPDTRRGLEPVPIQHNGWSVPPVLE

SEQ ID NO: 3912 - protein, 796 aa, Homo sapiens
MPTTQQSPQDEQEKLLDEAIQAVKVQSFQMKRCLDKNKLMDALKHASNMLGELRTSMLSPKSYYELYMAISDELHYLEVYLTDEFAKGRKVADLYELVQYAGNIIPRLYLLITVGVVYVKSFPQSRKDILKDLVEMCRGVQHPLRGLFLRNYLLQCTRNILPDEGEPTDEETTGDISDSMDFVLLNFAEMNKLWVRMQHQGHSRDREKRERERQELRILVGTNLVRLSQLEGVNVERYKQIVLTGILEQVVNCRDALAQEYLMECIIQVFPDEFHLQTLNPFLRACAELHQNVNVKNIIIALIDRLALFAHREDGPGIPADIKLFDIFSQQVATVIQSRQDMPSEDVVSLQVSLINLAMKCYPDRVDYVDKVLETTVEIFNKLNLEHIATSSAVSKELTRLLKIPVDTYNNILTVLKLKHFHPLFEYFDYESRKSMSCYVLSNVLDYNTEIVSQDQVDSIMNLVSTLIQDQPDQPVEDPDPEDFADEQSLVGRFIHLLRSEDPDQQYLILNTARKHFGAGGNQRIRFTLPPLVFAAYQLAFRYKENSKVDDKWEKKCQKIFSFAHQTISALIKAELAELPLRLFLQGALAAGEIGFENHETVAYEFMSQAFSLYEDEISDSKAQLAAITLIIGTFERMKCFSEENHEPLRTQCALAASKLLKKPDQGRAVSTCAHLFWSGRNTDKNGEELHGGKRVMECLKKALKIANQCMDPSLQVQLFIEILNRYIYFYEKENDAVTIQVLNQLIQKIREDLPNLESSEETEQINKHFHNTLEHLRLRRESPESEGPIYEGLIL

SEQ ID NO: 3913 - protein, 167 aa, Homo sapiens
MIITTWIVYILARKGVGLPFLPITSSDIDVVESEAVSVLHHWLKKTEEEASRGIKEKLSINHPSQGVREKMSTDSPPTHGQDIHVTRDVVKHHLSKSDLLANQSQEVLEERTRIQFIRWSHTRIFQVPSEMTEDIMRDRIEQVRRSISRLTDVSAQDFSMRPSSSDC

SEQ ID NO: 3914 - protein, 453 aa, Homo sapiens
MGVLGRVLLWLQLCALTQAVSKLWVPNTDFDVAANWSQNRTPCAGGAVEFPADKMVSVLVQEGHAVSDMLLPLDGELVLASGAGFGVSDVGSHLDCGAGEPAVFRDSDRFSWHDPHLWRSGDEAPGLFFVDAERVPCRHDDVFFPPSASFRVGLGPGASPVRVRSISALGRTFTRDEDLAVFLASRAGRLRFHGPGALSVGPEDCADPSGCVCGNAEAQPWICAALLQPLGGRCPQAACHSALRPQGQCCDLCGAVVLLTHGPAFDLERYRARILDTFLGLPQYHGLQVAVSKVPRSSRLREADTEIQVVLVENGPETGGAGRLARALLADVAENGEALGVLEATMRESGAHVWGSSAAGLAGGVAAAVLLALLVLLVAPPLLRRAGRLRWRRHEAAAPAGAPLGFRNPVFDVTASEELPLPRRLSLVPKAAADSTSHSYFVNPLFAGAEAEA

SEQ ID NO: 3915 - protein, 377 aa, Homo sapiens
MSEVKSRKKSGPKGAPAAEPGKRSEGGKTPVARSSGGGGWADPRTCLSLLSLGTCLGLAWFVFQQSEKFAKVENQYQLLKLETNEFQQLQSKISLISEKLESTESILQEATSSMSLMTQFEQEVSNLQDIMHDIQNNEEVLTQRMQSLNEKFQNITDFWKRSLEEMNINTDIFKSEAKHIHSQVTVQINSAEQEIKLLTERLKDLEDSTLRNIRTVKRQEEEDLLRVEEQLGSDTKAIEKLEEEQHALFARDEDLTNKLSDYEPKVEECKTHLPTIESAIHSVLRVSQDLIETEKKMEDLTMQMFNMEDDMLKAVSEIMEMQKTLEGIQYDNSILKMQNELDILKEKVHDFIAYSSTGEKGTLKEYNIENKGIGGDF

SEQ ID NO: 3916 - protein, 349 aa, Homo sapiens
MAATAAEAVASGSGEPREEAGALGPAWDESQLRSYSFPTRPIPRLSQSDPRAEELIENEEPVVLTDTNLVYPALKWDLEYLQENIGNGDFSVYSASTHKFLYYDEKKMANFQNFKPRSNREEMKFHEFVEKLQDIQQRGGEERLYLQQTLNDTVGRKIVMDFLGFNWNWINKQQGKRGWGQLTSNLLLIGMEGNVTPAHYDEQQNFFAQIKGYKRCILFPPDQFECLYPYPVHHPCDRQSQVDFDNPDYERFPNFQNVVGYETVVGPGDVLYIPMYWWHHIESLLNGGITITVNFWYKGAPTPKRIEYPLKAHQKVAIMRNIEKMLGEALGNPQEVGPLLNTMIKGRYN

SEQ ID NO: 3917 - protein, 950 aa, Homo sapiens
MLLLGILTLAFAGRTAGGSEPEREVVVPIRLDPDINGRRYYWRGPEDSGDQGLIFQITAFQEDFYLHLTPDAQFLAPAFSTEHLGVPLQGLTGGSSDLRRCFYSGDVNAEPDSFAAVSLCGGLRGAFGYRGAEYVISPLPNASAPAAQRNSQGAHLLQRRGVPGGPSGDPTSRCGVASGWNPAILRALDPYKPRRAGFGESRSRRRSGRAKRFVSIPRYVETLVVADESMVKFHGADLEHYLLTLLATAARLYRHPSILNPINIVVVKVLLLRDRDSGPKVTGNAALTLRNFCAWQKKLNKVSDKHPEYWDTAILFTRQDLCGATTCDTLGMADVGTMCDPKRSCSVIEDDGLPSAFTTAHELGHVFNMPHDNVKVCEEVFGKLRANHMMSPTLIQIDRANPWSACSAAIITDFLDSGHGDCLLDQPSKPISLPEDLPGASYTLSQQCELAFGVGSKPCPYMQYCTKLWCTGKAKGQMVCQTRHFPWADGTSCGEGKLCLKGACVERHNLNKHRVDGSWAKWDPYGPCSRTCGGGVQLARRQCTNPTPANGGKYCEGVRVKYRSCNLEPCPSSASGKSFREEQCEAFNGYNHSTNRLTLAVAWVPKYSGVSPRDKCKLICRANGTGYFYVLAPKVVDGTLCSPDSTSVCVQGKCIKAGCDGNLGSKKRFDKCGVCGGDNKSCKKVTGLFTKPMHGYNFVVAIPAGASSIDIRQRGYKGLIGDDNYLALKNSQGKYLLNGHFVVSAVERDLVVKGSLLRYSGTGTAVESLQASRPILEPLTVEVLSVGKMTPPRVRYSFYLPKEPREDKSSHPKDPRGPSVLHNSVLSLSNQVEQPDDRPPARWVAGSWGPCSASCGSGLQKRAVDCRGSAGQRTVPACDAAHRPVETQACGEPCPTWELSAWSPCSKSCGRGFQRRSLKCVGHGGRLLARDQCNLHRKPQELDFCVLRPC

SEQ ID NO: 3918 - protein, 186 aa, Homo sapiens
MAVARAGVLGVQWLQRASRNVMPLGARTASHMTKDMFPGPYPRTPEERAAAAKKYNMRVEDYEPYPDDGMGYGDYPKLPDRSQHERDPWYSWDQPGLRLNWGEPMHWHLDMYNRNRVDTSPTPVSWHVMCMQLFGFLAFMIFMCWVGDVYPVYQPVGPKQYPYNNLYLERGGDPSKEPERVVHYEI

SEQ ID NO: 3919 - protein, 1093 aa, Homo sapiens
MAGAAGLTAEVSWKVLERRARTKRSGSVYEPLKSINLPRPDNETLWDKLDHYYRIVKSTLLLYQSPTTGLFPTKTCGGDQKAKIQDSLYCAAGAWALALAYRRIDDDKGRTHELEHSAIKCMRGILYCYMRQADKVQQFKQDPRPTTCLHSVFNVHTGDELLSYEEYGHLQINAVSLYLLYLVEMISSGLQIIYNTDEVSFIQNLVFCVERVYRVPDFGVWERGSKYNNGSTELHSSSVGLAKAALEAINGFNLFGNQGCSWSVIFVDLDAHNRNRQTLCSLLPRESRSHNTDAALLPCISYPAFALDDEVLFSQTLDKVVRKLKGKYGFKRFLRDGYRTSLEDPNRCYYKPAEIKLFDGIECEFPIFFLYMMIDGVFRGNPKQVQEYQDLLTPVLHHTTEGYPVVPKYYYVPADFVEYEKNNPGSQKRFPSNCGRDGKLFLWGQALYIIAKLLADELISPKDIDPVQRYVPLKDQRNVSMRFSNQGPLENDLVVHVALIAESQRLQVFLNTYGIQTQTPQQVEPIQIWPQQELVKAYLQLGINEKLGLSGRPDRPIGCLGTSKIYRILGKTVVCYPIIFDLSDFYMSQDVFLLIDDIKNALQFIKQYWKMHGRPLFLVLIREDNIRGSRFNPILDMLAALKKGIIGGVKVHVDRLQTLISGAVVEQLDFLRISDTEELPEFKSFEELEPPKHSKVKRQSSTPSAPELGQQPDVNISEWKDKPTHEILQKLNDCSCLASQAILLGILLKREGPNFITKEGTVSDHIERVYRRAGSQKLWSVVRRAASLLSKVVDSLAPSITNVLVQGKQVTLGAFGHEEEVISNPLSPRVIQNIIYYKCNTHDEREAVIQQELVIHIGWIISNNPELFSGMLKIRIGWIIHAMEYELQIRGGDKPALDLYQLSPSEVKQLLLDILQPQQNGRCWLNRRQIDGSLNRTPTGFYDRVWQILERTPNGIIVAGKHLPQQPTLSDMTMYEMNFSLLVEDTLGNIDQPQYRQIVVELLMVVSIVLERNPELEFQDKVDLDRLVKEAFNEFQKDQSRLKEIEKQDDMTSFYNTPPLGKRGTCSYLTKAVMNLLLEGEVKPNNDDPCLIS

SEQ ID NO: 3920 - protein, 418 aa, Homo sapiens
MRLSAGPDAGPSGNSSPWWPLATGAGNTSREAEALGEGNGPPRDVRNEELAKLEIAVLAVTFAVAVLGNSSVLLALHRTPRKTSRMHLFIRHLSLADLAVAFFQVLPQMCWDITYRFRGPDWLCRVVKHLQVFGMFASAYMLVVMTADRYIAVCHPLKTLQQPARRSRLMIAAAWVLSFVLSTPQYFVFSMIEVNNVTKARDCWATFIQPWGSRAYVTWMTGGIFVAPVVILGTCYGFICYNIWCNVRGKTASRQSKGAEQAGVAFQKGFLLAPCVSSVKSISRAKIRTVKMTFVIVTAYIVCWAPFFIIQMWSVWDPMSVWTESENPTITITALLGSLNSCCNPWIYMFFSGHLLQDCVQSFPCCQNMKEKFNKEDTDSMSRRQTFYSNNRSPTNSTGMWKDSPKSSKSIKFIPVST

SEQ ID NO: 3921 - protein, 680 aa, Homo sapiens
MGKSRTKRFKRPQFSPTGDCQAEAAAAANGTGGEEDDGPAAELLEKLQHPSAEVRECACAGLARLVQQRPALPGLARRDAVRRLGPLLLDPSLAVRETAAGALRNLSACGGFEVCDDMVTKDIMTPLVALLKECSAGLDSNEMSLQEKKDQNRNSIENIANETVNVLWNICECSSRAVSIFNKEGCLEIVLKYLSRFPTNVDLAISVAYCLQTVTEDNPELLKSFSATALNMLESALLSPVSSMESLLLKTLVAGTIWNLKDIIPCKSQAEIINALLKILSEVLGMDAGEMVIQMKEAETQRLKTAAEAEEILENTNGDDLIEDDEMEGISHKRRVRRKTFVSDLLPPTDKELRETIALLTAQQTALEIIVNMCCNEDPSDDEWEELSSSDESDAFMENSFSECGGQLFSPLCLSHEVHTALTNYLIPKKIFEKTAFPNSIAVDLCSRNPTWKPLIRKMNTIQCRALFCLQSLVSLLDVEHLGGAAALQTLAQHLSQLLFSQPDFAKHVDFLEAISSALRALLQTMASKNISQCMTPDQLMTLCKAGIHSSNVGVRVNVVSILGITGSVLAKEDGTLETLKNIGCFLLEVTTKDPSLVVAGEALDALFDVFADGKEAERASIQIKLLSALKEFQPVFKMKIRKEGRGNYSTDQLCVLDNVKMNLRRFIAYQETVEKRLTS

SEQ ID NO: 3922 - protein, 381 aa, Homo sapiens
MPFSNSHNALKLRFPAEDEFPDLSAHNNHMAKVLTPELYAELRAKSTPSGFTLDDVIQTGVDNPGHPYIMTVGCVAGDEESYEVFKDLFDPIIEDRHGGYKPSDEHKTDLNPDNLQGGDDLDPNYVLSSRVRTGRSIRGFCLPPHCSRGERRAIEKLAVEALSSLDGDLAGRYYALKSMTEAEQQQLIDDHFLFDKPVSPLLLASGMARDWPDARGIWHNDNKTFLVWVNEEDHLRVISMQKGGNMKEVFTRFCTGLTQIETLFKSKDYEFMWNPHLGYILTCPSNLGTGLRAGVHIKLPNLGKHEKFSEVLKRLRLQKRGTGGVDTAAVGGVFDVSNADRLGFSEVELVQMVVDGVKLLIEMEQRLEQGQAIDDLMPAQK

SEQ ID NO: 3923 - protein, 447 aa, Homo sapiens
MDMGNQHPSISRLQEIQKEVKSVEQQVIGFSGLSDDKNYKKLERILTKQLFEIDSVDTEGKGDIQQARKRAAQETERLLKELEQNANHPHRIEIQNIFEEAQSLVREKIVPFYNGGNCVTDEFEEGIQDIILRLTHVKTGGKISLRKARYHTLTKICAVQEIIEDCMKKQPSLPLSEDAHPSVAKINFVMCEVNKARGVLIALLMGVNNNETCRHLSCVLSGLIADLDALDVCGRTEIRNYRREVVEDINKLLKYLDLEEEADTTKAFDLRQNHSILKIEKVLKRMREIKNELLQAQNPSELYLSSKTELQGLIGQLDEVSLEKNPCIREARRRAVIEVQTLITYIDLKEALEKRKLFACEEHPSHKAVWNVLGNLSEIQGEVLSFDGNRTDKNYIRLEELLTKQLLALDAVDPQGEEKCKAARKQAVRLAQNILSYLDLKSDEWEY

SEQ ID NO: 3924 - protein, 491 aa, Homo sapiens
MAQSGGEARPGPKTAVQIRVAIQEAEDVDELEDEEEGAETRGAGDPARYLSPGWGSASEEEPSRGHSGTTASGGENEREDLEQEWKPPDEELIKKLVDQIEFYFSDENLEKDAFLLKHVRRNKLGYVSVKLLTSFKKVKHLTRDWRTTAHALKYSVVLELNEDHRKVRRTTPVPLFPNENLPSKMLLVYDLYLSPKLWALATPQKNGRVQEKVMEHLLKLFGTFGVISSVRILKPGRELPPDIRRISSRYSQVGTQECAIVEFEEVEAAIKAHEFMITESQGKENMKAVLIGMKPPKKKPAKDKNHDEEPTASIHLNKSLNKRVEELQYMGDESSANSSSDPESNPTSPMAGRRHAATNKLSPSGHQNLFLSPNASPCTSPWSSPLAQRKGVSRKSPLAEEGRLNCSTSPEIFRKCMDYSSDSSVTPSGSPWVRRRRQAEMGTQEKSPGTSPLLSRKMQTADGLPVGVLRLPRGPDNTRGFHGHERSRACV

SEQ ID NO: 3925 - protein, 582 aa, Homo sapiens
MSESWQQPPQTQPQQPQPPQPQHHAEPPPALAEHTLPPGTAENPLGCAVYGILLQPDPGLQPPQHAPLQAAGEPGPKCGVCGHDLAHLSSPHEHQCLAGHDRSFQCTQCLKIFHQATDLLEHQCVQAEQKPFVCGVCKMGFSLLTSLAQHHSSHSGLVKCSICEKTYKPAEAAEPATTAAPSLPAAPAPSTVTPAEQADKPYSCPICQKPFKHLSELSRHERIHTGEKPYKCTLCDKSFSQSSHLVHHKRTHSSERPYKCAVCEKTFKHRSHLVRHMYAHSGEHHLFRCNVCELHFKESSELLQHPCTPSGERPFRCGECQKAFKRPSDLRQHERTHSAERPFKCDLCPMGFKQQYALMRHRRTHKTEEPFKCGLCEKGFGQPSHLLYHQHVHTLETLFKCPVCQKGFDQSAELLRHKCLPGAAERPFKCPVCNKAYKRASALQKHQLAHCAAAEKPLRCTLCERRFFSSSEFVQHRCDPAREKPLKCPDCEKRFKYASDLQRHRRVHTGEKPYKCPNCDKAFKQREHLNKHQGVHAREQQFKCVWCGERFLDVALLQEHSAQHSAAAAAAEGAYQVAACLP

SEQ ID NO: 3926 - protein, 775 aa, Homo sapiens
MKRSGTLRLLSDLSAFGGAARLRELVAGDSAVRVRGSPDGRHLLLLRPPGAVAPQLLVASRGPGAELERAWPAGQPSPLDAFFLPWPARPALVLVWESGLAEVWGAGVGPGWRPLQSTELCPGGGARVVAVAALRGRLVWCEERQARAEGPSGSPAAAFSHCVCVRTLEPSGEASTSLGRTHVLLHHCPAFGLLASCRQLFLVPTATTWPGVAHVLLIWSPGKGKVMVAAPRLGLSYSKSLNPGRGDTWDFRTLLRGLPGLLSPREPLAVHTWAPTPQGLLLLDFGGTVSLLQSHGGTRAVGTLQEAPVGPWGSAALGTFQGTLACVLGSTLELLDMGSGQLLERKVLSTDRVHLLEPPAPGMEDEEELETRGNLRLLSALGLFCVGWEAPQGVELPSAKDLVFEEACGYYQRRSLRGAQLTPEELRHSSTFRAPQALASILQGHLPPSALLTMLRTELRDYRGLEQLKAQLVAGDDEEAGWTELAEQEVARLLRTELIGDQLAQLNTVFQALPTAAWGATLRALQLQLDGNGKLRSQAPPDVWKKVLGGITAGKEPPNGILPPFELLCQCLCQLEPRWLPPFVELAQQQGGPGWGAGGPGLPLYRRALAVLGEEGTRPEALELELLLSSGRPKAVLQAVGQLVQKEQWDRALDAGLALGPSSPLLRSEIFKLLLAEFAQHRRLDAHLPLLCRLCPPELAPAELLLLLRTYLPDEVGPPTPFPEPGAEPPLTVGLLKALLEQTGAQGWLSGPVLSPYEDILWDPSTPPPTPPRDL

SEQ ID NO: 3927 - protein, 450 aa, Homo sapiens
MSDMEDDFMCDDEEDYDLEYSEDSNSEPNVDLENQYYNSKALKEDDPKAALSSFQKVLELEGEKGEWGFKALKQMIKINFKLTNFPEMMNRYKQLLTYIRSAVTRNYSEKSINSILDYISTSKQNSDFLCQMDLLQEFYETTLEALKDAKNDRLWFKTNTKLGKLYLEREEYGKLQKILRQLHQSCQTDDGEDDLKKGTQLLEIYALEIQMYTAQKNNKKLKALYEQSLHIKSAIPHPLIMGVIRECGGKMHLREGEFEKAHTDFFEAFKNYDESGSPRRTTCLKYLVLANMLMKSGINPFDSQEAKPYKNDPEILAMTNLVSAYQNNDITEFEKILKTNHSNIMDDPFIREHIEELLRNIRTQVLIKLIKPYTRIHIPFISKELNIDVADVESLLVQCILDNTIHGRIDQVNQLLELDHQKRGGARYTALDKWTNQLNSLNQAVVSKLA

SEQ ID NO: 3928 - protein, 473 aa, Homo sapiens
MCSGLLELLLPIWLSWTLGTRGSEPRSVNDPGNMSFVKETVDKLLKGYDIRLRPDFGGPPVCVGMNIDIASIDMVSEVNMDYTLTMYFQQYWRDKRLAYSGIPLNLTLDNRVADQLWVPDTYFLNDKKSFVHGVTVKNRMIRLHPDGTVLYGLRITTTAACMMDLRRYPLDEQNCTLEIESYGYTTDDIEFYWRGGDKAVTGVERIELPQFSIVEHRLVSRNVVFATGAYPRLSLSFRLKRNIGYFILQTYMPSILITILSWVSFWINYDASAARVALGITTVLTMTTINTHLRETLPKIPYVKAIDMYLMGCFVFVFLALLEYAFVNYIFFGRGPQRQKKLAEKTAKAKNDRSKSESNRVDAHGNILLTSLEVHNEMNEVSGGIGDTRNSAISFDNSGIQYRKQSMPREGHGRFLGDRSLPHKKTHLRRRSSQLKIKIPDLTDVNAIDRWSRIVFPFTFSLFNLVYWLYYVN

SEQ ID NO: 3929 - protein, 1116 aa, Homo sapiens
MAADLNLEWISLPRSWTYGITRGGRVFFINEEAKSTTWLHPVTGEAVVTGHRRQSTDLPTGWEEAYTFEGARYYINHNERKVTCKHPVTGQPSQDNCIFVVNEQTVATMTSEEKKERPISMINEASNYNVTSDYAVHPMSPVGRTSRASKKVHNFGKRSNSIKRNPNAPVVRRGWLYKQDSTGMKLWKKRWFVLSDLCLFYYRDEKEEGILGSILLPSFQIALLTSEDHINRKYAFKAAHPNMRTYYFCTDTGKEMELWMKAMLDAALVQTEPVKRVDKITSENAPTKETNNIPNHRVLIKPEIQNNQKNKEMSKIEEKKALEAEKYGFQKDGQDRPLTKINSVKLNSLPSEYESGSACPAQTVHYRPINLSSSENKIVNVSLADLRGGNRPNTGPLYTEADRVIQRTNSMQQLEQWIKIQKGRGHEEETRGVISYQTLPRNMPSHRAQIMARYPEGYRTLPRNSKTRPESICSVTPSTHDKTLGPGAEEKRRSMRDDTMWQLYEWQQRQFYNKQSTLPRHSTLSSPKTMVNISDQTMHSIPTSPSHGSIAAYQGYSPQRTYRSEVSSPIQRGDVTIDRRHRAHHPKHVYVPDRRSVPAGLTLQSVSPQSLQGKTLSQDEGRGTLYKYRPEEVDIDAKLSRLCEQDKVVHALEEKLQQLHKEKYTLEQALLSASQEIEMHADNPAAIQTVVLQRDDLQNGLLSTCRELSRATAELERAWREYDKLEYDVTVTRNQMQEQLDHLGEVQTESAGIQRAQIQKELWRIQDVMEGLSKHKQQRGTTEIGMIGSKPFSTVKYKNEGPDYRLYKSEPELTTVAEVDESNGEEKSEPVSEIETSVVKGSHFPVGVVPPRAKSPTPESSTIASYVTLRKTKKMMDLRTERPRSAVEQLCLAESTRPRMTVEEQMERIRRHQQACLREKKKGLNVIGASDQSPLQSPSNLRDNPFRTTQTRRRDDKELDTAIRENDVKPDHETPATEIVQLKETEPQNVDFSKELKKTENISYEMLFEPEPNGVNSVEMMDKERNKDKMPEDVTFSPQDETQTANHKPEEHPEENTKNSVDEQEETVISYESTPEVSRGNQTMAVKSLSPSPESSASPVPSTQPQLTEGSHFMCV

SEQ ID NO: 3930 - protein, 273 aa, Homo sapiens
MSRVVSLLLGAALLCGHGAFCRRVVSGQKVCFADFKHPCYKMAYFHELSSRVSFQEARLACESEGGVLLSLENEAEQKLIESMLQNLTKPGTGISDGDFWIGLWRNGDGQTSGACPDLYQWSDGSNSQYRNWYTDEPSCGSEKCVVMYHQPTANPGLGGPYLYQWNDDRCNMKHNYICKYEPEINPTAPVEKPYLTNQPGDTHQNVVVTEAGIIPNLIYVVIPTIPLLLLILVAFGTCCFQMLHKSKGRTKTSPNQSTLWISKSTRKESGMEV

SEQ ID NO: 3931 - protein, 104 aa, Homo sapiens
MAGKAHRLSAEERDQLLPNLRAVGWNELEGRDAIFKQFHFKDFNRAFGFMTRVALQAEKLDHHPEWFNVYNKVHITLSTHECAGLSERDINLASFIEQVAVSMT

SEQ ID NO: 3932 - protein, 535 aa, Homo sapiens
MASLSLAPVNIFKAGADEERAETARLTSFIGAIAIGDLVKSTLGPKGMDKILLSSGRDASLMVTNDGATILKNIGVDNPAAKVLVDMSRVQDDEVGDGTTSVTVLAAELLREAESLIAKKIHPQTIIAGWREATKAAREALLSSAVDHGSDEVKFRQDLMNIAGTTLSSKLLTHHKDHFTKLAVEAVLRLKGSGNLEAIHIIKKLGGSLADSYLDEGFLLDKKIGVNQPKRIENAKILIANTGMDTDKIKIFGSRVRVDSTAKVAEIEHAEKEKMKEKVERILKHGINCFINRQLIYNYPEQLFGAAGVMAIEHADFAGVERLALVTGGEIASTFDHPELVKLGSCKLIEEVMIGEDKLIHFSGVALGEACTIVLRGATQQILDEAERSLHDALCVLAQTVKDSRTVYGGGCSEMLMAHAVTQLANRTPGKEAVAMESYAKALRMLPTIIADNAGYDSADLVAQLRAAHSEGNTTAGLDMREGTIGDMAILGITESFQVKRQVLLSAAEAAEVILRVDNIIKAAPRKRVPDHHPC

SEQ ID NO: 3933 - protein, 215 aa, Homo sapiens
MPAFNRLFPLASLVLIYWVSVCFPVCVEVPSETEAVQGNPMKLRCISCMKREEVEATTVVEWFYRPEGGKDFLIYEYRNGHQEVESPFQGRLQWNGSKDLQDVSITVLNVTLNDSGLYTCNVSREFEFEAHRPFVKTTRLIPLRVTEEAGEDFTSVVSEIMMYILLVFLTLWLLIEMIYCYRKVSKAEEAAQENASDYLAIPSENKENSAVPVEE

SEQ ID NO: 3934 - protein, 276 aa, Homo sapiens
MGGLWRPGWRCVPFCGWRWIHPGSPTRAAERVEPFLRPEWSGTGGAERGLRWLGTWKRCSLRARHPALQPPRRPKSSNPFTRAQEEERRRQNKTTLTYVAAVAVGMLGASYAAVPLYRLYCQTTGLGGSAVAGHASDKIENMVPVKDRIIKISFNADVHASLQWNFRPQQTEIYVVPGETALAFYRAKNPTDKPVIGISTYNIVPFEAGQYFNKIQCFCFEEQRLNPQEEVDMPVFFYIDPEFAEDPRMIKVDLITLSYTFFEAKEGHKLPVPGYN

SEQ ID NO: 3935 - protein, 250 aa, Homo sapiens
MVFLALTIVALYILSLKDQDRRVPNLPPSNITSSQEPALLPTASSSAPNTSLVTTPASLQVPEITFCEILPCQETYCCPIRGMKEVSSSPVQRQSEEKEFHQRRWSEDKSKSVLARNALSGPDWESDWIDTTISSIQIMEIQQIIDHQYCIQSLQCGTTEPLIVFQCKFTLGNICFHSKRGTKGLESHREISQEMTQGYQHIWSLPVAPFSDSMFHFRVAAPDLADCSTDPYFAGIFFTDYFFYFYRRCA

SEQ ID NO: 3936 - protein, 106 aa, Homo sapiens
MMATGTPESQARFGQSVKGLLTEKVTTCGTDVIALTKQVLKGSRSSELLGQAARNMVLQEDAILHSEDSLRKMAIITTHLQYQQEAIQKNVEQSSDLQDQLNHLLK

SEQ ID NO: 3937 - protein, 1061 aa, Homo sapiens
MGRHVATSCHVAWLLVLISGCWGQVNRLPFFTNHFFDTYLLISEDTPVGSSVTQLLAQDMDNDPLVFGVSGEEASRFFAVEPDTGVVWLRQPLDRETKSEFTVEFSVSDHQGVITRKVNIQVGDVNDNAPTFHNQPYSVRIPENTPVGTPIFIVNATDPDLGAGGSVLYSFQPPSQFFAIDSARGIVTVIRELDYETTQAYQLTVNATDQDKTRPLSTLANLAIIITDVQDMDPIFINLPYSTNIYEHSPPGTTVRIITAIDQDKGRPRGIGYTIVSGNTNSIFALDYISGVLTLNGLLDRENPLYSHGFILTVKGTELNDDRTPSDATVTTTFNILVIDINDNAPEFNSSEYSVAITELAQVGFALPLFIQVVDKDENLGLNSMFEVYLVGNNSHHFIISPTSVQGKADIRIRVAIPLDYETVDRYDFDLFANESVPDHVGYAKVKITLINENDNRPIFSQPLYNISLYENVTVGTSVLTVLATDNDAGTFGEVSYFFSDDPDRFSLDKDTGLIMLIARLDYELIQRFTLTIIARDGGGEETTGRVRINVLDVNDNVPTFQKDAYVGALRENEPSVTQLVRLRATDEDSPPNNQITYSIVSASAFGSYFDISLYEGYGVISVSRPLDYEQISNGLIYLTVMAMDAGNPPLNSTVPVTIEVFDENDNPPTFSKPAYFVSVVENIMAGATVLFLNATDLDRSREYGQESIIYSLEGSTQFRINARSGEITTTSLLDRETKSEYILIVRAVDGGVGHNQKTGIATVNITLLDINDNHPTWKDAPYYINLVEMTPPDSDVTTVVAVDPDLGENGTLVYSIQPPNKFYSLNSTTGKIRTTHAMLDRENPDPHEAELMRKIVVSVTDCGRPPLKATSSATVFVNLLDLNDNDPTFQNLPFVAEVLEGIPAGVSIYQVVAIDLDEGLNGLVSYRMPVGMPRMDFLINSSSGVVVTTTELDRERIAEYQLRVVASDAGTPTKSSTSTLTIHVLDVNDETPTFFPAVYNVSVSEDVPREFRVVWLNCTDNDVGLNAELSYFITGAAPASAHLCRPPGALPPPLPDGQPD

SEQ ID NO: 3938 - protein, 752 aa, Homo sapiens
MGPLMVLFCLLFLYPGLADSAPSCPQNVNISGGTFTLSHGWAPGSLLTYSCPQGLYPSPASRLCKSSGQWQTPGATRSLSKAVCKPVRCPAPVSFENGIYTPRLGSYPVGGNVSFECEDGFILRGSPVRQCRPNGMWDGETAVCDNGAGHCPNPGISLGAVRTGFRFGHGDKVRYRCSSNLVLTGSSERECQGNGVWSGTEPICRQPYSYDFPEDVAPALGTSFSHMLGATNPTQKTKESLGRKIQIQRSGHLNLYLLLDCSQSVSENDFLIFKESASLMVDRIFSFEINVSVAIITFASEPKVLMSVLNDNSRDMTEVISSLENANYKDHENGTGTNTYAALNSVYLMMNNQMRLLGMETMAWQEIRHAIILLTDGKSNMGGSPKTAVDHIREILNINQKRNDYLDIYAIGVGKLDVDWRELNELGSKKDGERHAFILQDTKALHQVFEHMLDVSKLTDTICGVGNMSANASDQERTPWHVTIKPKSQETCRGALISDQWVLTAAHCFRDGNDHSLWRVNVGDPKSQWGKEFLIEKAVISPGFDVFAKKNQGILEFYGDDIALLKLAQKVKMSTHARPICLPCTMEANLALRRPQGSTCRDHENELLNKQSVPAHFVALNGSKLNINLKMGVEWTSCAEVVSQEKTMFPNLTDVREVVTDQFLCSGTQEDESPCKGESGGAVFLERRFRFFQVGLVSWGLYNPCLGSADKNSRKRAPRSKVPPPRDFHINLFRMQPWLRQHLGDVLNFLPL

SEQ ID NO: 3939 - protein, 110 aa, Homo sapiens
MAASSSSSSAGGVSGSSVTGSGFSVSDLAPPRKALFTYPKGAGEMLEDGSERFLCESVFSYQVASTLKQVKHDQQVARMEKLAGLVEELEADEWRFKPIEQLLGFTPSSG

SEQ ID NO: 3940 - protein, 708 aa, Homo sapiens
MSVPSSLSQSAINANSHGGPALSLPLPLHAAHNQLLNAKLQATAVGPKDLRSAMGEGGGPEPGPANAKWLKEGQNQLRRAATAHRDQNRNVTLTLAEEASQEPEMAPLGPKGLIHLYSELELSAHNAANRGLRGPGLIISTQEQGPDEGEEKAAGEAEEEEEDDDDEEEEEDLSSPPGLPEPLESVEAPPRPQALTDGPREHSKSASLLFGMRNSAASDEDSSWATLSQGSPSYGSPEDTDSFWNPNAFETDSDLPAGWMRVQDTSGTYYWHIPTGTTQWEPPGRASPSQGSSPQEESQLTWTGFAHGEGFEDGEFWKDEPSDEAPMELGLKEPEEGTLTFPAQSLSPEPLPQEEEKLPPRNTNPGIKCFAVRSLGWVEMTEEELAPGRSSVAVNNCIRQLSYHKNNLHDPMSGGWGEGKDLLLQLEDETLKLVEPQSQALLHAQPIISIRVWGVGRDSGRDFAYVARDKLTQMLKCHVFRCEAPAKNIATSLHEICSKIMAERRNARCLVNGLSLDHSKLVDVPFQVEFPAPKNELVQKFQVYYLGNVPVAKPVGVDVINGALESVLSSSSREQWTPSHVSVAPATLTILHQQTEAVLGECRVRFLSFLAVGRDVHTFAFIMAAGPASFCCHMFWCEPNAASLSEAVQAACMLRYQKCLDARSQASTSCLPAPPAESVARRVGWTVRRGVQSLWGSLKPKRLGAHTP

SEQ ID NO: 3941 - protein, 452 aa, Homo sapiens
MDDIFTQCREGNAVAVRLWLDNTENDLNQGDDHGFSPLHWACREGRSAVVEMLIMRGARINVMNRGDDTPLHLAASHGHRDIVQKLLQYKADINAVNEHGNVPLHYACFWGQDQVAEDLVANGALVSICNKYGEMPVDKAKAPLRELLRERAEKMGQNLNRIPYKDTFWKGTTRTRPRNGTLNKHSGIDFKQLNFLTKLNENHSGELWKGRWQGNDIVVKVLKVRDWSTRKSRDFNEECPRLRIFSHPNVLPVLGACQSPPAPHPTLITHWMPYGSLYNVLHEGTNFVVDQSQAVKFALDMARGMAFLHTLEPLIPRHALNSRSVMIDEDMTARISMADVKFSFQCPGRMYAPAWVAPEALQKKPEDTNRRSADMWSFAVLLWELVTREVPFADLSNMEIGMKVALEGLRPTIPPGISPHVCKLMKICMNEDPAKRPKFDMIVPILEKMQDK

SEQ ID NO: 3942 - protein, 218 aa, Homo sapiens
MSCSGSGADPEAAPASAASAPGPAPPVSAPAALPSSTAAENKASPAGTAGGPGAGAAAGGTGPLAARAGEPAERRGAAPVSAGGAAPPEGAISNGVYVLPSAANGDVKPVVSSTPLVDFLMQLEDYTPTIPDAVTGYYLNRAGFEASDPRIIRLISLAAQKFISDIANDALQHCKMKGTASGSSRSKSKDRKYTLTMEDLTPALSEYGINVKKPHYFT

SEQ ID NO: 3943 - protein, 563 aa, Homo sapiens
MGLQACLLGLFALILSGKCSYSPEPDQRRTLPPGWVSLGRADPEEELSLTFALRQQNVERLSELVQAVSDPSSPQYGKYLTLENVADLVRPSPLTLHTVQKWLLAAGAQKCHSVITQDFLTCWLSIRQAELLLPGAEFHHYVGGPTETHVVRSPHPYQLPQALAPHVDFVGGLHRFPPTSSLRQRPEPQVTGTVGLHLGVTPSVIRKRYNLTSQDVGSGTSNNSQACAQFLEQYFHDSDLAQFMRLFGGNFAHQASVARVVGQQGRGRAGIEASLDVQYLMSAGANISTWVYSSPGRHEGQEPFLQWLMLLSNESALPHVHTVSYGDDEDSLSSAYIQRVNTELMKAAARGLTLLFASGDSGAGCWSVSGRHQFRPTFPASSPYVTTVGGTSFQEPFLITNEIVDYISGGGFSNVFPRPSYQEEAVTKFLSSSPHLPPSSYFNASGRAYPDVAALSDGYWVVSNRVPIPWVSGTSASTPVFGGILSLINEHRILSGRPPLGFLNPRLYQQHGAGLFDVTRGCHESCLDEEVEGQGFCSGPGWDPVTGWGTPNFPALLKTLLNP

SEQ ID NO: 3944 - protein, 415 aa, Homo sapiens
MEDLCVANTLFALNLFKHLAKASPTQNLFLSPWSISSTMAMVYMGSRGSTEDQMAKVLQFNEVGANAVTPMTPENFTSCGFMQQIQKGSYPDAILQAQAADKIHSSFRSLSSAINASTGNYLLESVNKLFGEKSASFREEYIRLCQKYYSSEPQAVDFLECAEEARKKINSWVKTQTKGKIPNLLPEGSVDGDTRMVLVNAVYFKGKWKTPFEKKLNGLYPFRVNSAQRTPVQMMYLREKLNIGYIEDLKAQILELPYAGDVSMFLLLPDEIADVSTGLELLESEITYDKLNKWTSKDKMAEDEVEVYIPQFKLEEHYELRSILRSMGMEDAFNKGRANFSGMSERNDLFLSEVFHQAMVDVNEEGTEAAAGTGGVMTGRTGHGGPQFVADHPFLFLIMHKITNCILFFGRFSSP

SEQ ID NO: 3945 - protein, 506 aa, Homo sapiens
MTSKPHSDWIPYSVLDDEGRNLRQQKLDRQRALLEQKQKKKRQEPLMVQANADGRPRSRRARQSEEQAPLVESYLSSSGSTSYQVQEADSLASVQLGATRPTAPASAKRTKAAATAGGQGGAARKEKKGKHKGTSGPAALAEDKSEAQGPVQILTVGQSDHAQDAGETAAGGGERPSGQDLRATMQRKGISSSMSFDEDEEDEEENSSSSSQLNSNTRPSSATSRKSVREAASAPSPTAPEQPVDVEVQDLEEFALRPAPQGITIKCRITRDKKGMDRGMYPTYFLHLDREDGKKVFLLAGRKRKKSKTSNYLISVDPTDLSRGGDSYIGKLRSNLMGTKFTVYDNGVNPQKASSSTLESGTLRQELAAVCYETNVLGFKGPRKMSVIVPGMNMVHERVSIRPRNEHETLLARWQNKNTESIIELQNKTPVWNDDTQSYVLNFHGRVTQASVKNFQIIHGNDPDYIVMQFGRVAEDVFTMDYNYPLCALQAFAIALSSFDSKLACE

SEQ ID NO: 3946 - protein, 366 aa, Homo sapiens
MAGPAWISKVSRLLGAFHNPKQVTRGFTGGVQTVTLIPGDGIGPEISAAVMKIFDAAKAPIQWEERNVTAIQGPGGKWMIPSEAKESMDKNKMGLKGPLKTPIAAGHPSMNLLLRKTFDLYANVRPCVSIEGYKTPYTDVNIVTIRENTEGEYSGIEHVIVDGVVQSIKLITEGASKRIAEFAFEYARNNHRSNVTAVHKANIMRMSDGLFLQKCREVAESCKDIKFNEMYLDTVCLNMVQDPSQFDVLVMPNLYGDILSDLCAGLIGGLGVTPSGNIGANGVAIFESVHGTAPDIAGKDMANPTALLLSAVMMLRHMGLFDHAARIEAACFATIKDGKSLTKDLGGNAKCSDFTEEICRRVKDLD

SEQ ID NO: 3947 - protein, 420 aa, Homo sapiens
MPLQVSDYSWQQTKTAVFLSLPLKGVCVRDTDVFCTENYLKVNFPPFLFEAFLYAPIDDESSKAKIGNDTIVFTLYKKEAAMWETLSVTGVDKEMMQRIREKSILQAQERAKEATEAKAAAKREDQKYALSVMMKIEEEERKKIEDMKENERIKATKALEAWKEYQRKAEEQKKIQREEKLCQKEKQIKEERKKIKYKSLTRNLASRNLAPKGRNSENIFTEKLKEDSIPAPRSVGSIKINFTPRVFPTALRESQVAEEEEWLHKQAEARRAMNTDIAELCDLKEEEKNPEWLKDKGNKLFATENYLAAINAYNLAIRLNNKMPLLYLNRAACHLKLKNLHKAIEDSSKALELLMPPVTDNANARMKAHVRRGTAFCQLELYVEGLQDYEAALKIDPSNKIVQIDAEKIRNVIQGTELKS

SEQ ID NO: 3948 - protein, 708 aa, Homo sapiens
MAAAGPSTRASSAAAAAALSRRGRRGRCDETAAAKTGAPGPASGPSLLVLSPPLLQPPLPPRPEESGCAGCLEPPGEAAALPCGHSLCRGCAQRAADAAGPGCPRCRARGPGWARRRARDDGQADSEVLGECARRSQPERCRPRRDGGAAAAGPRPEQEPRAAPAEPDFIFRAPIKLSKPGELREEYESLRKLREEKLQEEKPSEDQIHKLLPEDTETGKRKMDEQKKRDEPLVLKTNLERCPARLSDSENEEPSRGQMTQTHRSAFVSKNNSYSLAFLAGKLNSKVERSQSCSDTAQERAKSRVRAVPGNKAKVTTMTPASNPIIGVLLSTQNNRCVSAPDLTIEKRLPFSSLSSLASLHKPERSVSPESNDSISEELNHFKPIVCSPCTPPKRLPDGRVLSPLIIKSTPRNLNRSLQKQTSYEASPRILKKWEQIFQERQIKKTLSKATLTSLAPEMGEELLGSEGIHSSKEKPLVAVNTRLSGGQVLSEYTGPTSADLDHFPSVSQTKAEQDSDNKSSTEIPLETCCSSELKGGGSGTSLEREQFEGLGSTPDAKLDKTCISRAMKITTVNSVLPQNSVLGGVLKTKQQLKTLNHFDLTNGVLVESLSEEPLPSLRRGRKRHCKTKHLEQNGSLKKLRQTSGEVGLAPTDPVLREMEQKLQQEEEDRQLALQLQRMFDNERRTVSRRKGSVDQYLLRSSNMAGAK

SEQ ID NO: 3949 - protein, 468 aa, Homo sapiens
MAARGSGPRALRLLLLVQLVAGRCGLAGAAGGAQRGLSEPSSIAKHEDSLLKDLFQDYERWVRPVEHLNDKIKIKFGLAISQLVDVDEKNQLMTTNVWLKQEWIDVKLRWNPDDYGGIKVIRVPSDSVWTPDIVLFDNADGRFEGTSTKTVIRYNGTVTWTPPANYKSSCTIDVTFFPFDLQNCSMKFGSWTYDGSQVDIILEDQDVDKRDFFDNGEWEIVSATGSKGNRTDSCCWYPYVTYSFVIKRLPLFYTLFLIIPCIGLSFLTVLVFYLPSNEGEKICLCTSVLVSLTVFLLVIEEIIPSSSKVIPLIGEYLVFTMIFVTLSIMVTVFAINIHHRSSSTHNAMAPLVRKIFLHTLPKLLCMRSHVDRYFTQKEETESGSGPKSSRNTLEAALDSIRYITRHIMKENDVREVVEDWKFIAQVLDRMFLWTFLFVSIVGSLGLFVPVIYKWANILIPVHIGNANK

SEQ ID NO: 3950 - protein, 823 aa, Homo sapiens
MAASEAAAAAGSAALAAGARAVPAATTGAAAAASGPWVPPGPRLRGSRPRPAGATQQPAVPAPPAGELIQPSVSELSRAVRTNILCTVRGCGKILPNSPALNMHLVKSHRLQDGIVNPTIRKDLKTGPKFYCCPIEGCPRGPERPFSQFSLVKQHFMKMHAEKKHKCSKCSNSYGTEWDLKRHAEDCGKTFRCTCGCPYASRTALQSHIYRTGHEIPAEHRDPPSKKRKMENCAQNQKLSNKTIESLNNQPIPRPDTQELEASEIKLEPSFEDSCGSNTDKQTLTTPPRYPQKLLLPKPKVALVKLPVMQFSVMPVFVPTADSSAQPVVLGVDQGSATGAVHLMPLSVGTLILGLDSEACSLKESLPLFKIANPIAGEPISTGVQVNFGKSPSNPLQELGNTCQKNSISSINVQTDLSYASQNFIPSAQWATADSSVSSCSQTDLSFDSQVSLPISVHTQTFLPSSKVTSSIAAQTDAFMDTCFQSGGVSRETQTSGIESPTDDHVQMDQAGMCGDIFESVHSSYNVATGNIISNSLVAETVTHSLLPQNEPKTLNQDIEKSAPIINFSAQNSMLPSQNMTDNQTQTIDLLSDLENILSSNLPAQTLDHRSLLSDTNPGPDTQLPSGPAQNPGIDFDIEEFFSASNIQTQTEESELSTMTTEPVLESLDIETQTDFLLADTSAQSYGCRGNSNFLGLEMFDTQTQTDLNFFLDSSPHLPLGSILKHSSFSVSTDSSDTETQTEGVSTAKNIPALESKVQLNSTETQTMSSGFETLGSLFFTSNETQTAMDDFLLADLAWNTMESQFSSVETQTSAEPHTVSNF

SEQ ID NO: 3951 - protein, 183 aa, Homo sapiens
MDNCLAAAALNGVDRRSLQRSARLALEVLERAKRRAVDWHALERPKGCMGVLAREAPHLEKQPAAGPQRVLPGEKYYSSVPEEGGATHVYRYHRGESKLHMCLDIGNGQRKDRKKTSLGPGGSYQISEHAPEASQPAENISKDLYIEVYPGTYSVTVGSNDLTKKTHVVAVDSGQSVDLVFPV

SEQ ID NO: 3952 - protein, 291 aa, Homo sapiens
MAKGRVAERSQLGAHHTTPVGDGAAGTRGLAAPGSRDHQKEKSWVEAGSARMSLLILVSIFLSAAFVMFLVYKNFPQLSEEERVNMKVPRDMDDAKALGKVLSKYKDTFYVQVLVAYFATYIFLQTFAIPGSIFLSILSGFLYPFPLALFLVCLCSGLGASFCYMLSYLVGRPVVYKYLTEKAVKWSQQVERHREHLINYIIFLRITPFLPNWFINITSPVINVPLKVFFIGTFLGVAPPSFVAIKAGTTLYQLTTAGEAVSWNSIFILMILAVLSILPAIFQKKLKQKFE

SEQ ID NO: 3953 - protein, 666 aa, Homo sapiens
MADMEDLFGSDADSEAERKDSDSGSDSDSDQENAASGSNASGSESDQDERGDSGQPSNKELFGDDSEDEGASHHSGSDNHSERSDNRSEASERSDHEDNDPSDVDQHSGSEAPNDDEDEGHRSDGGSHHSEAEGSEKAHSDDEKWGREDKSDQSDDEKIQNSDDEERAQGSDEDKLQNSDDDEKMQNTDDEERPQLSDDERQQLSEEEKANSDDERPVASDNDDEKQNSDDEEQPQLSDEEKMQNSDDERPQASDEEHRHSDDEEEQDHKSESARGSDSEDEVLRMKRKNAIASDSEADSDTEVPKDNSGTMDLFGGADDISSGSDGEDKPPTPGQPVDENGLPQDQQEEEPIPETRIEVEIPKVNTDLGNDLYFVKLPNFLSVEPRPFDPQYYEDEFEDEEMLDEEGRTRLKLKVENTIRWRIRRDEEGNEIKESNARIVKWSDGSMSLHLGNEVFDVYKAPLQGDHNHLFIRQGTGLQGQAVFKTKLTFRPHSTDSATHRKMTLSLADRCSKTQKIRILPMAGRDPECQRTEMIKKEEERLRASIRRESQQRRMREKQHQRGLSASYLEPDRYDEEEEGEESISLAAIKNRYKGGIREERARIYSSDSDEGSEEDKAQRLLKAKKLTSDEEGEPSGKRKAEDDDKANKKHKKYVISDEEEEDDD

SEQ ID NO: 3954 - protein, 454 aa, Homo sapiens
MAAWKSWTALRLCATVVVLDMVVCKGFVEDLDESFKENRNDDIWLVDFYAPWCGHCKKLEPIWNEVGLEMKSIGSPVKVGKMDATSYSSIASEFGVRGYPTIKLLKGDLAYNYRGPRTKDDIIEFAHRVSGALIRPLPSQQMFEHMQKRHRVFFVYVGGESPLKEKYIDAASELIVYTYFFSASEEVVPEYVTLKEMPAVLVFKDETYFVYDEYEDGDLSSWINRERFQNYLAMDGFLLYELGDTGKLVALAVIDEKNTSVEHTRLKSIIQEVARDYRDLFHRDFQFGHMDGNDYINTLLMDELTVPTVVVLNTSNQQYFLLDRQIKNVEDMVQFINNILDGTVEAQGGDSILQRLKRIVFDAKSTIVSIFKSSPLMGCFLFGLPLGVISIMCYGIYTADTDGGYIEERYEVSKSENENQEQIEESKEQQEPSSGGSVVPTVQEPKDVLEKKKD

SEQ ID NO: 3955 - protein, 255 aa, Homo sapiens
MKALLALPLLLLLSTPPCAPQVSGIRGDALERFCLQQPLDCDDIYAQGYQSDGVYLIYPSGPSVPVPVFCDMTTEGGKWTVFQKRFNGSVSFFRGWNDYKLGFGRADGEYWLGLQNMHLLTLKQKYELRVDLEDFENNTAYAKYADFSISPNAVSAEEDGYTLFVAGFEDGGAGDSLSYHSGQKFSTFDRDQDLFVQNCAALSSGAFWFRSCHFANLNGFYLGGSHLSYANGINWAQWKGFYYSLKRTEMKIRRA

SEQ ID NO: 3956 - protein, 677 aa, Homo sapiens
MESDLHQIIHSSQPLTLEHVRYFLYQLLRGLKYMHSAQVIHRDLKPSNLLVNENCELKIGDFGMARGLCTSPAEHQYFMTEYVATRWYRAPELMLSLHEYTQAIDLWSVGCIFGEMLARRQLFPGKNYVHQLQLIMMVLGTPSPAVIQAVGAERVRAYIQSLPPRQPVPWETVYPGADRQALSLLGRMLRFEPSARISAAAALRHPFLAKYHDPDDEPDCAPPFDFAFDREALTRERIKEAIVAEIEDFHARREGIRQQIRFQPSLQPVASEPGCPDVEMPSPWAPSGDCAMESPPPAPPPCPGPAPDTIDLTLQPPPPVSEPAPPKKDGAISDNTKAALKAALLKSLRSRLRDGPSAPLEAPEPRKPVTAQERQREREEKRRRRQERAKEREKRRQERERKERGAGASGGPSTDPLAGLVLSDNDRSLLERWTRMARPAAPALTSVPAPAPAPTPTPTPVQPTSPPPGPVAQPTGPQPQSAGSTSGPVPQPACPPPGPAPHPTGPPGPIPVPAPPQIATSTSLLAAQSLVPPPGLPGSSTPGVLPYFPPGLPPPDAGGAPQSSMSESPDVNLVTQQLSKSQVEDPLPPVFSGTPKGSGAGYGVGFDLEEFLNQSFDMGVADGPQDGQADSASLSASLLADWLEGHGMNPADIESLQREIQMDSPMLLADLPDLQDP

SEQ ID NO: 3957 - protein, 526 aa, Homo sapiens
MAALTIATGTGNWFSALALGVTLLKCLLIPTYHSTDFEVHRNWLAITHSLPISQWYYEATSEWTLDYPPFFAWFEYILSHVAKYFDQEMLNVHNLNYSSSRTLLFQRFSVIFMDVLFVYAVRECCKCIDGKKVGKELTEKPKFILSVLLLWNFGLLIVDHIHFQYNGFLFGLMLLSIARLFQKRHMEGAFLFAVLLHFKHIYLYVAPAYGVYLLRSYCFTANKPDGSIRWKSFSFVRVISLGLVVFLVSALSLGPFLALNQLPQVFSRLFPFKRGLCHAYWAPNFWALYNALDKVLSVIGLKLKFLDPNNIPKASMTSGLVQQFQHTVLPSVTPLATLICTLIAILPSIFCLWFKPQGPRGFLRCLTLCALSSFMFGWHVHEKAILLAILPMSLLSVGKAGDASIFLILTTTGHYSLFPLLFTAPELPIKILLMLLFTIYSISSLKTLFRKEKPLFNWMETFYLLGLGPLEVCCEFVFPFTSWKVKYPFIPLLLTSVYCAVGITYAWFKLYVSVLIDSAIGKTKKQ

SEQ ID NO: 3958 - protein, 203 aa, Homo sapiens
MARPRPREYKAGDLVFAKMKGYPHWPARIDELPEGAVKPPANKYPIFFFGTHETAFLGPKDLFPYKEYKDKFGKSNKRKGFNEGLWEIENNPGVKFTGYQAIQQQSSSETEGEGGNTADASSEEEGDRVEEDGKGKRKNEKAGSKRKKSYTSKKSSKQSRKSPGDEDDKDCKEEENKSSSEGGDAGNDTRNTTSDLQKTSEGT

SEQ ID NO: 3959 - protein, 883 aa, Homo sapiens
MLQLWKVVRPARQLELHRLILLLIAFSLGSMGFLAYYVSTSPKAKEPLPLPLGDCSSGGAAGPGPARPPVPPRPPRPPETARTEPVVLVFVESAYSQLGQEIVAILESSRFRYSTELAPGRGDMPTLTDNTHGRYVLVIYENLLKYVNLDAWSRELLDRYCVEYGVGIIGFFRAHEHSLLSAQLKGFPLFLHSNLGLRDYQVNPSAPLLHLTRPSRLEPGPLPGDDWTIFQSNHSTYEPVLLASLRPAEPAVPGPVLRRARLPTVVQDLGLHDGIQRVLFGHGLSFWLHKLIFVDAVAYLTGKRLCLDLDRYILVDIDDIFVGKEGTRMKVADVEALLTTQNKLRTLVPNFTFNLGFSGKFYHTGTEEEDAGDDMLLKHRKEFWWFPHMWSHMQPHLFHNRSVLADQMRLNKQFALEHGIPTDLGYAVAPHHSGVYPIHTQLYEAWKSVWGIQVTSTEEYPHLRPARYRRGFIHNGIMVLPRQTCGLFTHTIFYNEYPGGSRELDRSIRGGELFLTVLLNPISIFMTHLSNYGNDRLGLYTFESLVRFLQCWTRLRLQTLPPVPLAQKYFELFPQERSPLWQNPCDDKRHKDIWSKEKTCDRLPKFLIVGPQKTGTTAIHFFLSLHPAVTSSFPSPSTFEEIQFFNSPNYHKGIDWYMDFFPVPSNASTDFLFEKSATYFDSEVVPRRGAALLPRAKIITVLTNPADRAYSWYQHQRAHGDPVALNYTFYQVISASSQTPLALRSLQNRCLVPGYYSTHLQRWLTYYPSGQLLIVDGQELRTNPAASMESIQKFLGITPFLNYTRTLRFDDDKGFWCQGLEGGKTRCLGRSKGRRYPDMDTESRLFLTDFFRNHNLELSKLLSRLGQPVPSWLREELQHSSLG

SEQ ID NO: 3960 - protein, 197 aa, Homo sapiens
MAKNGLVICILVITLLLDQTTSHTSRLKARKHSKRRVRDKDGDLKTQIEKLWTEVNALKEIQALQTVCLRGTKVHKKCYLASEGLKHFHEANEDCISKGGILVIPRNSDEINALQDYGKRSLPGVNDFWLGINDMVTEGKFVDVNGIAISFLNWDRAQPNGGKRENCVLFSQSAQGKWSDEACRSSKRYICEFTIPQ

SEQ ID NO: 3961 - protein, 265 aa, Homo sapiens
MLLWPLRGWAARALRCFGPGSRGSPASGPGPRRVQRRAWPPDKEQEKEKKSVICVEGNIASGKTTCLEFFSNATDVEVLTEPVSKWRNVRGHNPLGLMYHDASRWGLTLQTYVQLTMLDRHTRPQVSSVRLMERSIHSARYIFVENLYRSGKMPEVDYVVLSEWFDWILRNMDVSVDLIVYLRTNPETCYQRLKKRCREEEKVIPLEYLEAIHHLHEEWLIKGSLFPMAAPVLVIEADHHMERMLELFEQNRDRILTPENRKHCP

SEQ ID NO: 3962 - protein, 1454 aa, Homo sapiens
MWAQLLLGMLALSPAIAEELPNYLVTLPARLNFPSVQKVCLDLSPGYSDVKFTVTLETKDKTQKLLEYSGLKKRHLHCISFLVPPPAGGTEEVATIRVSGVGNNISFEEKKKVLIQRQGNGTFVQTDKPLYTPGQQVYFRIVTMDSNFVPVNDKYSMVELQDPNSNRIAQWLEVVPEQGIVDLSFQLAPEAMLGTYTVAVAEGKTFGTFSVEEYVLPKFKVEVVEPKELSTVQESFLVKICCRYTYGKPMLGAVQVSVCQKANTYWYREVEREQLPDKCRNLSGQTDKTGCFSAPVDMATFDLIGYAYSHQINIVATVVEEGTGVEANATQNIYISPQMGSMTFEDTSNFYHPNFPFSGKIRVRGHDDSFLKNHLVFLVIYGTNGTFNQTLVTDNNGLAPFTLETSGWNGTDVSLEGKFQMEDLVYNPEQVPRYYQNAYLHLRPFYSTTRSFLGIHRLNGPLKCGQPQEVLVDYYIDPADASPDQEISFSYYLIGKGSLVMEGQKHLNSKKKGLKASFSLSLTFTSRLAPDPSLVIYAIFPSGGVVADKIQFSVEMCFDNQVSLGFSPSQQLPGAEVELQLQAAPGSLCALRAVDESVLLLRPDRELSNRSVYGMFPFWYGHYPYQVAEYDQCPVSGPWDFPQPLIDPMPQGHSSQRSIIWRPSFSEGTDLFSFFRDVGLKILSNAKIKKPVDCSHRSPEYSTAMGAGGGHPEAFESSTPLHQAEDSQVRQYFPETWLWDLFPIGNSGKEAVHVTVPDAITEWKAMSFCTSQSRGFGLSPTVGLTAFKPFFVDLTLPYSVVRGESFRLTATIFNYLKDCIRVQTDLAKSHEYQLESWADSQTSSCLCADDAKTHHWNITAVKLGHINFTISTKILDSNEPCGGQKGFVPQKGRSDTLIKPVLVKPEGVLVEKTHSSLLCPKGKVASESVSLELPVDIVPDSTKAYVTVLGDIMGTALQNLDGLVQMPSGCGEQNMVLFAPIIYVLQYLEKAGLLTEEIRSRAVGFLEIGYQKELMYKHSNGSYSAFGERDGNGNTWLTAFVTKCFGQAQKFIFIDPKNIQDALKWMAGNQLPSGCYANVGNLLHTAMKGGVDDEVSLTAYVTAALLEMGKDVDDPMVSQGLRCLKNSATSTTNLYTQALLAYIFSLAGEMDIRNILLKQLDQQAIISGESIYWSQKPTPSSNASPWSEPAAVDVELTAYALLAQLTKPSLTQKEIAKATSIVAWLAKQHNAYGGFSSTQDTVVALQALAKYATTAYMPSEEINLVVKSTENFQRTFNIQSVNRLVFQQDTLPNVPGMYTLEASGQGCVYVQTVLRYNILPPTNMKTFSLSVEIGKARCEQPTSPRSLTLTIHTSYVGSRSSSNMAIVEVKMLSGFSPMEGTNQLLLQQPLVKKVEFGTDTLNIYLDELIKNTQTYTFTISQSVLVTNLKPATIKVYDYYLPDEQATIQYSDPCE

SEQ ID NO: 3963 - protein, 217 aa, Homo sapiens
MGSTVPRSASVLLLLLLLRRAEQPCGAELTFELPDNAKQCFHEEVEQGVKFSLDYQVITGGHYDVDCYVEDPQGNTIYRETKKQYDSFTYRAEVKGVYQFCFSNEFSTFSHKTVYFDFQVGDEPPILPDMGNRVTALTQMESACVTIHEALKTVIDSQTHYRLREAQDRARAEDLNSRVSYWSVGETIALFVVSFSQVLLLKSFFTEKRPISRAVHS

SEQ ID NO: 3964 - protein, 829 aa, Homo sapiens
MVPAWLWLLCVSVPQALPKAQPAELSVEVPENYGGNFPLYLTKLPLPREGAEGQIVLSGDSGKATEGPFAMDPDSGFLLVTRALDREEQAEYQLQVTLEMQDGHVLWGPQPVLVHVKDENDQVPHFSQAIYRARLSRGTRPGIPFLFLEASDRDEPGTANSDLRFHILSQAPAQPSPDMFQLEPRLGALALSPKGSTSLDHALERTYQLLVQVKDMGDQASGHQATATVEVSIIESTWVSLEPIHLAENLKVLYPHHMAQVHWSGGDVHYHLESHPPGPFEVNAEGNLYVTRELDREAQAEYLLQVRAQNSHGEDYAAPLELHVLVMDENDNVPICPPRDPTVSIPELSPPGTEVTRLSAEDADAPGSPNSHVVYQLLSPEPEDGVEGRAFQVDPTSGSVTLGVLPLRAGQNILLLVLAMDLAGAEGGFSSTCEVEVAVTDINDHAPEFITSQIGPISLPEDVEPGTLVAMLTAIDADLEPAFRLMDFAIERGDTEGTFGLDWEPDSGHVRLRLCKNLSYEAAPSHEVVVVVQSVAKLVGPGPGPGATATVTVLVERVMPPPKLDQESYEASVPISAPAGSFLLTIQPSDPISRTLRFSLVNDSEGWLCIEKFSGEVHTAQSLQGAQPGDTYTVLVEAQDTDEPRLSASAPLVIHFLKAPPAPALTLAPVPSQYLCTPRQDHGLIVSGPSKDPDLASGHGPYSFTLGPNPTVQRDWRLQTLNGSHAYLTLALHWVEPREHIIPVVVSHNAQMWQLLVRVIVCRCNVEGQCMRKVGRMKGMPTKLSAVGILVGTLVAIGIFLILIFTHWTMSRKKDPDQPADSVPLKATV

SEQ ID NO: 3965 - protein, 803 aa, Homo sapiens
MRALWVLGLCCVLLTFGSVRADDEVDVDGTVEEDLGKSREGSRTDDEVVQREEEAIQLDGLNASQIRELREKSEKFAFQAEVNRMMKLIINSLYKNKEIFLRELISNASDALDKIRLISLTDENALSGNEELTVKIKCDKEKNLLHVTDTGVGMTREELVKNLGTIAKSGTSEFLNKMTEAQEDGQSTSELIGQFGVGFYSAFLVADKVIVTSKHNNDTQHIWESDSNEFSVIADPRGNTLGRGTTITLVLKEEASDYLELDTIKNLVKKYSQFINFPIYVWSSKTETVEEPMEEEEAAKEEKEESDDEAAVEEEEEEKKPKTKKVEKTVWDWELMNDIKPIWQRPSKEVEEDEYKAFYKSFSKESDDPMAYIHFTAEGEVTFKSILFVPTSAPRGLFDEYGSKKSDYIKLYVRRVFITDDFHDMMPKYLNFVKGVVDSDDLPLNVSRETLQQHKLLKVIRKKLVRKTLDMIKKIADDKYNDTFWKEFGTNIKLGVIEDHSNRTRLAKLLRFQSSHHPTDITSLDQYVERMKEKQDKIYFMAGSSRKEAESSPFVERLLKKGYEVIYLTEPVDEYCIQALPEFDGKRFQNVAKEGVKFDESEKTKESREAVEKEFEPLLNWMKDKALKDKIEKAVVSQRLTESPCALVASQYGWSGNMERIMKAQAYQTGKDISTNYYASQKKTFEINPRHPLIRDMLRRIKEDEDDKTVLDLAVVLFETATLRSGYLLPDTKAYGDRIERMLRLSLNIDPDAKVEEEPEEEPEETAEDTTEDTEQDEDEEMDVGTDEEEETAKESTAEKDEL

SEQ ID NO: 3966 - protein, 477 aa, Homo sapiens
MKSLPILLLLCVAVCSAYPLDGAARGEDTSMNLVQKYLENYYDLKKDVKQFVRRKDSGPVVKKIREMQKFLGLEVTGKLDSDTLEVMRKPRCGVPDVGHFRTFPGIPKWRKTHLTYRIVNYTPDLPKDAVDSAVEKALKVWEEVTPLTFSRLYEGEADIMISFAVREHGDFYPFDGPGNVLAHAYAPGPGINGDAHFDDDEQWTKDTTGTNLFLVAAHEIGHSLGLFHSANTEALMYPLYHSLTDLTRFRLSQDDINGIQSLYGPPPDSPETPLVPTEPVPPEPGTPANCDPALSFDAVSTLRGEILIFKDRHFWRKSLRKLEPELHLISSFWPSLPSGVDAAYEVTSKDLVFIFKGNQFWAIRGNEVRAGYPRGIHTLGFPPTVRKIDAAISDKEKNKTYFFVEDKYWRFDEKRNSMEPGFPKQIAEDFPGIDSKIDAVFEEFGFFYFFTGSSQLEFDPNAKKVTHTLKSNSWLNC

SEQ ID NO: 3967 - protein, 1267 aa, Homo sapiens
MGDMKTPDFDDLLAAFDIPDPTSLDAKEAIQTPSEENESPLKPPGICMDESVSLSHSGSAPDVPAVSVIVKNTSRQESFEAEKDHITPSLLHNGFRGSDLPPDPHNCGKFDSTFMNGDSARSFPGKLEPPKSEPLPTFNQFSPISSPEPEDPIKDNGFGIKPKHSDSYFPPPLGCGAVGGPVLEALAKFPVPELHMFDHFCKKEPKPEPLPLGSQQEHEQSGQNTVEPHKDPDATRFFGEALEFNSHPSNSIGESKGLARELGTCSSVPPRQRLKPAHSKLSSCVAALVALQAKRVASVTKEDQPGHTKDLSGPTKESSKGSPKMPKSPKSPRSPLEATRKSIKPSDSPRSICSDSSSKGSPSVAASSPPAIPKVRIKTIKTSSGEIKRTVTRILPDPDDPSKSPVGSPLGSAIAEAPSEMPGDEVPVEEHFPEAGTNSGSPQGARKGDESMTKASDSSSPSCSSGPRVPKGAAPGSQTGKKQQSTALQASTLAPANLLPKAVHLANLNLVPHSVAASVTAKSSVQRRSQPQLTQMSVPLVHQVKKAAPLIVEVFNKVLHSSNPVPLYAPNLSPPADSRIHVPASGYCCLECGDAFALEKSLSQHYGRRSVHIEVLCTLCSKTLLFFNKCSLLRHARDHKSKGLVMQCSQLLVKPISADQMFVSAPVNSTAPAAPAPSSSPKHGLTSGSASPPPPALPLYPDPVRLIRYSIKCLECHKQMRDYMVLAAHFQRTTEETEGLTCQVCQMLLPNQCSFCAHQRIHAHKSPYCCPECGVLCRSAYFQTHVKENCLHYARKVGYRCIHCGVVHLTLALLKSHIQERHCQVFHKCAFCPMAFKTASSTADHSATQHPTQPHRPSQLIYKCSCEMVFNKKRHIQQHFYQNVSKTQVGVFKCPECPLLFVQKPELMQHVKSTHGVPRNVDELSSLQSSADTSSSRPGSRVPTEPPATSVAARSSSLPSGRWGRPEAHRRVEARPRLRNTGWTCQECQEWVPDRESYVSHMKKSHGRTLKRYPCRQCEQSFHTPNSLRKHIRNNHDTVKKFYTCGYCTEDSPSFPRPSLLESHISLMHGIRNPDLSQTSKVKPPGGHSPQVNHLKRPVSGVGDAPGTSNGATVSSTKRHKSLFQCAKCSFATDSGLEFQSHIPQHQVDSSTAQCLLCGLCYTSASSLSRHLFIVHKVRDQEEEEEEEAAAAEMAVEVAEPEEGSGEEVPMETRENGLEECAGEPLSADPEARRLLGPAPEDDGGHNDHSQPQASQDQDSHTLSPQV

SEQ ID NO: 3968 - protein, 436 aa, Homo sapiens [sequence omitted]

SEQ ID NO: 3969 - protein, 264 aa, Homo sapiens
MESGFTSKDTYLSHFNPRDYLEKYYKFGSRHSAESQILKHLLKNLFKIFCLDGVKGDLLIDIGSGPTIYQLLSACESFKEIVVTDYSDQNLQELEKWLKKEPEAFDWSPVVTYVCDLEGNRVKGPEKEEKLRQAVKQVLKCDVTQSQPLGAVPLPPADCVLSTLCLDAACPDLPTYCRALRNLGSLLKPGGFLVIMDALKSSYYMIGEQKFSSLPLGREAVEAAVKEAGYTIEWFEVISQSYSSTMANNEGLFSLVARKLSRPL

SEQ ID NO: 3970 - protein, 891 aa, Homo sapiens
MSLRIDVDTNFPECVVDAGKVTLGTQQRQEMDPRLREKQNEIILRAVCALLNSGGGIIKAEIENKGYNYERHGVGLDVPPIFRSHLDKMQKENHFLIFVKSWNTEAGVPLATLCSNLYHRERTSTDVMDSQEALAFLKCRTQTPTNINVSNSLGPQAAQGSVQYEGNINVSAAALFDRKRLQYLEKLNLPESTHVEFVMFSTDVSHCVKDRLPKCVSAFANTEGGYVFFGVHDETCQVIGCEKEKIDLTSLRASIDGCIKKLPVHHFCTQRPEIKYVLNFLEVHDKGALRGYVCAIKVEKFCCAVFAKVPSSWQVKDNRVRQLPTREWTAWMMEADPDLSRCPEMVLQLSLSSATPRSKPVCIHKNSECLKEQQKRYFPVFSDRVVYTPESLYKELFSQHKGLRDLINTEMRPFSQGILIFSQSWAVDLGLQEKQGVICDALLISQNNTPILYTIFSKWDAGCKGYSMIVAYSLKQKLVNKGGYTGRLCITPLVCVLNSDRKAQSVYSSYLQIYPESYNFMTPQHMEALLQSLVIVLLGFKSFLSEELGSEVLNLLTNKQYELLSKNLRKTRELFVHGLPGSGKTILALRIMEKIRNVFHCEPANILYICENQPLKKLVSFSKKNICQPVTRKTFMKNNFEHIQHIIIDDAQNFRTEDGDWYGKAKFITQTARDGPGVLWIFLDYFQTYHLSCSGLPPPSDQYPREEINRVVRNAGPIANYLQQVMQEARQNPPPNLPPGSLVMLYEPKWAQGVPGNLEIIEDLNLEEILIYVANKCRFLLRNGYSPKDIAVLFTKASEVEKYKDRLLTAMRKRKLSQLHEESDLLLQIGDASDVLTDHIVLDSVCRFSGLERNIVFGINPGVAPPAGAYNLLLCLASRAKRHLYILKASV

SEQ ID NO: 3971 - protein, 822 aa, Homo sapiens
MPAPIRLRELIRTIRTARTQAEEREMIQKECAAIRSSFREEDNTYRCRNVAKLLYMHMLGYPAHFGQLECLKLIASQKFTDKRIGYLGAMLLLDERQDVHLLMTNCIKNDLNHSTQFVQGLALCTLGCMGSSEMCRDLAGEVEKLLKTSNSYLRKKAALCAVHVIRKVPELMEMFLPATKNLLNEKNHGVLHTSVVLLTEMCERSPDMLAHFRKLVPQLVRILKNLIMSGYSPEHDVSGISDPFLQVRILRLLRILGRNDDDSSEAMNDILAQVATNTETSKNVGNAILYETVLTIMDIKSESGLRVLAINILGRFLLNNDKNIRYVALTSLLKTVQTDHNAVQRHRSTIVDCLKDLDVSIKRRAMELSFALVNGNNIRGMMKELLYFLDSCEPEFKADCASGIFLAAEKYAPSKRWHIDTIMRVLTTAGSYVRDDAVPNLIQLITNSVEMHAYTVQRLYKAILGDYSQQPLVQVAAWCIGEYGDLLVSGQCEEEEPIQVTEDEVLDILESVLISNMSTSVTRGYALTAIMKLSTRFTCTVNRIKKVVSIYGSSIDVELQQRAVEYNALFKKYDHMRSALLERMPVMEKVTTNGPTEIVQTNGETEPAPLETKPPPSGPQPTSQANDLLDLLGGNDITPVIPTAPTSKPSSAGGELLDLLGDINLTGAPAAAPAPASVPQISQPPFLLDGLSSQPLFNDIAAGIPSITAYSKNGLKIEFTFERSNTNPSVTVITIQASNSTELDMTDFVFQAAVPKTFQLQLLSPSSSIVPAFNTGTITQVIKVLNPQKQQLRMRIKLTYNHKGSAMQDLAEVNNFPPQSWQ

SEQ ID NO: 3972 - protein, 204 aa, Homo sapiens
MELKQSLSTHLEAEKPLRRYGAVEETAWKTERLGRNQLDIISMAETTMMPEEIELEMAKIQRLREVLVRRESELRFMMDDIQLCKDIMDLKQELQNLVAIPEKEKTKLQKQREDELIQKIHKLVQKRDFLVDDAEVERLREQEEDKEMADFLRIKLKPLDKVTKSPASSRAEKKAEPPPSKPTVAKTGLALIKDCCGATQCNIM

SEQ ID NO: 3973 - protein, 473 aa, Homo sapiens
MDRNPSPPPPGRDKEEEEEVAGGDCIGSTVYSKHWLFGVLSGLIQIVSPENTKSSSDDEEQLTELDEEMENEICRVWDMSMDEDVALFLQEFNAPDIFMGVLAKSKCPRLREICVGILGNMACFQEICVSISSDKNLGQVLLHCLYDSDPPTLLETSRLLLTCLSQAEVASVWVERIQEHPAIYDSICFIMSSSTNVDLLVKVGEVVDKLFDLDEKLMLEWVRNGAAQPLDQPQEESEEQPVFRLVPCILEAAKQVRSENPEWLDVYMHILQLLTTVDDGIQAIVHCPDTGKDIWNLLFDLVCHEFCQSDDPPIILQEQKTVLASVFSVLSAIYASQTEQEYLKIEKDLPLIDSLIRVLQNMEQCQKKPENSAESNTEETKRTDLTQDDFHLKILKDILCEFLSNIFQALTKETVAQGVKEGQLSKQKCSSAFQNLLPFYSPVVEDFIKILREVDKALADDLEKNFPSLKVQT

SEQ ID NO: 3974 - protein, 216 aa, Homo sapiens
MLRLSERNMKVLLAAALIAGSVFFLLLPGPSAADEKKKGPKVTVKVYFDLRIGDEDVGRVIFGLFGKTVPKTVDNFVALATGEKGFGYKNSKFHRVIKDFMIQGGDFTRGDGTGGKSIYGERFPDENFKLKHYGPGWVSMANAGKDTNGSQFFITTVKTAWLDGKHVVFGKVLEGMEVVRKVESTKTDSRDKPLKDVIIADCGKIEVEKPFAIAKE

SEQ ID NO: 3975 - protein, 160 aa, Homo sapiens
MQRVSGLLSWTLSRVLWLSGLSEPGAARQPRIMEEKALEVYDLIRTIRDPEKPNTLEELEVVSESCVEVQEINEEEYLVIIRFTPTVPHCSLATLIGLCLRVKLQRCLPFKHKLEIYISEGTHSTEEDINKQINDKERVAAAMENPNLREIVEQCVLEPD

SEQ ID NO: 3976 - protein, 1972 aa, Homo sapiens
MAQKGQLSDDEKFLFVDKNFINSPVAQADWAAKRLVWVPSEKQGFEAASIKEEKGDEVVVELVENGKKVTVGKDDIQKMNPPKFSKVEDMAELTCLNEASVLHNLRERYFSGLIYTYSGLFCVVVNPYKHLPIYSEKIVDMYKGKKRHEMPPHIYAIADTAYRSMLQDREDQSILCTGESGAGKTENTKKVIQYLAVVASSHKGKKDTSITGELEKQLLQANPILEAFGNAKTVKNDNSSRFGKFIRINFDVTGYIVGANIETYLLEKSRAIRQARDERTFHIFYYMIAGAKEKMRSDLLLEGFNNYTFLSNGFVPIPAAQDDEMFQETVEAMAIMGFSEEEQLSILKVVSSVLQLGNIVFKKERNTDQASMPDNTAAQKVCHLMGINVTDFTRSILTPRIKVGRDVVQKAQTKEQADFAVEALAKATYERLFRWILTRVNKALDKTHRQGASFLGILDIAGFEIFEVNSFEQLCINYTNEKLQQLFNHTMFILEQEEYQREGIEWNFIDFGLDLQPCIELIERPNNPPGVLALLDEECWFPKATDKSFVEKLCTEQGSHPKFQKPKQLKDKTEFSIIHYAGKVDYNASAWLTKNMDPLNDNVTSLLNASSDKFVADLWKDVDRIVGLDQMAKMTESSLPSASKTKKGMFRTVGQLYKEQLGKLMTTLRNTTPNFVRCIIPNHEKRSGKLDAFLVLEQLRCNGVLEGIRICRQGFPNRIVFQEFRQRYEILAANAIPKGFMDGKQACILMIKALELDPNLYRIGQSKIFFRTGVLAHLEEERDLKITDVIMAFQAMCRGYLARKAFAKRQQQLTAMKVIQRNCAAYLKLRNWQWWRLFTKVKPLLQVTRQEEEMQAKEDELQKTKERQQKAENELKELEQKHSQLTEEKNLLQEQLQAETELYAEAEEMRVRLAAKKQELEEILHEMEARLEEEEDRGQQLQAERKKMAQQMLDLEEQLEEEEAARQKLQLEKVTAEAKIKKLEDEILVMDDQNNKLSKERKLLEERISDLTTNLAEEEEKAKNLTKLKNKHESMISELEVRLKKEEKSRQELEKLKRKLEGDASDFHEQIADLQAQIAELKMQLAKKEEELQAALARLDDEIAQKNNALKKIRELEGHISDLQEDLDSERAARNKAEKQKRDLGEELEALKTELEDTLDSTATQQELRAKREQEVTVLKKALDEETRSHEAQVQEMRQKHAQAVEELTEQLEQFKRAKANLDKNKQTLEKENADLAGELRVLGQAKQEVEHKKKKLEAQVQELQSKCSDGERARAELNDKVHKLQNEVESVTGMLNEAEGKAIKLAKDVASLSSQLQDTQELLQEETRQKLNVSTKLRQLEEERNSLQDQLDEEMEAKQNLERHISTLNIQLSDSKKKLQDFASTVEALEEGKKRFQKEIENLTQQYEEKAAAYDKLEKTKNRLQQELDDLVVDLDNQRQLVSNLEKKQRKFDQLLAEEKNISSKYADERDRAEAEAREKETKALSLARALEEALEAKEELERTNKMLKAEMEDLVSSKDDVGKNVHELEKSKRALETQMEEMKTQLEELEDELQATEDAKLRLEVNMQALKGQFERDLQARDEQNEEKRRQLQRQLHEYETELEDERKQRALAAAAKKKLEGDLKDLELQADSAIKGREEAIKQLRKLQAQMKDFQRELEDARASRDEIFATAKENEKKAKSLEADLMQLQEDLAAAERARKQADLEKEELAEELASSLSGRNALQDEKRRLEARIAQLEEELEEEQGNMEAMSDRVRKATQQAEQLSNELATERSTAQKNESARQQLERQNKELRSKLHEMEGAVKSKFKSTIAALEAKIAQLEEQVEQEAREKQAATKSLKQKDKKLKEILLQVEDERKMAEQYKEQAEKGNARVKQLKRQLEEAEEESQRINANRRKLQRELDEATESNEAMGREVNALKSKLRRGNETSFVPSRRSGGRRVIENADGSEEETDTRDADFNGTKASE

SEQ ID NO: 3977 - protein, 507 aa, Homo sapiens
MARLLRSATWELFPWRGYCSQKAKGELCRDFVEALKAVVGGSHVSTAAVVREQHGRDESVHRCEPPDAVVWPQNVEQVSRLAALCYRQGVPIIPFGTGTGLEGGVCAVQGGVCVNLTHMDRILELNQEDFSVVVEPGVTRKALNAHLRDSGLWFPVDPGADASLCGMAATGASGTNAVRYGTMRDNVLNLEVVLPDGRLLHTAGRGRHFRFGFWPEIPHHTAWYSPCVSLGRRKSAAGYNLTGLFVGSEGTLGLITATTLRLHPAPEATVAATCAFPSVQAAVDSTVHILQAAVPVARIEFLDEVMMDACNRYSKLNCLVAPTLFLEFHGSQQALEEQLQRTEEIVQQNGASDFSWAKEAEERSRLWTARHNAWYAALATRPGCKGYSTDVCVPISRLPEIVVQTKEDLNASGLTGSIVGHVGDGNFHCILLVNPDDAEELGRVKAFAEQLGRRALALHGTCTGEHGIGMGKRQLLQEEVGAVGVETMRQLKAVLDPQGLMNPGKVL

SEQ ID NO: 3978 - protein, 522 aa, Homo sapiens
MAVNKGLTLLDGDLPEQENVLQRVLQLPVVSGTCECFQKTYTSTKEAHPLVASVCNAYEKGVQSASSLAAWSMEPVVRRLSTQFTAANELACRGLDHLEEKIPALQYPPEKIASELKDTISTRLRSARNSISVPIASTSDKVLGAALAGCELAWGVARDTAEFAANTRAGRLASGGADLALGSIEKVVEYLLPPDKEESAPAPGHQQAQKSPKAKPSLLSRVGALTNTLSRYTVQTMARALEQGHTVAMWIPGVVPLSSLAQWGASVAMQAVSRRRSEVRVPWLHSLAAAQEEDHEDQTDTEGEDTEEEEELETEENKFSEVAALPGPRGLLGGVAHTLQKTLQTTISAVTWAPAAVLGMAGRVLHLTPAPAVSSTKGRAMSLSDALKGVTDNVVDTVVHYVPLPRLSLMEPESEFRDIDNPPAEVERREAERRASGAPSAGPEPAPRLAQPRRSLRSAQSPGAPPGPGLEDEVATPAAPRPGFPAVPREKPKRRVSDSFFRPSVMEPILGRTHYSQLRKKS

SEQ ID NO: 3979 - protein, 967 aa, Homo sapiens
MAKGFYISKSLGILGILLGVAAVCTIIALSVVYSQEKNKNANSSPVASTTPSASATTNPASATTLDQSKAWNRYRLPNTLKPDSYRVTLRPYLTPNDRGLYVFKGSSTVRFTCKEATDVIIIHSKKLNYTLSQGHRVVLRGVGGSQPPDIDKTELVEPTEYLVVHLKGSLVKDSQYEMDSEFEGELADDLAGFYRSEYMEGNVRKVVATTQMQAADARKSFPCFDEPAMKAEFNITLIHPKDLTALSNMLPKGPSTPLPEDPNWNVTEFHTTPKMSTYLLAFIVSEFDYVEKQASNGVLIRIWARPSAIAAGHGDYALNVTGPILNFFAGHYDTPYPLPKSDQIGLPDFNAGAMENWGLVTYRENSLLFDPLSSSSSNKERVVTVIAHELAHQWFGNLVTIEWWNDLWLNEGFASYVEYLGADYAEPTWNLKDLMVLNDVYRVMAVDALASSHPLSTPASEINTPAQISELFDAISYSKGASVLRMLSSFLSEDVFKQGLASYLHTFAYQNTIYLNLWDHLQEAVNNRSIQLPTTVRDIMNRWTLQMGFPVITVDTSTGTLSQEHFLLDPDSNVTRPSEFNYVWIVPITSIRDGRQQQDYWLIDVRAQNDLFSTSGNEWVLLNLNVTGYYRVNYDEENWRKIQTQLQRDHSAIPVINRAQIINDAFNLASAHKVPVTLALNNTLFLIEERQYMPWEAALSSLSYFKLMFDRSEVYGPMKNYLKKQVTPLFIHFRNNTNNWREIPENLMDQYSEVNAISTACSNGVPECEEMVSGLFKQWMENPNNNPIHPNLRSTVYCNAIAQGGEEEWDFAWEQFRNATLVNEADKLRAALACSKELWILNRYLSYTLNPDLIRKQDATSTIISITNNVIGQGLVWDFVQSNWKKLFNDYGGGSFSFSNLIQAVTRRFSTEYELQQLEQFKKDNEETGFGSGTRALEQALEKTKANIKWVKENKEVVLQWFTENSK

SEQ ID NO: 3980 - protein, 399 aa, Homo sapiens
MAEAMDLGKDPNGPTHSSTLFVRDDGSSMSFYVRPSPAKRRLSTLILHGGGTVCRVQEPGAVLLAQPGEALAEASGDFISTQYILDCVERNERLELEAYRLGPASAADTGSEAKPGALAEGAAEPEPQRHAGRIAFTDADDVAILTYVKENARSPSSVTGNALWKAMEKSSLTQHSWQSLKDRYLKHLRGQEHKYLLGDAPVSPSSQKLKRKAEEDPEAADSGEPQNKRTPDLPEEEYVKEEIQENEEAVKKMLVEATREFEEVVVDESPPDFEIHITMCDDDPPTPEEDSETQPDEEEEEEEEKVSQPEVGAAIKIIRQLMEKFNLDLSTVTQAFLKNSGELEATSAFLASGQRADGYPIWSRQDDIDLQKDDEDTREALVKKFGAQNVARRIEFRKK

SEQ ID NO: 3981 - protein, 182 aa, Homo sapiens
MELGELLYNKSEYIETASGNKVSRQSVLCGSQNIVLNGKTIVMNDCIIRGDLANVRVGRHCVVKSRSVIRPPFKKFSKGVAFFPLHIGDHVFIEEDCVVNAAQIGSYVHVGKNCVIGRRCVLKDCCKILDNTVLPPETVVPPFTVFSGCPGLFSGELPECTQELMIDVTKSYYQKFLPLTQV

SEQ ID NO: 3982 - protein, 603 aa, Homo sapiens
MSAAVTAGKLARAPADPGKAGVPGVAAPGAPAAAPPAKEIPEVLVDPRSRRRYVRGRFLGKGGFAKCFEISDADTKEVFAGKIVPKSLLLKPHQREKMSMEISIHRSLAHQHVVGFHGFFEDNDFVFVVLELCRRRSLLELHKRRKALTEPEARYYLRQIVLGCQYLHRNRVIHRDLKLGNLFLNEDLEVKIGDFGLATKVEYDGERKKTLCGTPNYIAPEVLSKKGHSFEVDVWSIGCIMYTLLVGKPPFETSCLKETYLRIKKNEYSIPKHINPVAASLIQKMLQTDPTARPTINELLNDEFFTSGYIPARLPITCLTIPPRFSIAPSSLDPSNRKPLTVLNKGLENPLPERPREKEEPVVRETGEVVDCHLSDMLQQLHSVNASKPSERGLVRQEEAEDPACIPIFWVSKWVDYSDKYGLGYQLCDNSVGVLFNDSTRLILYNDGDSLQYIERDGTESYLTVSSHPNSLMKKITLLKYFRNYMSEHLLKAGANITPREGDELARLPYLRTWFRTRSAIILHLSNGSVQINFFQDHTKLILCPLMAAVTYIDEKRDFRTYRLSLLEEYGCCKELASRLRYARTMVDKLLSSRSASNRLKAS

SEQ ID NO: 3983 - protein, 633 aa, Homo sapiens
MPSCGACTCGAAAVRLITSSLASAQRGISGGRIHMSVLGRLGTFETQILQRAPLRSFTETPAYFASKDGISKDGSGDGNKKSASEGSSKKSGSGNSGKGGNQLRCPKCGDLCTHVETFVSSTRFVKCEKCHHFFVVLSEADSKKSIIKEPESAAEAVKLAFQQKPPPPPKKIYNYLDKYVVGQSFAKKVLSVAVYNHYKRIYNNIPANLRQQAEVEKQTSLTPRELEIRRREDEYRFTKLLQIAGISPHGNALGASMQQQVNQQIPQEKRGGEVLDSSHDDIKLEKSNILLLGPTGSGKTLLAQTLAKCLDVPFAICDCTTLTQAGYVGEDIESVIAKLLQDANYNVEKAQQGIVFLDEVDKIGSVPGIHQLRDVGGEGVQQGLLKLLEGTIVNVPEKNSRKLRGETVQVDTTNILFVASGAFNGLDRIISRRKNEKYLGFGTPSNLGKGRRAAAAADLANRSGESNTHQDIEEKDRLLRHVEARDLIEFGMIPEFVGRLPVVVPLHSLDEKTLVQILTEPRNAVIPQYQALFSMDKCELNVTEDALKAIARLALERKTGARGLRSIMEKLLLEPMFEVPNSDIVCVEVDKEVVEGKKEPGYIRAPTKESSEEEYDSGVEEEGWPRQADAANS

SEQ ID NO: 3984 - protein, 121 aa, Homo sapiens
MRIMLLFTAILAFSLAQSFGAVCKEPQEEVVPGGGRSKRDPDLYQLLQRLFKSHSSLEGLLKALSQASTDPKESTSPEKRDMHDFFVGLMGKRSVQPDSPTDVNQENVPSFGILKYPPRAE

SEQ ID NO: 3985 - protein, 525 aa, Homo sapiens
MHRAPSPTAEQPPGGGDSARRTLQPRLKPSARAMALPRTLGELQLYRVLQRANLLSYYETFIQQGGDDVQQLCEAGEEEFLEIMALVGMATKPLHVRRLQKALREWATNPGLFSQPVPAVPVSSIPLFKISETAGTRKGSMSNGHGSPGEKAGSARSFSPKSPLELGEKLSPLPGGPGAGDPRIWPGRSTPESDVGAGGEEEAGSPPFSPPAGGGVPEGTGAGGLAAGGTGGGPDRLEPEMVRMVVESVERIFRSFPRGDAGEVTSLLKLNKKLARSVGHIFEMDDNDSQKEEEIRKYSIIYGRFDSKRREGKQLSLHELTINEAAAQFCMRDNTLLLRRVELFSLSRQVARESTYLSSLKGSRLHPEELGGPPLKKLKQEVGEQSHPEIQQPPPGPESYVPPYRPSLEEDSASLSGESLDGHLQAVGSCPRLTPPPADLPLALPAHGLWSRHILQQTLMDEGLRLARLVSHDRVGRLSPCVPAKPPLAEFEEGLLDRCPAPGPHPALVEGRRSSVKVEAEASRQ

SEQ ID NO: 3986 - protein, 847 aa, Homo sapiens
MSLWGLVSKMPPEKVQRLYVDFPQHLRHLLGDWLESQPWEFLVGSDAFCCNLASALLSDTVQHLQASVGEQGEGSTILQHISTLESIYQRDPLKLVATFRQILQGEKKAVMEQFRHLPMPFHWKQEELKFKTGLRRLQHRVGEIHLLREALQKGAEAGQVSLHSLIETPANGTGPSEALAMLLQETTGELEAAKALVLKRIQIWKRQQQLAGNGAPFEESLAPLQERCESLVDIYSQLQQEVGAAGGELEPKTRASLTGRLDEVLRTLVTSCFLVEKQPPQVLKTQTKFQAGVRFLLGLRFLGAPAKPPLVRADMVTEKQARELSVPQGPGAGAESTGEIINNTVPLENSIPGNCCSALFKNLLLKKIKRCERKGTESVTEEKCAVLFSASFTLGPGKLPIQLQALSLPLVVIVHGNQDNNAKATILWDNAFSEMDRVPFVVAERVPWEKMCETLNLKFMAEVGTNRGLLPEHFLFLAQKIFNDNSLSMEAFQHRSVSWSQFNKEILLGRGFTFWQWFDGVLDLTKRCLRSYWSDRLIIGFISKQYVTSLLLNEPDGTFLLRFSDSEIGGITIAHVIRGQDGSPQIENIQPFSAKDLSIRSLGDRIRDLAQLKNLYPKKPKDEAFRSHYKPEQMGKDGRGYVPATIKMTVERDQPLPTPELQMPTMVPSYDLGMAPDSSMSMQLGPDMVPQVYPPHSHSIPPYQGLSPEESVNVLSAFQEPHLQMPPSLGQMSLPFDQPHPQGLLPCQPQEHAVSSPDPLLCSDVTMVEDSCLSQPVTAFPQGTWIGEDIFPPLLPPTEQDLTKLLLEGQGESGGGSLGAQPLLQPSHYGQSGISMSHMDLRANPSW

SEQ ID NO: 3987 - protein, 770 aa, Homo sapiens
MFRYESLEDCPLDEDEDAFQGLGEEDEEIDQFNDDTFGSGAVDDDWQEAHERLAELEEKLPVAVNEQTGNGERDEMDLLGDHEENLAERLSKMVIENELEDPAIMRAVQTRPVLQPQPGSLNSSIWDGSEVLRRIRGPLLAQEMPTVSVLEYALPQRPPQGPEDDRDLSERALPRRSTSPIIGSPPVRAVPIGTPPKQMAVPSFTQQILCPKPVHVRPPMPPRYPAPYGERMSPNQLCSVPNSSLLGHPFPPSVPPVLSPLQRAQLLGGAQLQPGRMSPSQFARVPGFVGSPLAAMNPKLLQGRVGQMLPPAPGFRAFFSAPPSATPPPQQHPPGPGPHLQNLRSQAPMFRPDTTHLHPQHRRLLHQRQQQNRSQHRNLNGAGDRGSHRSSHQDHLRKDPYANLMLQREKDWVSKIQMMQLQSTDPYLDDFYYQNYFEKLEKLSAAEEIQGDGPKKERTKLITPQVAKLEHAYKPVQFEGSLGKLTVSSVNNPRKMIDAVVTSRSEDDETKEKQVRDKRRKTLVIIEKTYSLLLDVEDYERRYLLSLEEERPALMDDRKHKICSMYDNLRGKLPGQERPSDDHFVQIMCIRKGKRMVARILPFLSTEQAADILMTTARNLPFLIKKDAQDEVLPCLLSPFSLLLYHLPSVSITSLLRQLMNLPQSAATPALSNPHLTAVLQNKFGLSLLLILLSRGEDLQSSDPATESTQNNQWTEVMFMATRELLRIPQAALAKPISIPTNLVSLFSRYVDRQKLNLLETKLQLVQGIR

SEQ ID NO: 3988 - protein, 251 aa, Homo sapiens [sequence omitted]

SEQ ID NO: 3989 - protein, 246 aa, Homo sapiens
MTMDKSELVQKAKLAEQAERYDDMAAAMKAVTEQGHELSNEERNLLSVAYKNVVGARRSSWRVISSIEQKTERNEKKQQMGKEYREKIEAELQDICNDVLELLDKYLIPNATQPESKVFYLKMKGDYFRYLSEVASGDNKQTTVSNSQQAYQEAFEISKKEMQPTHPIRLGLALNFSVFYYEILNSPEKACSLAKTAFDEAIAELDTLNEESYKDSTLIMQLLRDNLTLWTSENQGDEGDAGEGEN

SEQ ID NO: 3990 - protein, 212 aa, Homo sapiens
MVSRMVSTMLSGLLFWLASGWTPAFAYSPRTPDRVSEADIQRLLHGVMEQLGIARPRVEYPAHQAMNLVGPQSIEGGAHEGLQHLGPFGNIPNIVAELTGDNIPKDFSEDQGYPDPPNPCPVGKTADDGCLENTPDTAEFSREFQLHQHLFDPEHDYPGLGKWNKKLLYEKMKGGERRKRRSVNPYLQGQRLDNVVAKKSVPHFSDEDKDPE

SEQ ID NO: 3991 - protein, 395 aa, Homo sapiens
MSGGKKKSSFQITSVTTDYEGPGSPGASDPPTPQPPTGPPPRLPNGEPSPDPGGKGTPRNGSPPPGAPSSRFRVVKLPHGLGEPYRRGRWTCVDVYERDLEPHSFGGLLEGIRGASGGAGGRSLDSRLELASLGLGAPTPPSGLSQGPTSWLRPPPTSPGPQARSFTGGLGQLVVPSKAKAEKPPLSASSPQQRPPEPETGESAGTSRAATPLPSLRVEAEAGGSGARTPPLSRRKAVDMRLRMELGAPEEMGQVPPLDSRPSSPALYFTHDASLVHKSPDPFGAVAAQKFSLAHSMLAISGHLDSDDDSGSGSLVGIDNKIEQAMDLVKSHLMFAVREEVEVLKEQIRELAERNAALEQENGLLRALASPEQLAQLPSSGVPRLGPPAPNGPSV

SEQ ID NO: 3992 - protein, 360 aa, Homo sapiens
MASATAPAAAVPTLASPLEQLRHLAEELRLLLPRVRVGEAQETTEEFNREMFWRRLNEAAVTVSREATTLTIVFSQLPLPSPQETQKFCEQVHAAIKAFIAVYYLLPKDQGITLRKLVRGATLDIVDGMAQLMEVLSVTPTQSPENNDLISYNSVWVACQQMPQIPRDNKAAALLMLTKNVDFVKDAHEEMEQAVEECDPYSGLLNDTEENNSDNHNHEDDVLGFPSNQDLYWSEDDQELIIPCLALVRASKACLKKIRMLVAENGKKDQVAQLDDIVDISDEISPSVDDLALSIYPPMCHLTVRINSAKLVSVLKKALEITKASHVTPQPEDSWIPLLINAIDHCMNRIKELTQSELEL

SEQ ID NO: 3993 - protein, 2803 aa, Homo sapiens
MDGVAEFSEYVSETVDVPSPFDLLEPPTSGGFLKLSKPCCYIFPGGRGDSALFAVNGFNILVDGGSDRKSCFWKLVRHLDRIDSVLLTHIGADNLPGINGLLQRKVAELEEEQSQGSSSYSDWVKNLISPELGVVFFNVPEKLRLPDASRKAKRSIEEACLTLQHLNRLGIQAEPLYRVVSNTIEPLTLFHKMGVGRLDMYVLNPVKDSKEMQFLMQKWAGNSKAKTGIVLPNGKEAEISVPYLTSITALVVWLPANPTEKIVRVLFPGNAPQNKILEGLEKLRHLDFLRYPVATQKDLASGAVPTNLKPSKIKQRADSKESLKATTKTAVSKLAKREEVVEEGAKEARSELAKELAKTEKKAKESSEKPPEKPAKPERVKTESSEALKAEKRKLIKDKVGKKHLKEKISKLEEKKDKEKKEIKKERKELKKDEGRKEEKKDAKKEEKRKDTKPELKKISKPDLKPFTPEVRKTLYKAKVPGRVKIDRSRAIRGEKELSSEPQTPPAQKGTVPLPTISGHRELVLSSPEDLTQDFEEMKREERALLAEQRDTGLGDKPFPLDTAEEGPPSTAIQGTPPSVPGLGQEEHVMKEKELVPEVPEEQGSKDRGLDSGAETEEEKDTWEEKKQREAERLPDRTEAREESEPEVKEDVIEKAELEEMEEVHPSDEEEEDATKAEGFYQKHMQEPLKVTPRSREAFGGRELGLQGKAPEKETSLFLSSLTTPAGATEHVSYIQDETIPGYSETEQTISDEEIHDEPEERPAPPRFHTSTYDLPGPEGAGPFEASQPADSAVPATSGKVYGTPETELTYPTNIVAAPLAEEEHVSSATSITECDKLSSFATSVAEDQSVASLTAPQTEETGKSSLLLDTVTSIPSSRTEATQGLDYVPSAGTISPTSSLEEDKGFKSPPCEDFSVTGESEKRGEIIGKGLSGERAVEEEEEETANVEMSEKLCSQYGTPVFSAPGHALHPGEPALGEAEERCLSPDDSTVKMASPPPSGPPSATHTPFHQSPVEEKSEPQDFQEADSWGDTKRTPGVGKEDAAEETVKPGPEEGTLEKEEKVPPPRSPQAQEAPVNIDEGLTGCTIQLLPAQDKAIVFEIMEAGEPTGPILGAEALPGGLRTLPQEPGKPQKDEVLRYPDRSLSPEDAESLSVLSVPSPDTANQEPTPKSPCGLTEQYLHKDRWPEVSPEDTQSLSLSEESPSKETSLDVSSKQLSPESLGTLQFGELNLGKEEMGHLMQAEDTSHHTAPMSVPEPHAATASPPTDGTTRYSAQTDITDDSLDRKSPASSFSHSTPSGNGKYLPGAITSPDEHILTPDSSFSKSPESLPGPALEDIAIKWEDKVPGLKDRTSEQKKEPEPKDEVLQQKDKTLEHKEVVEPKDTAIYQKDEALHVKNEAVKQQDKALEQKGRDLEQKDTALEQKDKALEPKDKDLEEKDKALEQKDKIPEEKDKALEQKDTALEQKDKALEPKDKDLEQKDRVLEQKEKIPEEKDKALDQKVRSVEHKAPEDTVAEMKDRDLEQTDKAPEQKHQAQEQKDKVSEKKDQALEQKYWALGQKDEALEQNIQALEENHQTQEQESLVQEDKTRKPKMLEEKSPEKVKAMEEKLEALLEKTKALGLEESLVQEGRAREQEEKYWRGQDVVQEWQETSPTREEPAGEQKELAPAWEDTSPEQDNRYWRGREDVALEQDTYWRELSCERKVWFPHELDGQGARPHYTEERESTFLDEGPDDEQEVPLREHATRSPWASDFKDFQESSPQKGLEVERWLAESPVGLPPEEEDKLTRSPFEIISPPASPPEMVGQRVPSAPGQESPIPDPKLMPHMKNEPTTPSWLADIPPWVPKDRPLPPAPLSPAPGPPTPAPESHTPAPFSWGTAEYDSVVAAVQEGAAELEGGPYSPLGKDYRKAEGEREEEGRAEAPDKSSHSSKVPEASKSHATTEPEQTEPEQREPTPYPDERSFQYADIYEQMMLTGLGPACPTREPPLGAAGDWPPCLSTKEAAAGRNTSAEKELSSPISPKSLQSDTPTFSYAALAGPTVPPRPEPGPSMEPSLTPPAVPPRAPILSKGPSPPLNGNILSCSPDRRSPSPKESGRSHWDDSTSDSELEKGAREQPEKEAQSPSPPHPIPMGSPTLWPETEAHVSPPLDSHLGPARPSLDFPASAFGFSSLQPAPPQLPSPAEPRSAPCGSLAFSGDRALALAPGPPTRTRHDEYLEVTKAPSLDSSLPQLPSPSSPGAPLLSNLPRPASPALSEGSSSEATTPVISSVAERFSPSLEAAEQESGELDPGMEPAAHSLWDLTPLSPAPPASLDLALAPAPSLPGDMGDGILPCHLECSEAATEKPSPFQVPSEDCAANGPTETSPNPPGPAPAKAENEEAAACPAWERGAWPEGAERSSRPDTLLSPEQPVCPAGGSGGPPSSASPEVEAGPQGCATEPRPHRGELSPSFLNPPLPPSIDDRDLSTEEVRLVGRGGRRRVGGPGTTGGPCPVTDETPPTSASDSGSSQSDSDVPPETEECPSITAEAALDSDEDGDFLPVDKAGGVSGTHHPRPGHDPPPLPQPDPRPSPPRPDVCMADPEGLSSESGRVERLREKEKVQGRVGRRAPGKAKPASPARRLDLRGKRSPTPGKGPADRASRAPPRPRSTTSQVTPAEEKDGHSPMSKGLVNGLKAGPMALSSKGSSGAPVYVDLAYIPNHCSGKTADLDFFRRVRASYYVVSGNDPANGEPSRAVLDALLEGKAQWGENLQVTLIPTHDTEVTREWYQQTHEQQQQLNVLVLASSSTVVMQDESFPACKIEF

SEQ ID NO: 3994 - protein, 293 aa, Homo sapiens
MNPFWSMSTSSVRKRSEGEEKTLTGDVKTSPPRTAPKKQLPSIPKNALPITKPTSPAPAAQSTNGTHASYGPFYLEYSLLAEFTLVVKQKLPGVYVQPSYRSALMWFGVIFIRHGLYQDGVFKFTVYIPDNYPDGDCPRLVFDIPVFHPLVDPTSGELDVKRAFAKWRRNHNHIWQVLMYARRVFYKIDTASPLNPEAAVLYEKDIQLFKSKVVDSVKVCTARLFDQPKIEDPYAISFSPWNPSVHDEAREKMLTQKKKPEEQHNKSVHVAGLSWVKPGSVQPFSKEEKTVAT

SEQ ID NO: 3995 - protein, 327 aa, Homo sapiens
MPGPTQTLSPNGENNNDIIQDNNGTIIPFRKHTVRGERSYSWGMAVNVYSTSITQETMSRHDIIAWVNDIVSLNYTKVEQLCSGAAYCQFMDMLFPGCISLKKVKFQAKLEHEYIHNFKLLQASFKRMNVDKVIPVEKLVKGRFQDNLDFIQWFKKFYDANYDGKEYDPVEARQGQDAIPPPDPGEQIFNLPKKSHHANSPTAGAAKSSPAAKPGSTPSRPSSAKRASSSGSASKSDKDLETQVIQLNEQVHSLKLALEGVEKERDFYFGKLREIELLCQEHGQENDDLVQRLMDILYASEEHEGHTEEPEAEEQAHEQQPPQQEEY

SEQ ID NO: 3996 - protein, 2303 aa, Homo sapiens
MATNIEQIFRSFVVSKFREIQQELSSGRNEGQLNGETNTPIEGNQAGDAAASARSLPNEEIVQKIEEVLSGVLDTELRYKPDLKEGSRKSRCVSVQTDPTDEIPTKKSKKHKKHKNKKKKKKKEKEKKYKRQPEESESKTKSHDDGNIDLESDSFLKFDSEPSAVALELPTRAFGPSETNESPAVVLEPPVVSMEVSEPHILETLKPATKTAELSVVSTSVISEQSEQSVAVMPEPSMTKILDSFAAAPVPTTTLVLKSSEPVVTMSVEYQMKSVLKSVESTSPEPSKIMLVEPPVAKVLEPSETLVVSSETPTEVYPEPSTSTTMDFPESSAIEALRLPEQPVDVPSEIADSSMTRPQELPELPKTTALELQESSVASAMELPGPPATSMPELQGPPVTPVLELPGPSATPVPELPGPLSTPVPELPGPPATAVPELPGPSVTPVPQLSQELPGLPAPSMGLEPPQEVPEPPVMAQELPGLPLVTAAVELPEQPAVTVAMELTEQPVTTTELEQPVGMTTVEHPGHPEVTTATGLLGQPEATMVLELPGQPVATTALELPGQPSVTGVPELPGLPSATRALELSGQPVATGALELPGPLMAAGALEFSGQSGAAGALELLGQPLATGVLELPGQPGAPELPGQPVATVALEISVQSVVTTSELSTMTVSQSLEVPSTTALESYNTVAQELPTTLVGETSVTVGVDPLMAPESHILASNTMETHILASNTMDSQMLASNTMDSQMLASNTMDSQMLASSTMDSQMLATSSMDSQMLATSSMDSQMLATSTMDSQMLATSSMDSQMLATSSMDSQMLATSSMDSQMLATSSMDSQMLATSTMDSQMLATSTMDSQMLATSSMDSQMLASGTMDSQMLASGTMDAQMLASGTMDAQMLASSTQDSAMLGSKSPDPYRLAQDPYRLAQDPYRLGHDPYRLGHDAYRLGQDPYRLGHDPYRLTPDPYRMSPRPYRIAPRSYRIAPRPYRLAPRPLMLASRRSMMMSYAAERSMMSSYERSMMSYERSMMSPMAERSMMSAYERSMMSAYERSMMSPMAERSMMSAYERSMMSAYERSMMSPMADRSMMSMGADRSMMSSYSAADRSMMSSYSAADRSMMSSYTADRSMMSMAADSYTDSYTDTYTEAYMVPPLPPEEPPTMPPLPPEEPPMTPPLPPEEPPEGPALPTEQSALTAENTWPTEVPSSPSEESVSQPEPPVSQSEISEPSAVPTDYSVSASDPSVLVSEAAVTVPEPPPEPESSITLTPVESAVVAEEHEVVPERPVTCMVSETPAMSAEPTVLASEPPVMSETAETFDSMRASGHVASEVSTSLLVPAVTTPVLAESILEPPAMAAPESSAMAVLESSAVTVLESSTVTVLESSTVTVLEPSVVTVPEPPVVAEPDYVTIPVPVVSALEPSVPVLEPAVSVLQPSMIVSEPSVSVQESTVTVSEPAVTVSEQTQVIPTEVAIESTPMILESSIMSSHVMKGINLSSGDQNLAPEIGMQEIALHSGEEPHAEEHLKGDFYESEHGINIDLNINNHLIAKEMEHNTVCAAGTSPVGEIGEEKILPTSETKQRTVLDTYPGVSEADAGETLSSTGPFALEPDATGTSKGIEFTTASTLSLVNKYDVDLSLTTQDTEHDMVISTSPSGGSEADIEGPLPAKDIHLDLPSNNNLVSKDTEEPLPVKESDQTLAALLSPKESSGGEKEVPPPPKETLPDSGFSANIEDINEADLVRPLLPKDMERLTSLRAGIEGPLLASDVGRDRSAASPVVSSMPERASESSSEEKDDYEIFVKVKDTHEKSKKNKNRDKGEKEKKRDSSLRSRSKRSKSSEHKSRKRTSESRSRARKRSSKSKSHRSQTRSRSRSRRRRRSSRSRSKSRGRRSVSKEKRKRSPKHRSKSRERKRKRSSSRDNRKTVRARSRTPSRRSRSHTPSRRRRSRSVGRRRSFSISPSRRSRTPSRRSRTPSRRSRTPSRRSRTPSRRSRTPSRRSRTPSRRRRSRSVVRRRSFSISPVRLRRSRTPLRRRFSRSPIRRKRSRSSERGRSPKRLTDLDKAQLLEIAKANAAAMCAKAGVPLPPNLKPAPPPTIEEKVAKKSGGATIEELTEKCKQIAQSKEDDDVIVNKPHVSDEEEEEPPFYHHPFKLSEPKPIFFNLNIAAAKPTPPKSQVTLTKEFPVSSGSQHRKKEADSVYGEWVPVEKNGEENKDDDNVFSSNLPSEGRVKRQGRVRRQMKQPAASHLTVTRCNSLCGTKPQSEKHRIAENSVITSLPNIGPSLHLWEGSPRYNYLASRFASRLYSSRFWW

SEQ ID NO: 3997 - protein, 417 aa, Homo sapiens
MAGPFSRLLSARPGLRLLALAGAGSLAAGFLLRPEPVRAASERRRLYPPSAEYPDLRKHNNCMASHLTPAVYARLCDKTTPTGWTLDQCIQTGVDNPGHPFIKTVGMVAGDEETYEVFADLFDPVIQERHNGYDPRTMKHTTDLDASKIRSGYFDERYVLSSRVRTGRSIRGLSLPPACTRAERREVERVVVDALSGLKGDLAGRYYRLSEMTEAEQQQLIDDHFLFDKPVSPLLTAAGMARDWPDARGIWHNNEKSFLIWVNEEDHTRVISMEKGGNMKRVFERFCRGLKEVERLIQERGWEFMWNERLGYILTCPSNLGTGLRAGVHIKLPLLSKDSRFPKILENLRLQKRGTGGVDTAATGGVFDISNLDRLGKSEVELVQLVIDGVNYLIDCERRLERGQDIRIPTPVIHTKH

SEQ ID NO: 3998 - protein, 505 aa, Homo sapiens
MRLRRLALFPGVALLLAAARLAAASDVLELTDDNFESRISDTGSAGLMLVEFFAPWCGHCKRLAPEYEAAATRLKGIVPLAKVDCTANTNTCNKYGVSGYPTLKIFRDGEEAGAYDGPRTADGIVSHLKKQAGPASVPLRTEEEFKKFISDKDASIVGFFDDSFSEAHSEFLKAASNLRDNYRFAHTNVESLVNEYDDNGEGIILFRPSHLTNKFEDKTVAYTEQKMTSGKIKKFIQENIFGICPHMTEDNKDLIQGKDLLIAYYDVDYEKNAKGSNYWRNRVMMVAKKFLDAGHKLNFAVASRKTFSHELSDFGLESTAGEIPVVAIRTAKGEKFVMQEEFSRDGKALERFLQDYFDGNLKRYLKSEPIPESNDGPVKVVVAENFDEIVNNENKDVLIEFYAPWCGHCKNLEPKYKELGEKLSKDPNIVIAKMDATANDVPSPYEVRGFPTIYFSPANKKLNPKKYEGGRELSDFISYLQREATNPPVIQEEKPKKKKKAQEDL

SEQ ID NO: 3999 - protein, 227 aa, Homo sapiens
MSVVPPNRSQTGWPRGVTQFGNKYIQQTKPLTLERTINLYPLTNYTFGTKEPLYEKDSSVAARFQRMREEFDKIGMRRTVEGVLIVHEHRLPHVLLLQLGTTFFKLPGGELNPGEDEVEGLKRLMTEILGRQDGVLQDWVIDDCIGNWWRPNFEPPQYPYIPAHITKPKEHKKLFLVQLQEKALFAVPKNYKLVAAPLFELYDNAPGYGPIISSLPQLLSRFNFIYN

SEQ ID NO: 4000 - protein, 390 aa, Homo sapiens
MESETEPEPVTLLVKSPNQRHRDLELSGDRGWSVGHLKAHLSRVYPERPRPEDQRLIYSGKLLLDHQCLRDLLPKEKRHVLHLVCNVKSPSKMPEINAKVAESTEEPAGSNRGQYPEDSSSDGLRQREVLRNLSSPGWENISRPEAAQQAFQGLGPGFSGYTPYGWLQLSWFQQIYARQYYMQYLAATAASGAFVPPPSAQEIPVVSAPAPAPIHNQFPAENQPANQNAAPQVVVNPGANQNLRMNAQGGPIVEEDDEINRDWLDWTYSAATFSVFLSILYFYSSLSRFLMVMGATVVMYLHHVGWFPFRPRPVQNFPNDGPPPDVVNQDPNNNLQEGTDPETEDPNHLPPDRDVLDGEQTSPSFMSTAWLVFKTFFASLLPEGPPAIAN

SEQ ID NO: 4001 - protein, 507 aa, Homo sapiens
MCTKTIPVLWGCFLLWNLYVSSSQTIYPGIKARITQRALDYGVQAGMKMIEQMLKEKKLPDLSGSESLEFLKVDYVNYNFSNIKISAFSFPNTSLAFVPGVGIKALTNHGTANISTDWGFESPLFQDTGGADLFLSGVYFTGIIILTRNDFGHPTLKLQDCYAQLSHAHVSFSGELSVLYNSFAEPMEKPILKNLNEMLCPIIASEVKALNANLSTLEVLTKIDNYTLLDYSLISSPEITENYLDLNLKGVFYPLENLTDPPFSPVPFVLPERSNSMLYIGIAEYFFKSASFAHFTAGVFNVTLSTEEISNHFVQNSQGLGNVLSRIAEIYILSQPFMVRIMATEPPIINLQPGNFTLDIPASIMMLTQPKNSTVETIVSMDFVASTSVGLVILGQRLVCSLSLNRFRLALPESNRSNIEVLRFENILSSILHFGVLPLANAKLQQGFPLSNPHKFLFVNSDIEVLEGFLLISTDLKYETSSKQQPSFHVWEGLNLISRQWRGKSAP

SEQ ID NO: 4002 - protein, 747 aa, Homo sapiens
MSQVKSSYSYDAPSDFINFSSLDDEGDTQNIDSWFEEKANLENKLLGKNGTGGLFQGKTPLRKANLQQAIVTPLKPVDNTYYKEAEKENLVEQSIPSNACSSLEVEAAISRKTPAQPQRRSLRLSAQKDLEQKEKHHVKMKAKRCATPVIIDEILPSKKMKVSNNKKKPEEEGSAHQDTAEKNASSPEKAKGRHTVPCMPPAKQKFLKSTEEQELEKSMKMQQEVVEMRKKNEEFKKLALAGIGQPVKKSVSQVTKSVDFHFRTDERIKQHPKNQEEYKEVNFTSELRKHPSSPARVTKGCTIVKPFNLSQGKKRTFDETVSTYVPLAQQVEDFHKRTPNRYHLRSKKDDINLLPSKSSVTKICRDPQTPVLQTKHRARAVTCKSTAELEAEELEKLQQYKFKARELDPRILEGGPILPKKPPVKPPTEPIGFDLEIEKRIQERESKKKTEDEHFEFHSRPCPTKILEDVVGVPEKKVLPITVPKSPAFALKNRIRMPTKEDEEEDEPVVIKAQPVPHYGVPFKPQIPEARTVEICPFSFDSRDKERQLQKEKKIKELQKGEVPKFKALPLPHFDTINLPEKKVKNVTQIEPFCLETDRRGALKAQTWKHQLEEELRQQKEAACFKARPNTVISQEPFVPKKEKKSVAEGLSGSLVQEPFQLATEKRAKERQELEKRMAEVEAQKAQQLEEARLQEEEQKKEELARLRRELVHKANPIRKYQGLEIKSSDQPLTVPVSPKFSTRFHC

SEQ ID NO: 4003 - protein, 272 aa, Homo sapiens
MAAKVFESIGKFGLALAVAGGVVNSALYNVDAGHRAVIFDRFRGVQDIVVGEGTHFLIPWVQKPIIFDCRSRPRNVPVITGSKDLQNVNITLRILFRPVASQLPRIFTSIGEDYDERVLPSITTEILKSVVARFDAGELITQRELVSRQVSDDLTERAATFGLILDDVSLTHLTFGKEFTEAVEAKQVAQQEAERARFVVEKAEQQKKAAIISAEGDSKAAELIANSLATAGDGLIELRKLEAAEDIAYQLSRSRNITYLPAGQSVLLQLPQ

SEQ ID NO: 4004 - protein, 119 aa, Homo sapiens
MKLVRFLMKLSHETVTIELKNGTQVHGTITGVDVSMNTHLKAVKMTLKNREPVQLETLSIRGNNIRYFILPDSLPLDTLLVDVEPKVKSKKREAVAGRGRGRGRGRGRGRGRGRGGPRR

SEQ ID NO: 4005 - protein, 723 aa, Homo sapiens
MPLFFRKRKPSEEARKRLEYQMCLAKEAGADDILDISKCELSEIPFGAFATCKVLQKKVLIVHTNHLTSLLPKSCSLLSLATIKVLDLHDNQLTALPDDLGQLTALQVLNVERNQLMQLPRSIGNLTQLQTLNVKDNKLKELPDTVGELRSLRTLNISGNEIQRLPQMLAHVRTLEMLSLDASAMVYPPREVCGAGTAAILQFLCKESGLEYYPPSQYLLPILEQDGIENSRDSPDGPTDRFSREELEWQNRFSDYEKRKEQKMLEKLEFERRLELGQREHTQLLQQSSSQKDEILQTVKEEQSRLEQGLSEHQRHLNAERQRLQEQLKQTEQNISSRIQKLLQDNQRQKKSSEILKSLENERIRMEQLMSITQEETESLRRRDVASAMQQMLTESCKNRLIQMAYESQRQNLVQQACSSMAEMDERFQQILSWQQMDQNKAISQILQESAMQKAAFEALQVKKDLMHRQIRSQIKLIETELLQLTQLELKRKSLDTESLQEMISEQRWALSSLLQQLLKEKQQREEELREILTELEAKSETRQENYWLIQYQRLLNQKPLSLKLQEEGMERQLVALLEELSAEHYLPIFAHHRLSLDLLSQMSPGDLAKVGVSEAGLQHEILRRVQELLDAARIQPELKPPMGEVVTPTAPQEPPESVRPSAPPAELEVQASECVVCLEREAQMIFLNCGHVCCCQQCCQPLRTCPLCRQDIAQRLRIYHSS

SEQ ID NO: 4006 - protein, 615 aa, Homo sapiens
MAVYVGMLRLGRLCAGSSGVLGARAALSRSWQEARLQGVRFLSSREVDRMVSTPIGGLSYVQGCTKKHLNSKTVGQCLETTAQRVPEREALVVLHEDVRLTFAQLKEEVDKAASGLLSIGLCKGDRLGMWGPNSYAWVLMQLATAQAGIILVSVNPAYQAMELEYVLKKVGCKALVFPKQFKTQQYYNVLKQICPEVENAQPGALKSQRLPDLTTVISVDAPLPGTLLLDEVVAAGSTRQHLDQLQYNQQFLSCHDPINIQFTSGTTGSPKGATLSHYNIVNNSNILGERLKLHEKTPEQLRMILPNPLYHCLGSVAGTMMCLMYGATLILASPIFNGKKALEAISRERGTFLYGTPTMFVDILNQPDFSSYDISTMCGGVIAGSPAPPELIRAIINKINMKDLVVAYGTTENSPVTFAHFPEDTVEQKAESVGRIMPHTEARIMNMEAGTLAKLNTPGELCIRGYCVMLGYWGEPQKTEEAVDQDKWYWTGDVATMNEQGFCKIVGRSKDMIIRGGENIYPAELEDFFHTHPKVQEVQVVGVKDDRMGEEICACIRLKDGEETTVEEIKAFCKGKISHFKIPKYIVFVTNYPLTISGKIQKFKLREQMERHLNL

SEQ ID NO: 4007 - protein, 265 aa, Homo sapiens
MATLLRPVLRRLCGLPGLQRPAAEMPLRARSDGAGPLYSHHLPTSPLQKGLLAAGSAAMALYNPYRHDMVAVLGETTGHRTLKVLRDQMRRDPEGAQILQERPRISTSTLDLGKLQSLPEGSLGREYLRFLDVNRVSPDTRAPTRFVDDEELAYVIQRYREVHDMLHTLLGMPTNILGEIVVKWFEAVQTGLPMCILGAFFGPIRLGAQSLQVLVSELIPWAVQNGRRAPCVLNLYYERRWEQSLRALREELGITAPPMHVQGLA

SEQ ID NO: 4008 - protein, 1019 aa, Homo sapiens
MLQGTCSVLLLWGILGAIQAQQQEVISPDTTERNNNCPEKTDCPIHVYFVLDTSESVTMQSPTDILLFHMKQFVPQFISQLQNEFYLDQVALSWRYGGLHFSDQVEVFSPPGSDRASFIKNLQGISSFRRGTFTDCALANMTEQIRQDRSKGTVHFAVVITDGHVTGSPCGGIKLQAERAREEGIRLFAVAPNQNLKEQGLRDIASTPHELYRNDYATMLPDSTEIDQDTINRIIKVMKHEAYGECYKVSCLEIPGPSGPKGYRGQKGAKGNMGEPGEPGQKGRQGDPGIEGPIGFPGPKGVPGFKGEKGEFGADGRKGAPGLAGKNGTDGQKGKLGRIGPPGCKGDPGNRGPDGYPGEAGSPGERGDQGGKGDPGRPGRRGPPGEIGAKGSKGYQGNSGAPGSPGVKGAKGGPGPRGPKGEPGRRGDPGTKGSPGSDGPKGEKGDPGPEGPRGLAGEVGNKGAKGDRGLPGPRGPQGALGEPGKQGSRGDPGDAGPRGDSGQPGPKGDPGRPGFSYPGPRGAPGEKGEPGPRGPEGGRGDFGLKGEPGRKGEKGEPADPGPPGEPGPRGPRGVPGPEGEPGPPGDPGLTECDVMTYVRETCGCCDCEKRCGALDVVFVIDSSESIGYTNFTLEKNFVINVVNRLGAIAKDPKSETGTRVGVVQYSHEGTFEAIQLDDERIDSLSSFKEAVKNLEWIAGGTWTPSALKFAYDRLIKESRRQKTRVFAVVITDGRHDPRDDDLNLRALCDRDVTVTAIGIGDMFHEKHESENLYSIACDKPQQVRNMTLFSDLVAEKFIDDMEDVLCPDPQIVCPDLPCQTELSVAQCTQRPVDIVFLLDGSERLGEQNFHKARRFVEQVARRLTLARRDDDPLNARVALLQFGGPGEQQVAFPLSHNLTAIHEALETTQYLNSFSHVGAGVVHAINAIVRSPRGGARRHAELSFVFLTDGVTGNDSLHESAHSMRKQNVVPTVLALGSDVDMDVLTTLSLGDRAAVFHEKDYDSLAQPGFFDRFIRWIC

SEQ ID NO: 4009 - protein, 304 aa, Homo sapiens
MAGNFDSEERSSWYWGRLSRQEAVALLQGQRHGVFLVRDSSTSPGDYVLSVSENSRVSHYIINSSGPRPPVPPSPAQPPPGVSPSRLRIGDQEFDSLPALLEFYKIHYLDTTTLIEPVSRSRQGSGVILRQEEAEYVRALFDFNGNDEEDLPFKKGDILRIRDKPEEQWWNAEDSEGKRGMIPVPYVEKYRPASASVSALIGGNQEGSHPQPLGGPEPGPYAQPSVNTPLPNLQNGPIYARVIQKRVPNAYDKTALALEVGELVKVTKINVSGQWEGECNGKRGHFPFTHVRLLDQQNPDEDFS

SEQ ID NO: 4010 - protein, 963 aa, Homo sapiens
MPGAGARAEEGGGGGEGAAQGAAAEPGAGPAREPARLCGYLQKLSGKGPLRGYRSRWFVFDARRCYLYYFKSPQDALPLGHLDIADACFSYQGPDEAAEPGTEPPAHFQVHSAGAVTVLKAPNRQLMTYWLQELQQKRWEYCNSLDMVKWDSRTSPTPGDFPKGLVARDNTDLIYPHPNASAEKARNVLAVETVPGELVGEQAANQPAPGHPNSINFYSLKQWGNELKNSMSSFRPGRGHNDSRRTVFYTNEEWELLDPTPKDLEESIVQEEKKKLTPEGNKGVTGSGFPFDFGRNPYKGKRPLKDIIGSYKNRHSSGDPSSEGTSGSGSVSIRKPASEMQLQVQSQQEELEQLKKDLSSQKELVRLLQQTVRSSQYDKYFTSSRLCEGVPKDTLELLHQKDDQILGLTSQLERFSLEKESLQQEVRTLKSKVGELNEQLGMLMETIQAKDEVIIKLSEGEGNGPPPTVAPSSPSVVPVARDQLELDRLKDNLQGYKTQNKFLNKEILELSALRRNAERRERDLMAKYSSLEAKLCQIESKYLILLQEMKTPVCSEDQGPTREVIAQLLEDALQVESQEQPEQAFVKPHLVSEYDIYGFRTVPEDDEEEKLVAKVRALDLKTLYLTENQEVSTGVKWENYFASTVNREMMCSPELKNLIRAGIPHEHRSKVWKWCVDRHTRKFKDNTEPGHFQTLLQKALEKQNPASKQIELDLLRTLPNNKHYSCPTSEGIQKLRNVLLAFSWRNPDIGYCQGLNRLVAVALLYLEQEDAFWCLVTIVEVFMPRDYYTKTLLGSQVDQRVFRDLMSEKLPRLHGHFEQYKVDYTLITFNWFLVVFVDSVVSDILFKIWDSFLYEGPKVIFRFALALFKYKEEEILKLQDSMSIFKYLRYFTRTILDARKLISISFGDLNPFPLRQIRNRRAYHLEKVRLELTELEAIREDFLRERDTSPDKGELVSDEEEDT

SEQ ID NO: 4011 - protein, 259 aa, Homo sapiens
MAACRALKAVLVDLSGTLHIEDAAVPGAQEALKRLRGASVIIRFVTNTTKESKQDLLERLRKLEFDISEDEIFTSLTAARSLLERKQVRPMLLVDDRALPDFKGIQTSDPNAVVMGLAPEHFHYQILNQAFRLLLDGAPLIAIHKARYYKRKDGLALGPGPFVTALEYATDTKATVVGKPEKTFFLEALRGTGCEPEEAVMIGDDCRDDVGGAQDVGMLGILVKTGKYRASDEEKINPPPYLTCESFPHAVDHILQHLL

SEQ ID NO: 4012 - protein, 2671 aa, Homo sapiens
MAADTQVSETLKRFAGKVTTASVKERREILSELGKCVAGKDLPEGAVKGLCKLFCLTLHRYRDAASRRALQAAIQQLAEAQPEATAKNLLHSLQSSGIGSKAGVPSKSSGSAALLALTWTCLLVRIVFPSRAKRQGDIWNKLVEVQCLLLLEVLGGSHKHAVDGAVKKLTKLWKENPGLVEQYLSAILSLEPNQNYAGMLGLLVQFCTSHKEMDVVSQHKSALLDFYMKNILMSKVKPPKYLLDSCAPLLRYLSHSEFKDLILPTIQKSLLRSPENVIETISSLLASVTLDLSQYAMDIVKGLAGHLKSNSPRLMDEAVLALRNLARQCSDSSAMESLTKHLFAILGGSEGKLTVVAQKMSVLSGIGSVSHHVVSGPSSQVLNGIVAELFIPFLQQEVHEGTLVHAVSVLALWCNRFTMEVPKKLTEWFKKAFSLKTSTSAVRHAYLQCMLASYRGDTLLQALDLLPLLIQTVEKAASQSTQVPTITEGVAAALLLLKLSVADSQAEAKLSSFWQLIVDEKKQVFTSEKFLVMASEDALCTVLHLTERLFLDHPHRLTGNKVQQYHRALVAVLLSRTWHVRRQAQQTVRKLLSSLGGFKLAHGLLEELKTVLSSHKVLPLEALVTDAGEVTEAGKAYVPPRVLQEALCVISGVPGLKGDVTDTEQLAQEMLIISHHPSLVAVQSGLWPALLARMKIDPEAFITRHLDQIIPRMTTQSPLNQSSMNAMGSLSVLSPDRVLPQLISTITASVQNPALRLVTREEFAIMQTPAGELYDKSIIQSAQQDSIKKANMKRENKAYSFKEQIIELELKEEIKKKKGIKEEVQLTSKQKEMLQAQLDREAQVRRRLQELDGELEAALGLLDIILAKNPSGLTQYIPVLVDSFLPLLKSPLAAPRIKNPFLSLAACVMPSRLKALGTLVSHVTLRLLKPECVLDKSWCQEELSVAVKRAVMLLHTHTITSRVGKGEPGAAPLSAPAFSLVFPFLKMVLTEMPHHSEEEEEWMAQILQILTVQAQLRASPNTPPGRVDENGPELLPRVAMLRLLTWVIGTGSPRLQVLASDTLTTLCASSSGDDGCAFAEQEEVDVLLCALQSPCASVRETVLRGLMELHMVLPAPDTDEKNGLNLLRRLWVVKFDKEEEIRKLAERLWSMMGLDLQPDLCSLLIDDVIYHEAAVRQAGAEALSQAVARYQRQAAEVMGRLMEIYQEKLYRPPPVLDALGRVISESPPDQWEARCGLALALNKLSQYLDSSQVKPLFQFFVPDALNDRHPDVRKCMLDAALATLNTHGKENVNSLLPVFEEFLKNAPNDASYDAVRQSVVVLMGSLAKHLDKSDPKVKPIVAKLIAALSTPSQQVQESVASCLPPLVPAIKEDAGGMIQRLMQQLLESDKYAERKGAAYGLAGLVKGLGILSLKQQEMMAALTDAIQDKKNFRRREGALFAFEMLCTMLGKLFEPYVVHVLPHLLLCFGDGNQYVREAADDCAKAVMSNLSAHGVKLVLPSLLAALEEESWRTKAGSVELLGAMAYCAPKQLSSCLPNIVPKLTEVLTDSHVKVQKAGQQALRQIGSVIRNPEILAIAPVLLDALTDPSRKTQKCLQTLLDTKFVHFIDAPSLALIMPIVQRAFQDRSTDTRKMAAQIIGNMYSLTDQKDLAPYLPSVTPGLKASLLDPVPEVRTVSAKALGAMVKGMGESCFEDLLPWLMETLTYEQSSVDRSGAAQGLAEVMAGLGVEKLEKLMPEIVATASKVDIAPHVRDGYIMMFNYLPITFGDKFTPYVGPIIPCILKALADENEFVRDTALRAGQRVISMYAETAIALLLPQLEQGLFDDLWRIRFSSVQLLGDLLFHISGVTGKMTTETASEDDNFGTAQSNKAIITALGVERRNRVLAGLYMGRSDTQLVVRQASLHVWKIVVSNTPRTLREILPTLFGLLLGFLASTCADKRTIAARTLGDLVRKLGEKILPEIIPILEEGLRSQKSDERQGVCIGLSEIMKSTSRDAVLYFSESLVPTARKALCDPLEEVREAAAKTFEQLHSTIGHQALEDILPFLLKQLDDEEVSEFALDGLKQVMAIKSRVVLPYLVPKLTTPPVNTRVLAFLSSVAGDALTRHLGVILPAVMLALKEKLGTPDEQLEMANCQAVILSVEDDTGHRIIIEDLLEATRSPEVGMRQAAAIILNIYCSRSKADYTSHLRSLVSGLIRLFNDSSPVVLEESWDALNAITKKLDAGNQLALIEELHKEIRLIGNESKGEHVPGFCLPKKGVTSILPVLREGVLTGSPEQKEEAAKALGLVIRLTSADALRPSVVSITGPLIRILGDRFSWNVKAALLETLSLLLAKVGIALKPFLPQLQTTFTKALQDSNRGVRLKAADALGKLISIHIKVDPLFTELLNGIRAMEDPGVRDTMLQALRFVIQGAGAKVDAVIRKNIVSLLLSMLGHDEDNTRISSAGCLGELCAFLTEEELSAVLQQCLLADVSGIDWMVRHGRSLALSVAVNVAPGRLCAGRYSSDVQEMILSSATADRIPIAVSGVRGMGFLMRHHIETGGGQLPAKLSSLFVKCLQNPSSDIRLVAEKMIWWANKDPLPPLDPQAIKPILKALLDNTKDKNTVVRAYSDQAIVNLLKMRQGEEVFQSLSKILDVASLEVLNEVNRRSLKKLASQADSTEQVDDTILT

SEQ ID NO: 4013 - protein, 703 aa, Homo sapiens
MAASEVAGVVANAPSPPESSSLCASKSDEGLPDGLSTKDSAQKQKNSPLLSVSSQTITKENNRNVHLEHSEQNPGSSAGDTSAAHQVVLGENLIATALCLSGSGSQSDLKDVASTAGEEGDTSLRESLHPVTRSLKAGCHTKQLASRNCSEEKSPQTSILKEGNRDTSLDFRPVVSPANGVEGVRVDQDDDQDSSSLKLSQNIAVQTDFKTADSEVNTDQDIEKNLDKMMTERTLLKERYQEVLDKQRQVENQLQVQLKQLQQRREEEMKNHQEILKAIQDVTIKREETKKKIEKEKKEFLQKEQDLKAEIEKLCEKGRREVWEMELDRLKNQDGEINRNIMEETERAWKAEILSLESRKELLVLKLEEAEKEAELHLTYLKSTPPTLETVRSKQEWETRLNGVRIMKKNVRDQFNSHIQLVRNGAKLSSLPQIPTPTLPPPPSETDFMLQVFQPSPSLAPRMPFSIGQVTMPMVMPSADPRSLSFPILNPALSQPSQPSSPLPGSHGRNSPGLGSLVSPHGPHMPPAASIPPPPGLGGVKASAETPRPQPVDKLEKILEKLLTRFPQCNKAQMTNILQQIKTARTTMAGLTMEELIQLVAARLAEHERVAASTQPLGRIRALFPAPLAQISTPMFLPSAQVSYPGRSSHAPATCKLCLMCQKLVQPSELHPMACTHVLHKECIKFWAQTNTNDTCPFCPTLK

SEQ ID NO: 4014 - protein, 320 aa, Homo sapiens
MAGLAARLVLLAGAAALASGSQGDREPVYRDCVLQCEEQNCSGGALNHFRSRQPIYMSLAGWTCRDDCKYECMWVTVGLYLQEGHKVPQFHGKWPFSRFLFFQEPASAVASFLNGLASLVMLCRYRTFVPASSPMYHTCVAFAWVSLNAWFWSTVFHTRDTDLTEKMDYFCASTVILHSIYLCCVRTVGLQHPAVVSAFRALLLLMLTVHVSYLSLIRFDYGYNLVANVAIGLVNVVWWLAWCLWNQRRLPHVRKCVVVVLLLQGLSLLELLDFPPLFWVLDAHAIWHISTIPVHVLFFSFLEDDSLYLLKESEDKFKLD

SEQ ID NO: 4015 - protein, 1075 aa, Homo sapiens
MTTANCGAHDELDFKLVFGEDGAPAPPPPGSRPADLEPDDCASIYIFNVDPPPSTLTTPLCLPHHGLPSHSSVLSPSFQLQSHKNYEGTCEIPESKYSPLGGPKPFECPSIQITSISPNCHQELDAHEDDLQINDPEREFLERPSRDHLYLPLEPSYRESSLSPSPASSISSRSWFSDASSCESLSHIYDDVDSELNEAAARFTLGSPLTSPGGSPGGCPGEETWHQQYGLGHSLSPRQSPCHSPRSSVTDENWLSPRPASGPSSRPTSPCGKRRHSSAEVCYAGSLSPHHSPVPSPGHSPRGSVTEDTWLNASVHGGSGLGPAVFPFQYCVETDIPLKTRKTSEDQAAILPGKLELCSDDQGSLSPARETSIDDGLGSQYPLKKDSCGDQFLSVPSPFTWSKPKPGHTPIFRTSSLPPLDWPLPAHFGQCELKIEVQPKTHHRAHYETEGSRGAVKASTGGHPVVKLLGYNEKPINLQMFIGTADDRYLRPHAFYQVHRITGKTVATASQEIIIASTKVLEIPLLPENNMSASIDCAGILKLRNSDIELRKGETDIGRKNTRVRLVFRVHIPQPSGKVLSLQIASIPVECSQRSAQELPHIEKYSINSCSVNGGHEMVVTGSNFLPESKIIFLEKGQDGRPQWEVEGKIIREKCQGAHIVLEVPPYHNPAVTAAVQVHFYLCNGKRKKSQSQRFTYTPVLMKQEHREEIDLSSVPSLPVPHPAQTQRPSSDSGCSHDSVLSGQRSLICSIPQTYASMVTSSHLPQLQCRDESVSKEQHMIPSPIVHQPFQVTPTPPVGSSYQPMQTNVVYNGPTCLPINAASSQEFDSVLFQQDATLSGLVNLGCQPLSSIPFHSSNSGSTGHLLAHTPHSVHTLPHLQSMGYHCSNTGQRSLSSPVADQITGQPSSQLQPITYGPSHSGSATTASPAASHPLASSPLSGPPSPQLQPMPYQSPSSGTASSPSPATRMHSGQHSTQAQSTGQGGLSAPSSLICHSLCDPASFPPDGATVSIKPEPEDREPNFATIGLQDITLDDVNEIIGRDMSQISVSQGAGVSRQAPLPSPESLDLGRSDGL

SEQ ID NO: 4016 - protein, 103 aa, Homo sapiens
MAQFVRNLVEKTPALVNAAVTYSKPRLATFWYYAKVELVPPTPAEIPRAIQSLKKIVNSAQTGSFKQLTVKEAVLNGLVATEVLMWFYVGEIIGKRGIIGYDV

SEQ ID NO: 4017 - protein, 171 aa, Homo sapiens
MEHSTFLSGLVLATLLSQVSPFKIPIEELEDRVFVNCNTSITWVEGTVGTLLSDITRLDLGKRILDPRGIYRCNGTDIYKDKESTVQVHYRMCQSCVELDPATVAGIIVTDVIATLLLALGVFCFAGHETGRLSGAADTQALLRNDQVYQPLRDRDDAQYSHLGGNWARNK

SEQ ID NO: 4018 - protein, 525 aa, Homo sapiens
MAAAPPLRDRLSFLHRLPILLKGTSDDDVPCPGYLFEEIAKISHESPGSSQCLLEYLLSRLHSSSGHGKLKVLKILLYLCSHGSSFFLLILKRNSAFIQEAAAFAGPPDPLHGNSLYQKVRAAAQDLGSTLFSDTVLPLAPSQPLGTPPATGMGSQARPHSTLQGFGYSKEHGRTAVRHQPGQAGGGWDELDSGPSSQNSSQNSDLSRVSDSGSHSGSDSHSGASREPGDLAERVEVVALSDCQQELSLVRTVTRGPRAFLSREEAQHFIKACGLLNCEAVLQLLTCHLRGTSECTQLRALCAIASLGSSDLLPQEHILLRTRPWLQELSMGSPGPVTNKATKILRHFEASCGQLSPARGTSAEPGPTAALPGPSDLLTDAVPLPGSQVFLQPLSSTPVSSRSPAPSSGMPSSPVPTPPPDASPIPAPGDPSEAEARLAESRRWRPERIPGGTDSPKRGPSSCAWSRDSLFAGMELVACPRLVGAGAAAGESCPDAPRAPQTSSQRTAAKEPPGSEPSAFAFLNA

SEQ ID NO: 4019 - protein, 307 aa, Homo sapiens
MARLGSTGGVSGRVVTQHRDSAPFLGAPRLGLRELGPIRGTAPEWHGRWNAAERSDKMYQVPLPLDRDGTLVRLRFTMVALVTVCCPLVAFLFCILWSLLFHFKETTATHCGVPNYLPSVSSAIGGEVPQRYVWRFCIGLHSAPRFLVAFAYWNHYLSCTSPCSCYRPLCRLNFGLNVVENLALLVLTYVSSSEDFTIHENAFIVFIASSLGHMLLTCILWRLTKKHTDRKSYSWKQRLFIINFISFFSALAVYFRHNMYCEAGVYTIFAILEYTVVLTNMAFHMTAWWDFGNKELLITSQPEEKRF

SEQ ID NO: 4020 - protein, 685 aa, Homo sapiens
MDVCVRLALWLLWGLLLHQGQSLSHSHSEKATGTSSGANSEESTAAEFCRIDKPLCHSEDEKLSFEAVRNIHKLMDDDANGDVDVEESDEFLREDLNYHDPTVKHSTFHGEDKLISVEDLWKAWKSSEVYNWTVDEVVQWLITYVELPQYEETFRKLQLSGHAMPRLAVTNTTMTGTVLKMTDRSHRQKLQLKALDTVLFGPPLLTRHNHLKDFMLVVSIVIGVGGCWFAYIQNRYSKEHMKKMMKDLEGLHRAEQSLHDLQERLHKAQEEHRTVEVEKVHLEKKLRDEINLAKQEAQRLKELREGTENERSRQKYAEEELEQVREALRKAEKELESHSSWYAPEALQKWLQLTHEVEVQYYNIKKQNAEKQLLVAKEGAEKIKKKRNTLFGTFHVAHSSSLDDVDHKILTAKQALSEVTAALRERLHRWQQIEILCGFQIVNNPGIHSLVAALNIDPSWMGSTRPNPAHFIMTDDVDDMDEEIVSPLSMQSPSLQSSVRQRLTEPQHGLGSQRDLTHSDSESSLHMSDRQRVAPKPPQMSRAADEALNAMTSNGSHRLIEGVHPGSLVEKLPDSPALAKKALLALNHGLDKAHSLMELSPSAPPGGSPHLDSSRSHSPSSPDPDTPSPVGDSRALQASRNTRIPHLAGKKAVAEEDNGSIGEETDSSPGRKKFPLKIFKKPLKK

SEQ ID NO: 4021 - protein, 485 aa, Homo sapiens
MDPTALVEAIVEEVACPICMTFLREPMSIDCGHSFCHSCLSGLWEIPGESQNWGYTCPLCRAPVQPRNLRPNWQLANVVEKVRLLRLHPGMGLKGDLCERHGEKLKMFCKEDVLIMCEACSQSPEHEAHSVVPMEDVAWEYKWELHEALEHLKKEQEEAWKLEVGERKRTATWKIQVETRKQSIVWEFEKYQRLLEKKQPPHRQLGAEVAAALASLQREAAETMQKLELNHSELIQQSQVLWRMIAELKERSQRPVRWMLQDIQEVLNRSKSWSLQQPEPISLELKTDCRVLGLREILKTYAADVRLDPDTAYSRLIVSEDRKRVHYGDTNQKLPDNPERFYRYNIVLGSQCISSGRHYWEVEVGDRSEWGLGVCKQNVDRKEVVYLSPHYGFWVIRLRKGNEYRAGTDEYPILSLPVPPRRVGIFVDYEAHDISFYNVTDCGSHIFTFPRYPFPGRLLPYFSPCYSIGTNNTAPLAICSLDGED

SEQ ID NO: 4022 - protein, 261 aa, Homo sapiens
MQLVILRVTIFLPWCFAVPVPPAADHKGWDFVEGYFHQFFLTKKESPLLTQETQTQLLQQFHRNGTDLLDMQMHALLHQPHCGVPDGSDTSISPGRCKWNKHTLTYRIINYPHDMKPSAVKDSIYNAVSIWSNVTPLIFQQVQNGDADIKVSFWQWAHEDGWPFDGPGGILGHAFLPNSGNPGVVHFDKNEHWSASDTGYNLFLVATHEIGHSLGLQHSGNQSSIMYPTYWYHDPRTFQLSADDIQRIQHLYGEKCSSDIP

SEQ ID NO: 4023 - protein, 309 aa, Homo sapiens
MEQLLRAELRTATLRAFGGPGAGCISEGRAYDTDAGPVFVKVNRRTQARQMFEGEVASLEALRSTGLVRVPRPMKVIDLPGGGAAFVMEHLKMKSLSSQASKLGEQMADLHLYNQKLREKLKEEENTVGRRGEGAEPQYVDKFGFHTVTCCGFIPQVNEWQDDWPTFFARHRLQAQLDLIEKDYADREARELWSRLQVKIPDLFCGLEIVPALLHGDLWSGNVAEDDVGPIIYDPASFYGHSEFELAIALMFGGFPRSFFTAYHRKIPKAPGFDQRLLLYQLFNYLNHWNHFGREYRSPSLGTMRRLLK

SEQ ID NO: 4024 - protein, 188 aa, Homo sapiens
MTETREPAETGGYASLEEDDEDLSPGPEHSSDSEYTLSEPDSEEEEDEEEEEEETTDDPEYDPGYKVKQRLGGGRGGPSRRAPRAAQPPAQPCQLCGRSPLGEAPPGTPPCRLCCPATAPQEAPAPEGRALGEEEEEPPRAGEGRPAGREEEEEEEEEGTYHCTECEDSFDNLGELHGHFMLHARGEV

SEQ ID NO: 4025 - protein, 94 aa, Homo sapiens
MNMFKEAVTFKDVAVAFTEEELGLLGPAQRKLYRDVMVENFRNLLSVGHPPFKQDVSPIERNEQLWIMTTATRRQGNLDTLLVKALLLYDLAQT

SEQ ID NO: 4026 - protein, 585 aa, Homo sapiens
MDLPGDSSPPGQPRLCRQPLTRALWGARSPKRPRLQLPGAPSPLEKASRRVLAVVLEDVMAVHMVPVVPSKQTSIPQHHSYHQDPVHRQPPASPPRQAGWSSQARPPDPLCLCREPLSRIHRTSSTLRRRSRTTPGPEEGPSQKVDRAPQPTLVVMLEDIASPRPPAEGFIDETPNFIIPAQRAEPMRIVRQPTPPPGDLEPPFQPSALPADPLESPPTAPDPALELPSTPPPSSLLRPRLSPWGLAPLFRSVRSKLESFADIFLTPNKTPQPPPPSPPMKLELKIAISEAEQSGAAEGTASVSPRPPIRQWRTQDHNTPALLPKPSLGRSYSCPDLGPPGPGTCTWPPAPPQPSRPRPRRHTVGGGEMARAPPPPRPCLRKEVFPLGGVGASPSLTTSCSSTASTSFSEPAEPRLGSTKGKEPRASKDQVLSEPETKTMGKVSRFRIRRTPARPQLNLTPMGLPRPIRLNKKEFSLEEIYTNKNYQSPTTRRTFETIFEEPRERNGTLIFTSSRKLRRAVEFRDSSLPRSRRPSRGVRAAGGRTVPPNVAPSPDVGPLLQQRLEELDALLLEEETVDREQPHWT

SEQ ID NO: 4027 - protein, 297 aa, Homo sapiens
MDPGKDKEGVPQPSGPPARKKFVIPLDEDEVPPGVAKPLFRSTQSLPTVDTSAQAAPQTYAEYAISQPLEGAGATCPTGSEPLAGETPNQALKPGAKSNSIIVSPRQRGNPVLKFVRNVPWEFGDVIPDYVLGQSTCALFLSLRYHNLHPDYIHGRLQSLGKNFALRVLLVQVDVKDPQQALKELAKMCILADCTLILAWSPEEAGRYLETYKAYEQKPADLLMEKLEQDFVSRVTECLTTVKSVNKTDSQTLLTTFGSLEQLIAASREDLALCPGLGPQKARRLFDVLHEPFLKVP

SEQ ID NO: 4028 - protein, 743 aa, Homo sapiens
MGLLTFRDVAVEFSLEEWEHLEPAQKNLYQDVMLENYRNLVSLGLVVSKPDLITFLEQRKEPWNVKSEETVAIQPDVFSHYNKDLLTEHCTEASFQKVISRRHGSCDLENLHLRKRWKREECEGHNGCYDEKTFKYDQFDESSVESLFHQQILSSCAKSYNFDQYRKVFTHSSLLNQQEEIDIWGKHHIYDKTSVLFRQVSTLNSYRNVFIGEKNYHCNNSEKTLNQSSSPKNHQENYFLEKQYKCKEFEEVFLQSMHGQEKQEQSYKCNKCVEVCTQSLKHIQHQTIHIRENSYSYNKYDKDLSQSSNLRKQIIHNEEKPYKCEKCGDSLNHSLHLTQHQIIPTEEKPCKWKECGKVFNLNCSLYLTKQQQIDTGENLYKCKACSKSFTRSSNLIVHQRIHTGEKPYKCKECGKAFRCSSYLTKHKRIHTGEKPYKCKECGKAFNRSSCLTQHQTTHTGEKLYKCKVCSKSYARSSNLIMHQRVHTGEKPYKCKECGKVFSRSSCLTQHRKIHTGENLYKCKVCAKPFTCFSNLIVHERIHTGEKPYKCKECGKAFPYSSHLIRHHRIHTGEKPYKCKACSKSFSDSSGLTVHRRTHTGEKPYTCKECGKAFSYSSDVIQHRRIHTGQRPYKCEECGKAFNYRSYLTTHQRSHTGERPYKCEECGKAFNSRSYLTTHRRRHTGERPYKCDECGKAFSYRSYLTTHRRSHSGERPYKCEECGKAFNSRSYLIAHQRSHTREKL

SEQ ID NO: 4029 - protein, 312 aa, Homo sapiens
MRMLLALLALSAARPSASAESHWCYEVQAESSNYPCLVPVKWGGNCQKDRQSPINIVTTKAKVDKKLGRFFFSGYDKKQTWTVQNNGHSVMMLLENKASISGGGLPAPYQAKQLHLHWSDLPYKGSEHSLDGEHFAMEMHIVHEKEKGTSRNVKEAQDPEDEIAVLAFLVEAGTQVNEGFQPLVEALSNIPKPEMSTTMAESSLLDLLPKEEKLRHYFRYLGSLTTPTCDEKVVWTVFREPIQLHREQILAFSQKLYYDKEQTVSMKDNVRPLQQLGQRTVIKSGAPGRPLPWALPALLGPMLACLLAGFLR

SEQ ID NO: 4030 - protein, 991 aa, Homo sapiens
MAGPVSLRDLLMGASAWMGSESPGGSPTEGGGSAAGGPEPPWREDEICVVGIFGKTALRLNSEKFSLVNTVCDRQVFPLFRHQDPGDPGPGIRTEAGAVGEAGGAEDPGAAAGGSVRGSGAVAEGNRTEAGSQDYSLLQAYYSQESKVLYLLLTSICDNSQLLRACRALQSGEAGGGLSLPHAEAHEFWKHQEKLQCLSLLYLFSVCHILLLVHPTCSFDITYDRVFRALDGLRQKVLPLLKTAIKDCPVGKDWKLNCRPCPPRLLFLFQLNGALKVEPPRNQDPAHPDKPKKHSPKRRLQHALEDQIYRIFRKSRVLTNQSINCLFTVPANQAFVYIVPGSQEEDPVGMLLDQLRSHCTVKDPESLLVPAPLSGPRRYQVMRQHSRQQLSFHIDSSSSSSSGQLVDFTLREFLWQHVELVLSKKGFDDSVGRNPQPSHFELPTYQKWISAASKLYEVAIDGKEEDLGSPTGELTSKILSSIKVLEGFLDIDTKFSENRCQKALPMAHSAYQSNLPHNYTMTVHKNQLAQALRVYSQHARGPAFHKYAMQLHEDCYKFWSNGHQLCEERSLTDQHCVHKFHSLPKSGEKPEADRNPPVLYHNSRARSTGACNCGRKQAPRDDPFDIKAANYDFYQLLEEKCCGKLDHINFPVFEPSTPDPAPAKNESSPAPPDSDADKLKEKEPQTQGESTSLSLALSLGQSTDSLGTYPADPQAGGDNPEVHGQVEVKTEKRPNFVDRQASTVEYLPGMLHSNCPKGLLPKFSSWSLVKLGPAKSYNFHTGLDQQGFIPGTNYLMPWDIVIRTRAEDEGDLDTNSWPAPNKAIPGKRSAVVMGRGRRRDDIARAFVGFEYEDSRGRRFMCSGPDKVMKVMGSGPKESALKALNSDMPLYILSSSQGRGLKPHYAQLMRLFVVVPDAPLQIILMPQVQPGPPPCPVFYPEKQEITLPPDGLWVLRFPYAYVTERGPCFPPKENVQLMSYKVLRGVLKAVTQ

SEQ ID NO: 4031 - protein, 207 aa, Homo sapiens
MAKTYDYLFKLLLIGDSGVGKTCVLFRFSEDAFNSTFISTIGIDFKIRTIELDGKRIKLQIWDTAGQERFRTITTAYYRGAMGIMLVYDITNEKSFDNIRNWIRNIEEHASADVEKMILGNKCDVNDKRQVSKERGEKLALDYGIKFMETSAKANINVENAFFTLARDIKAKMDKKLEGNSPQGSNQGVKITPDQQKRSSFFRCVLL

SEQ ID NO: 4032 - protein, 755 aa, Homo sapiens
MRPAPIALWLRLVLALALVRPRAVGWAPVRAPIYVSSWAVQVSQGNREVERLARKFGFVNLGPIFPDGQYFHLRHRGVVQQSLTPHWGHRLHLKKNPKVQWFQQQTLQRRVKRSVVVPTDPWFSKQWYMNSEAQPDLSILQAWSQGLSGQGIVVSVLDDGIEKDHPDLWANYDPLASYDFNDYDPDPQPRYTPSKENRHGTRCAGEVAAMANNGFCGVGVAFNARIGGVRMLDGTITDVIEAQSLSLQPQHIHIYSASWGPEDDGRTVDGPGILTREAFRRGVTKGRGGLGTLFIWASGNGGLHYDNCNCDGYTNSIHTLSVGSTTQQGRVPWYSEACASTLTTTYSSGVATDPQIVTTDLHHGCTDQHTGTSASAPLAAGMIALALEANPFLTWRDMQHLVVRASKPAHLQAEDWRTNGVGRQVSHHYGYGLLDAGLLVDTARTWLPTQPQRKCAVRVQSRPTPILPLIYIRENVSACAGLHNSIRSLEHVQAQLTLSYSRRGDLEISLTSPMGTRSTLVAIRPLDVSTEGYNNWVFMSTHFWDENPQGVWTLGLENKGYYFNTGTLYRYTLLLYGTAEDMTARPTGPQVTSSACVQRDTEGLCQACDGPAYILGQLCLAYCPPRFFNHTRLVTAGPGHTAAPALRVCSSCHASCYTCRGGSPRDCTSCPPSSTLDQQQGSCMGPTTPDSRPRLRAAACPHHRCPASAMVLSLLAVTLGGPVLCGMSMDLPLYAWLSRARATPTKPQVWLPAGT

SEQ ID NO: 4033 - protein, 615 aa, Homo sapiens
MAESGGSSGGAGGGGAFGAGPGPERPNSTADKNGALKCTFSAPSHSTSLLQGLATLRAQGQLLDVVLTINREAFPAHKVVLAACSDYFRAMFTGGMREASQDVIELKGVSARGLRHIIDFAYSAEVTLDLDCVQDVLGAAVFLQMLPVVELCEEFLKAAMSVETCLNIGQMATTFSLASLRESVDAFTFRHFLQIAEEEDFLRLPLERLVFFLQSNRLQSCAEIDLFRAAVRWLQHDPARRPRASHVLCHIRFPLMQSSELVDSVQTLDIMVEDVLCRQYLLEAFNYQVLPFRQHEMQSPRTAVRSDVPSLVTFGGTPYTDSDRSVSSKVYQLPEPGARHFRELTEMEVGCSHTCVAVLDNFVYVAGGQHLQYRSGEGAVDACYRYDPHLNRWLRLQAMQESRIQFQLNVLCGMVYATGGRNRAGSLASVERYCPRRNEWGYACSLKRRTWGHAGAASGGRLYISGGYGISVEDKKALHCYDPVADQWEFKAPMSEPRVLHAMVGAGGRIYALGGRMDHVDRCFDVLAVEYYVPETDQWTSVSPMRAGQSEAGCCLLERKIYIVGGYNWRLNNVTGIVQVYNTDTDEWERDLHFPESFAGIACAPVLLPRAGTRR

SEQ ID NO: 4034 - protein, 953 aa, Homo sapiens
MDVAESPERDPHSPEDEEQPQGLSDDDILRDSGSDQDLDGAGVRASDLEDEESAARGPSQEEEDNHSDEEDRASEPKSQDQDSEVNELSRGPTSSPCEEEGDEGEEDRTSDLRDEASSVTRELDEHELDYDEEVPEEPAPAVQEDEAEKAGAEDDEEKGEGTPREEGKAGVQSVGEKESLEAAKEKKKEDDDGEIDDGEIDDDDLEEGEVKDPSDRKVRPRPTCRFFMKGNCTWGMNCRFIHPGVNDKGNYSLITKADPFPPNGAPPLGPHPLMPANPWGGPVVDEILPPPPPEPPTESAWERGLRHAKEVLKKATIRKEQEPDFEEKRFTVTIGEDEREFDKENEVFRDWNSRIPRDVRDTVLEPYADPYYDYEIERFWRGGQYENFRVQYTETEPYHNYRERERERERENRQRERERERERDRERERRQRERERERERERDKERQRRKEEWERERAKRDEKDRQHRDRDREKEREKEKGKPKPRSPQPPSRQAEPPKKEAATTGPQVKRADEWKDPWRRSKSPKKKLGVSVSPSRARRRRKTSASSASASNSSRSSSRSSSYSGSGSSRSRSRSSSYSSYSSRSSRHSSFSGSRSRSRSFSSSPSPSPTPSPHRPSIRTKGEPAPPPGKAGEKSVKKPAPPPAPPQATKTTAPVPEPTKPGDPREARRKERPARTPPRRRTLSGSGSGSGSSYSGSSSRSRSLSVSSVSSVSSATSSSSSAHSVDSEDMYADLASPVSSASSRSPAPAQTRKEKGKSKKEDGVKEEKRKRDSSTQPPKSAKPPAGGKSSQQPSTPQQAPPGQPQQGTFVAHKEIKLTLLNKAADKGSRKRYEPSDKDRQSPPPAKRPNTSPDRGSRDRKSGGRLGSPKPERQRGQNSKAPAAPADRKRQLSPQSKSSSKVTSVPGKASDPGAASTKSGKASTLSRREELLKQLKAVEDAIARKRAKIPGKA

SEQ ID NO: 4035 - protein, 400 aa, Homo sapiens
MASEKPLAAVTCTAPVNIAVIKYWGKRDEELVLPINSSLSVTLHQDQLKTTTTAVISKDFTEDRIWLNGREEDVGQPRLQACLREIRCLARKRRNSRDGDPLPSSLSCKVHVASVNNFPTAAGLASSAAGYACLAYTLARVYGVESDLSEVARRGSGSACRSLYGGFVEWQMGEQADGKDSIARQVAPESHWPELRVLILVVSAEKKLTGSTVGMRASVETSPLLRFRAESVVPARMAEMARCIRERDFPSFAQLTMKDSNQFHATCLDTFPPISYLNAISWRIIHLVHRFNAHHGDTKVAYTFDAGPNAVIFTLDDTVAEFVAAVWHGFPPGSNGDTFLKGLQVRPAPLSAELQAALAMEPTPGGVKYIIVTQVGPGPQILDDPCAHLLGPDGLPKPAA

SEQ ID NO: 4036 - protein, 2521 aa, Homo sapiens
MEPHVLGAVLYWLLLPCALLAACLLRFSGLSLVYLLFLLLLPWFPGPTRCGLQGHTGRLLRALLGLSLLFLVAHLALQICLHIVPRLDQLLGPSCSRWETLSRHIGVTRLDLKDIPNAIRLVAPDLGILVVSSVCLGICGRLARNTRQSPHPRELDDDERDVDASPTAGLQEAATLAPTRRSRLAARFRVTAHWLLVAAGRVLAVTLLALAGIAHPSALSSVYLLLFLALCTWWACHFPISTRGFSRLCVAVGCFGAGHLICLYCYQMPLAQALLPPAGIWARVLGLKDFVGPTNCSSPHALVLNTGLDWPVYASPGVLLLLCYATASLRKLRAYRPSGQRKEAAKGYEARELELAELDQWPQERESDQHVVPTAPDTEADNCIVHELTGQSSVLRRPVRPKRAEPREASPLHSLGHLIMDQSYVCALIAMMVWSITYHSWLTFVLLLWACLIWTVRSRHQLAMLCSPCILLYGMTLCCLRYVWAMDLRPELPTTLGPVSLRQLGLEHTRYPCLDLGAMLLYTLTFWLLLRQFVKEKLLKWAESPAALTEVTVADTEPTRTQTLLQSLGELVKGVYAKYWIYVCAGMFIVVSFAGRLVVYKIVYMFLFLLCLTLFQVYYSLWRKLLKAFWWLVVAYTMLVLIAVYTFQFQDFPAYWRNLTGFTDEQLGDLGLEQFSVSELFSSILVPGFFLLACILQLHYFHRPFMQLTDMEHVSLPGTRLPRWAHRQDAVSGTPLLREEQQEHQQQQQEEEEEEEDSRDEGLGVATPHQATQVPEGAAKWGLVAERLLELAAGFSDVLSRVQVFLRRLLELHVFKLVALYTVWVALKEVSVMNLLLVVLWAFALPYPRFRPMASCLSTVWTCVIIVCKMLYQLKVVNPQEYSSNCTEPFPNSTNLLPTEISQSLLYRGPVDPANWFGVRKGFPNLGYIQNHLQVLLLLVFEAIVYRRQEHYRRQHQLAPLPAQAVFASGTRQQLDQDLLGCLKYFINFFFYKFGLEICFLMAVNVIGQRMNFLVTLHGCWLVAILTRRHRQAIARLWPNYCLFLALFLLYQYLLCLGMPPALCIDYPWRWSRAVPMNSALIKWLYLPDFFRAPNSTNLISDFLLLLCASQQWQVFSAERTEEWQRMAGVNTDRLEPLRGEPNPVPNFIHCRSYLDMLKVAVFRYLFWLVLVVVFVTGATRISIFGLGYLLACFYLLLFGTALLQRDTRARLVLWDCLILYNVTVIISKNMLSLLACVFVEQMQTGFCWVIQLFSLVCTVKGYYDPKEMMDRDQDCLLPVEEAGIIWDSVCFFFLLLQRRVFLSHYYLHVRADLQATALLASRGFALYNAANLKSIDFHRRIEEKSLAQLKRQMERIRAKQEKHRQGRVDRSRPQDTLGPKDPGLEPGPDSPGGSSPPRRQWWRPWLDHATVIHSGDYFLFESDSEEEEEAVPEDPRPSAQSAFQLAYQAWVTNAQAVLRRRQQEQEQARQEQAGQLPTGGGPSQEVEPAEGPEEAAAGRSHVVQRVLSTAQFLWMLGQALVDELTRWLQEFTRHHGTMSDVLRAERYLLTQELLQGGEVHRGVLDQLYTSQAEATLPGPTEAPNAPSTVSSGLGAEEPLSSMTDDMGSPLSTGYHTRSGSEEAVTDPGEREAGASLYQGLMRTASELLLDRRLRIPELEEAELFAEGQGRALRLLRAVYQCVAAHSELLCYFIIILNHMVTASAGSLVLPVLVFLWAMLSIPRPSKRFWMTAIVFTEIAVVVKYLFQFGFFPWNSHVVLRRYENKPYFPPRILGLEKTDGYIKYDLVQLMALFFHRSQLLCYGLWDHEEDSPSKEHDKSGEEEQGAEEGPGVPAATTEDHIQVEARVGPTDGTPEPQVELRPRDTRRISLRFRRRKKEGPARKGAAAIEAEDREEEEGEEEKEAPTGREKRPSRSGGRVRAAGRRLQGFCLSLAQGTYRPLRRFFHDILHTKYRAATDVYALMFLADVVDFIIIIFGFWAFGKHSAATDITSSLSDDQVPEAFLVMLLIQFSTMVVDRALYLRKTVLGKLAFQVALVLAIHLWMFFILPAVTERMFNQNVVAQLWYFVKCIYFALSAYQIRCGYPTRILGNFLTKKYNHLNLFLFQGFRLVPFLVELRAVMDWVWTDTTLSLSSWMCVEDIYANIFIIKCSRETEKKYPQPKGQKKKKIVKYGMGGLIILFLIAIIWFPLLFMSLVRSVVGVVNQPIDVTVTLKLGGYEPLFTMSAQQPSIIPFTAQAYEELSRQFDPQPLAMQFISQYSPEDIVTAQIEGSSGALWRISPPSRAQMKRELYNGTADITLRFTWNFQRDLAKGGTVEYANEKHMLALAPNSTARRQLASLLEGTSDQSVVIPNLFPKYIRAPNGPEANPVKQLQPNEEADYLGVRIQLRREQGAGATGFLEWWVIELQECRTDCNLLPMVIFSDKVSPPSLGFLAGYGIMGLYVSIVLVIGKFVRGFFSEISHSIMFEELPCVDRILKLCQDIFLVRETRELELEEELYAKLIFLYRSPETMIKWTREKE

SEQ ID NO: 4037 - protein, 546 aa, Homo sapiens
MEQRRVTDFFARRRPGPPRIAPPKLACRTPSPARPALRAPASATSGSRKRARPPAAPGRDQARPPARRRLRLSVDEVSSPSTPEAPDIPACPSPGQKIKKSTPAAGQPPHLTSAQDQDTISELASCLQRARELGARVRALKASAQDAGESCTPEAEGRPEEPCGEKAPAYQRFHALAQPGLPGLVLPYKYQVLAEMFRSMDTIVGMLHNRSETPTFAKVQRGVQDMMRRRFEECNVGQIKTVYPASYRFRQERSVPTFKDGTRRSDYQLTIEPLLEQEADGAAPQLTASRLLQRRQIFSQKLVEHVKEHHKAFLASLSPAMVVPEDQLTRWHPRFNVDEVPDIEPAALPQPPATEKLTTAQEVLARARNLISPRMEKALSQLALRSAAPSSPGSPRPALPATPPATPPAASPSALKGVSQDLLERIRAKEAQKQLAQMTRCPEQEQRLQRLERLPELARVLRSVFVSERKPALSMEVACARMVGSCCTIMSPGEMEKHLLLLSELLPDWLSLHRIRTDTYVKLDKAADLAHITARLAHQTRAEEGL

SEQ ID NO: 4038 - protein, 140 aa, Homo sapiens
MAVCIAVIAKENYPLYIRSTPTENELKFHYMVHTSLDVVDEKISAMGKALVDQRELYLGLLYPTEDYKVYGYVTNSKVKFVMVVDSSNTALRDNEIRSMFRKLHNSYTDVMCNPFYNPGDRIQSSRAFDNMVTSMMIQVC

SEQ ID NO: 4039 - protein, 2663 aa, Homo sapiens
MPKGGCPKAPQQEELPLSSDMVEKQTGKKDKDKVSLTKTPKLERGDGGKEVRERASKRKLPFTAGANGEQKDSDTEKQGPERKRIKKEPVTRKAGLLFGMGLSGIRAGYPLSERQQVALLMQMTAEESANSPVDTTPKHPSQSTVCQKGTPNSASKTKDKVNKRNERGETRLHRAAIRGDARRIKELISEGADVNVKDFAGWTALHEACNRGYYDVAKQLLAAGAEVNTKGLDDDTPLHDAANNGHYKVVKLLLRYGGNPQQSNRKGETPLKVANSPTMVNLLLGKGTYTSSEESSTESSEEEDAPSFAPSSSVDGNNTDSEFEKGLKHKAKNPEPQKATAPVKDEYEFDEDDEQDRVPPVDDKHLLKKDYRKETKSNSFISIPKMEVKSYTKNNTIAPKKASHRILSDTSDEEDASVTVGTGEKLRLSAHTILPGSKTREPSNAKQQKEKNKVKKKRKKETKGREVRFGKRSDKFCSSESESESSESGEDDRDSLGSSGCLKGSPLVLKDPSLFSSLSASSTSSHGSSAAQKQNPSHTDQHTKHWRTDNWKTISSPAWSEVSSLSDSTRTRLTSESDYSSEGSSVESLKPVRKRQEHRKRASLSEKKSPFLSSAEGAVPKLDKEGKVVKKHKTKHKHKNKEKGQCSISQELKLKSFTYEYEDSKQKSDKAILLENDLSTENKLKVLKHDRDHFKKEEKLSKMKLEEKEWLFKDEKSLKRIKDTNKDISRSFREEKDRSNKAEKERSLKEKSPKEEKLRLYKEERKKKSKDRPSKLEKKNDLKEDKISKEKEKIFKEDKEKLKKEKVYREDSAFDEYCNKNQFLENEDTKFSLSDDQRDRWFSDLSDSSFDFKGEDSWDSPVTDYRDMKSDSVAKLILETVKEDSKERRRDSRAREKRDYREPFFRKKDRDYLDKNSEKRKEQTEKHKSVPGYLSEKDKKRRESAEAGRDRKDALESCKERRDGRAKPEEAHREELKECGCESGFKDKSDGDFGKGLEPWERHHPAREKEKKDGPDKERKEKTKPERYKEKSSDKDKSEKSILEKCQKDKEFDKCFKEKKDTKEKHKDTHGKDKERKASLDQGKEKKEKAFPGIISEDFSEKKDDKKGKEKSWYIADIFTDESEDDRDSCMGSGFKMGEASDLPRTDGLQEKEEGREAYASDRHRKSSDKQHPERQKDKEPRDRRKDRGAADAGRDKKEKVFEKHKEKKDKESTEKYKDRKDRASVDSTQDKKNKQKLPEKAEKKHAAEDKAKSKHKEKSDKEHSKERKSSRSADAEKSLLEKLEEEALHEYREDSNDKISEVSSDSFTDRGQEPGLTAFLEVSFTEPPGDDKPRESACLPEKLKEKERHRHSSSSSKKSHDRERAKKEKAEKKEKGEDYKEGGSRKDSGQYEKDFLEADAYGVSYNMKADIEDELDKTIELFSTEKKDKNDSEREPSKKIEKELKPYGSSAINILKEKKKREKHREKWRDEKERHRDRHADGLLRHHRDELLRHHRDEQKPATRDKDSPPRVLKDKSRDEGPRLGDAKLKEKFKDGAEKEKGDPVKMSNGNDKVAPSKDPGKKDARPREKLLGDGDLMMTSFERMLSQKDLEIEERHKRHKERMKQMEKLRHRSGDPKLKEKAKPADDGRKKGLDIPAKKPPGLDPPFKDKKLKESTPIPPAAENKLHPASGADSKDWLAGPHMKEVLPASPRPDQSRPTGVPTPTSVLSCPSYEEVMHTPRTPSCSADDYADLVFDCADSQHSTPVPTAPTSACSPSFFDRFSVASSGLSENASQAPARPLSTNLYRSVSVDIRRTPEEEFSVGDKLFRQQSVPAASSYDSPMPPSMEDRAPLPPVPAEKFACLSPGYYSPDYGLPSPKVDALHCPPAAVVTVTPSPEGVFSSLQAKPSPSPRAELLVPSLEGALPPDLDTSEDQQATAAIIPPEPSYLEPLDEGPFSAVITEEPVEWAHPSEQALASSLIGGTSENPVSWPVGSDLLLKSPQRFPESPKRFCPADPLHSAAPGPFSASEAPYPAPPASPAPYALPVAEPGLEDVKDGVDAVPAAISTSEAAPYAPPSGLESFFSNCKSLPEAPLDVAPEPACVAAVAQVEALGPLENSFLDGSRGLSHLGQVEPVPWADAFAGPEDDLDLGPFSLPELPLQTKDAADGEAEPVEESLAPPEEMPPGAPGVINGGDVSTVVAEEPPALPPDQASTRLPAELEPEPSGEPKLDVALEAAVEAETVPEERARGDPDSSVEPAPVPPEQRPLGSGDQGAEAEGPPAASLCAPDGPAPNTVAQAQAADGAGPEDDTEASRAAAPAEGPPGGIQPEAAEPKPTAEAPKAPRVEEIPQRMTRNRAQMLANQSKQGPPPSEKECAPTPAPVTRAKARGSEDDDAQAQHPRKRRFQRSTQQLQQQLNTSTQQTREVIQQTLAAIVDAIKLDAIEPYHSDRANPYFEYLQIRKKIEEKRKILCCITPQAPQCYAEYVTYTGSYLLDGKPLSKLHIPVIAPPPSLAEPLKELFRQQEAVRGKLRLQHSIEREKLIVSCEQEILRVHCRAARTIANQAVPFSACTMLLDSEVYNMPLESQGDENKSVRDRFNARQFISWLQDVDDKYDRMKTCLLMRQQHEAAALNAVQRMEWQLKVQELDPAGHKSLCVNEVPSFYVPMVDVNDDFVLLPA

SEQ ID NO: 4040 - protein, 220 aa, Homo sapiens
MKVKKGGGGAGTATESAPGPSGQSVAPIPQPPAESESGSESEPDAGPGPRPGPLQRKQPIGPEDVLGLQRITGDYLCSPEENIYKIDFVRFKIRDMDSGTVLFEIKKPPVSERLPINRRDLDPNAGRFVRYQFTPAFLRLRQVGATVEFTVGDKPVNNFRMIERHYFRNQLLKSFDFHFGFCIPSSKNTCEHIYDFPPLSEELSARAGSSGSGEVGASRD

SEQ ID NO: 4041 - protein, 438 aa, Homo sapiens
MQAEDRSQFGSAAEMLSEQTAALGTGWESMNVQLDGAEPQVERGSQEERPWRTVPGPLEHLCCDLEEEPQSLQEKAQSAPWVPAIPQEGNTGDWEMAAALLAAGSQGLVTIKDVSLCFSQEEWRSLDPSQTDFYGEYVMQENCGIVVSLRFPIPKLDMLSQLEGGEEQWVPDPQDLEERDILRVTYTGDGSEHEGDTPELEAEPPRMLSSVSEDTVLWNPEHDESWDSMPSSSRGMLLGPPFLQEDSFSNLLCSTEMDSLLRPHTCPQCGKQFVWGSHLARHQQTHTGERPYSCLKCEKTFGRRHHLIRHQKTHLHDKTSRCSECGKNFRCNSHLASHQRVHAEGKSCKGQEVGESPGTRKRQRAPPVPKCHVCTECGKSFGRRHHLVRHWLTHTGEKPFQCPRCEKSFGRKHHLDRHLLTHQGQSPRNSWDRGTSVF

SEQ ID NO: 4042 - protein, 142 aa, Homo sapiens
MRFFVPLFLVGILFPAILAKQFTKCELSQLLKDIDGYGGIALPELICTMFHTSGYDTQAIVENNESTEYGLFQISNKLWCKSSQVPQSRNICDISCDKFLDDDITDDIMCAKKILDIKGIDYWLAHKALCTEKLEQWLCEKL

SEQ ID NO: 4043 - protein, 393 aa, Homo sapiens
MAPPPPSPQLLLLAALARLLGPSEVMAGPAEEAGAHCPESLWPLPPQVSPRVTYTRVSPGQAEDVTFLYHPCAHPWLKLQLALLAYACMANPSLTPDFSLTQDRPLVLTAWGLALEMAWVEPAWAAHWLMRRRRRKQRKKKAWIYCESLSGPAPSEPTPGRGRLCRRGCVQALALAFALRSWRPPGTEVTSQGPRQPSSSGAKRRRLRAALGPQPTRSALRFPSASPGSLKAKQSMAGIPGRESNAPSVPTVSLLPGAPGGNASSRTEAQVPNGQGSPGGCVCSSQASPAPRAAAPPRAARGPTPRTEEAAWAAMALTFLLVLLTLATLCTRLHRNFRRGESIYWGPTADSQDTVAAVLKRRLLQPSRRVKRSRRRPLLPPTPDSGPEGESSE

SEQ ID NO: 4044 - protein, 389 aa, Homo sapiens
MLEEPRPRPPPSGLAGLLFLALCSRALSNEILGLKLPGEPPLTANTVCLTLSGLSKRQLGLCLRNPDVTASALQGLHIAVHECQHQLRDQRWNCSALEGGGRLPHHSAILKRGFRESAFSFSMLAAGVMHAVATACSLGKLVSCGCGWKGSGEQDRLRAKLLQLQALSRGKSFPHSLPSPGPGSSPSPGPQDTWEWGGCNHDMDFGEKFSRDFLDSREAPRDIQARMRIHNNRVGRQVVTENLKRKCKCHGTSGSCQFKTCWRAAPEFRAVGAALRERLGRAIFIDTHNRNSGAFQPRLRPRRLSGELVYFEKSPDFCERDPTMGSPGTRGRACNKTSRLLDGCGSLCCGRGHNVLRQTRVERCHCRFHWCCYVLCDECKVTEWVNVCK

SEQ ID NO: 4045 - protein, 451 aa, Homo sapiens
MRECISIHVGQAGVQIGNACWELYCLEHGIQPDGQMPSDKTIGGGDDSFNTFFSETGAGKHVPRAVFVDLEPTVIDEVRTGTYRQLFHPEQLITGKEDAANNYARGHYTIGKEIIDLVLDRIRKLADQCTGLQGFLVFHSFGGGTGSGFTSLLMERLSVDYGKKSKLEFSIYPAPQVSTAVVEPYNSILTTHTTLEHSDCAFMVDNEAIYDICRRNLDIERPTYTNLNRLIGQIVSSITASLRFDGALNVDLTEFQTNLVPYPRIHFPLATYAPVISAEKAYHEQLSVAEITNACFEPANQMVKCDPRHGKYMACCLLYRGDVVPKDVNAAIATIKTKRTIQFVDWCPTGFKVGINYQPPTVVPGGDLAKVQRAVCMLSNTTAIAEAWARLDHKFDLMYAKRAFVHWYVGEGMEEGEFSEAREDMAALEKDYEEVGVDSVEGEGEEEGEEY

SEQ ID NO: 4046 - protein, 449 aa, Homo sapiens
MRECISIHVGQAGVQIGNACWELYCLEHGIQPDGQMPSDKTIGGGDDSFNTFFSETGAGKHVPRAVFVDLEPTVIDEVRTGTYRQLFHPEQLITGKEDAANNYARGHYTIGKEIIDLVLDRIRKLADQCTGLQGFLVFHSFGGGTGSGFTSLLMERLSVDYGKKSKLEFSIYPAPQVSTAVVEPYNSILTTHTTLEHSDCAFMVDNEAIYDICRRNLDIERPTYTNLNRLISQIVSSITASLRFDGALNVDLTEFQTNLVPYPRIHFPLATYAPVISAEKAYHEQLTVAEITNACFEPANQMVKCDPRHGKYMACCLLYRGDVVPKDVNAAIATIKTKRTIQFVDWCPTGFKVGINYQPPTVVPGGDLAKVQRAVCMLSNTTAVAEAWARLDHKFDLMYAKRAFVHWYVGEGMEEGEFSEAREDMAALEKDYEEVGADSADGEDEGEEY

SEQ ID NO: 4047 - protein, 494 aa, Homo sapiens
MLASGMLLVALLVCLTVMVLMSVWQQRKSKGKLPPGPTPLPFIGNYLQLNTEQMYNSLMKISERYGPVFTIHLGPRRVVVLCGHDAVREALVDQAEEFSGRGEQATFDWVFKGYGVVFSNGERAKQLRRFSIATLRDFGVGKRGIEERIQEEAGFLIDALRGTGGANIDPTFFLSRTVSNVISSIVFGDRFDYKDKEFLSLLRMMLGIFQFTSTSTGQLYEMFSSVMKHLPGPQQQAFQLLQGLEDFIAKKVEHNQRTLDPNSPRDFIDSFLIRMQEEEKNPNTEFYLKNLVMTTLNLFIGGTETVSTTLRYGFLLLMKHPEVEAKVHEEIDRVIGKNRQPKFEDRAKMPYMEAVIHEIQRFGDVIPMSLARRVKKDTKFRDFFLPKGTEVYPMLGSVLRDPSFFSNPQDFNPQHFLNEKGQFKKSDAFVPFSIGKRNCFGEGLARMELFLFFTTVMQNFRLKSSQSPKDIDVSPKHVGFATIPRNYTMSFLPR

SEQ ID NO: 4048 - protein, 349 aa, Homo sapiens
MASKKVCIVGSGNWGSAIAKIVGGNAAQLAQFDPRVTMWVFEEDIGGKKLTEIINTQHENVKYLPGHKLPPNVVAVPDVVQAAEDADILIFVVPHQFIGKICDQLKGHLKANATGISLIKGVDEGPNGLKLISEVIGERLGIPMSVLMGANIASEVADEKFCETTIGCKDPAQGQLLKELMQTPNFRITVVQEVDTVEICGALKNVVAVGAGFCDGLGFGDNTKAAVIRLGLMEMIAFAKLFCSGPVSSATFLESCGVADLITTCYGGRNRKVAEAFARTGKSIEQLEKELLNGQKLQGPETARELYSILQHKGLVDKFPLFMAVYKVCYEGQPVGEFIHCLQNHPEHM

SEQ ID NO: 4049 - protein, 246 aa, Homo sapiens
MFPVKVKVEKSELEMAKARNQLDAVLQCLLEKSHMDRERLDEEAGKTPSDTHNKDCSIAATGKRPSARFPHQRRKKRREMDDGLAEGGPQRSNTYVIKLFDRSVDLAQFSENTPLYPICRAWMRNSPSVRERECSPSSPLPPLPEDEEGSEVTNSKSRDVYKLPPPTPPGPPGDACRSRIPSPLQPEMQGTPDDEPSEPEPSPSTLIYRNMQRWKRIRQRWKEASHRNQLRYSESMKILREMYERQ

SEQ ID NO: 4050 - protein, 894 aa, Homo sapiens
MAWRCPRMGRVPLAWCLALCGWACMAPRGTQAEESPFVGNPGNITGARGLTGTLRCQLQVQGEPPEVHWLRDGQILELADSTQTQVPLGEDEQDDWIVVSQLRITSLQLSDTGQYQCLVFLGHQTFVSQPGYVGLEGLPYFLEEPEDRTVAANTPFNLSCQAQGPPEPVDLLWLQDAVPLATAPGHGPQRSLHVPGLNKTSSFSCEAHNAKGVTTSRTATITVLPQQPRNLHLVSRQPTELEVAWTPGLSGIYPLTHCTLQAVLSDDGMGIQAGEPDPPEEPLTSQASVPPHQLRLGSLHPHTPYHIRVACTSSQGPSSWTHWLPVETPEGVPLGPPENISATRNGSQAFVHWQEPRAPLQGTLLGYRLAYQGQDTPEVLMDIGLRQEVTLELQGDGSVSNLTVCVAAYTAAGDGPWSLPVPLEAWRPGQAQPVHQLVKEPSTPAFSWPWWYVLLGAVVAAACVLILALFLVHRRKKETRYGEVFEPTVERGELVVRYRVRKSYSRRTTEATLNSLGISEELKEKLRDVMVDRHKVALGKTLGEGEFGAVMEGQLNQDDSILKVAVKTMKIAICTRSELEDFLSEAVCMKEFDHPNVMRLIGVCFQGSERESFPAPVVILPFMKHGDLHSFLLYSRLGDQPVYLPTQMLVKFMADIASGMEYLSTKRFIHRDLAARNCMLNENMSVCVADFGLSKKIYNGDYYRQGRIAKMPVKWIAIESLADRVYTSKSDVWSFGVTMWEIATRGQTPYPGVENSEIYDYLRQGNRLKQPADCLDGLYALMSRCWELNPQDRPSFTELREDLENTLKALPPAQEPDEILYVNMDEGGGYPEPPGAAGGADPPTQPDPKDSCSCLTAAEVHPAGRYVLCPSTTPSPAQPADRGSPAAPGQEDGA

SEQ ID NO: 4051 - protein, 1576 aa, Homo sapiens
MAERGLEPSPAAVAALPPEVRAQLAELELELSEGDITQKGYEKKRSKLLSPYSPQTQETDSAVQKELRNQTPAPSAAQTSAPSKYHRTRSGGARDERYRSDIHTEAVQAALAKHKEQKMALPMPTKRRSTFVQSPADACTPPDTSSASEDEGSLRRQAALSAALQQSLQNAESWINRSIQGSSTSSSASSTLSHGEVKGTSGSLADVFANTRIENFSAPPDVTTTTSSSSSSSSIRPANIDLPPSGIVKGMHKGSNRSSLMDTADGVPVSSRVSTKIQQLLNTLKRPKRPPLKEFFVDDSEEIVEVPQPDPNQPKPEGRQMTPVKGEPLGVICNWPPALESALQRWGTTQAKCSCLTALDMTGKPVYTLTYGKLWSRSLKLAYTLLNKLGTKNEPVLKPGDRVALVYPNNDPVMFMVAFYGCLLAEVIPVPIEVPLTRKDAGGQQIGFLLGSCGIALALTSEVCLKGLPKTQNGEIVQFKGWPRLKWVVTDSKYLSKPPKDWQPHISPAGTEPAYIEYKTSKEGSVMGVTVSRLAMLSHCQALSQACNYSEGETIVNVLDFKKDAGLWHGMFANVMNKMHTISVPYSVMKTCPLSWVQRVHAHKAKVALVKCRDLHWAMMAHRDQRDVSLSSLRMLIVTDGANPWSVSSCDAFLSLFQSHGLKPEAICPCATSAEAMTVAIRRPGVPGAPLPGRAILSMNGLSYGVIRVNTEDKNSALTVQDVGHVMPGGMMCIVKPDGPPQLCKTDEIGEICVSSRTGGMMYFGLAGVTKNTFEVIPVNSAGSPVGDVPFIRSGLLGFVGPGSLVFVVGKMDGLLMVSGRRHNADDIVATGLAVESIKTVYRGRIAVFSVSVFYDERIVVVAEQRPDASEEDSFQWMSRVLQAIDSIHQVGVYCLALVPANTLPKTPLGGIHISQTKQLFLEGSLHPCNILMCPHTCVTNLPKPRQKQPGVGPASVMVGNLVAGKRIAQAAGRDLGQIEENDLVRKHQFLAEILQWRAQATPDHVLFMLLNAKGTTVCTASCLQLHKRAERIASVLGDKGHLNAGDNVVLLYPPGIELIAAFYGCLYAGCIPVTVRPPHAQNLTATLPTVRMIVDVSKAACILTSQTLMRLLRSREAAAAVDVKTWPTIIDTDDLPRKRLPQLYKPPTPEMLAYLDFSVSTTGMLTGVKMSHSAVNALCRAIKLQCELYSSRQIAICLDPYCGLGFALWCLCSVYSGHQSVLIPPMELENNLFLWLSTVNQYKIRDTFCSYSVMELCTKGLGNQVEVLKTRGINLSCVRTCVVVAEERPRVALQQSFSKLFKDIGLSPRAVSTTFGSRVNVAICLQGTSGPDPTTVYVDLKSLRHDRVRLVERGAPQSLLLSESGKILPGVKVVIVNPETKGPVGDSHLGEIWVNSPHTASGYYTIYDSETLQADHFNTRLSFGDAAQTLWARTGYLGFVRRTELTAATGERHDALYVVGALDETLELRGLRYHPIDIETSVSRIHRSIAECAVFTWTNLLVVVVELCGSEQEALDLVPLVTNVVLEEHYLIVGVVVVVDPGVIPINSRGEKQRMHLRDSFLADQLDPIYVAYNM

SEQ ID NO: 4052 - protein, 270 aa, Homo sapiens
MSPHPTALLGLVLCLAQTIHTQEEDLPRPSISAEPGTVIPLGSHVTFVCRGPVGVQTFRLERDSRSTYNDTEDVSQASPSESEARFRIDSVREGNAGLYRCIYYKPPKWSEQSDYLELLVKGPTQRPSDNSHNEHAPASQGLKAEHLYILIGVSVVFLFCLLLLVLFCLHRQNQIKQGPPRSKDEEQKPQQRPDLAVDVLERTADKATVNGLPEKDRETDTSALAAGSSQEVTYAQLDHWALTQRTARAVSPQSTKPMAESITYAAVARH

SEQ ID NO: 4053 - protein, 148 aa, Homo sapiens
MPVLKQLGPAQPKKRPDRGALSISAPLGDFRHTLHVGRGGDAFGDTSFLSRHGGGPPPEPRAPPAGAPRSPPPPAVPQSAAPSPADPLLSFHLDLGPSMLDAVLGVMDAARPEAAAAKPDAEPRPGTQPPQARCRPNADLELNDVIGL

SEQ ID NO: 4054 - protein, 152 aa, Homo sapiens
MSPHLTALLGLVLCLAQTIHTQEGALPRPSISAEPGTVISPGSHVTFMCRGPVGVQTFRLEREDRAKYKDSYNVFRLGPSESEARFHIDSVSEGNAGLYRCLYYKPPGWSEHSDFLELLVKESSGGPDSPDTEPGSSAGTVPGTEASGFDAP

SEQ ID NO: 4055 - protein, 135 aa, Homo sapiens
MSPHLTALLGLVLCLAQTIHTQEGALPRPSISAEPGTVISPGSHVTFMCRGPVGVQTFRLEREDRAKYKDSYNVFRLGPSESEARFHIDSVSEGNAGLYRCLYYKPPGWSEHSDFLELLVKGTVPGTEASGFDAP

SEQ ID NO: 4056 - protein, 493 aa, Homo sapiens
MEPLRAPALRRLLPPLLLLLLSLPPRARAKYVRGNLSSKEDWVFLTRFCFLSDYGRLDFRFRYPEAKCCQNILLYFDDPSQWPAVYKAGDKDCLAKESVIRPENNQVINLTTQYAWSGCQVVSEEGTRYLSCSSGRSFRSGDGLQLEYEMVLTNGKSFWTRHFSADEFGILETDVTFLLIFILIFFLSCYFGYLLKGRQLLHTTYKMFMAAAGVEVLSLLFFCIYWGQYATDGIGNESVKILAKLLFSSSFLIFLLMLILLGKGFTVTRGRISHAGSVKLSVYMTLYTLTHVVLLIYEAEFFDPGQVLYTYESPAGYGLIGLQVAAYVWFCYAVLVSLRHFPEKQPFYVPFFAAYTLWFFAVPVMALIANFGIPKWAREKIVNGIQLGIHLYAHGVFLIMTRPSAANKNFPYHVRTSQIASAGVPGPGGSQSADKAFPQHVYGNVTFISDSVPNFTELFSIPPPATSPLPRAAPDSGLPLFRDLRPPGPLRDL

SEQ ID NO: 4057 - protein, 670 aa, Homo sapiens
MAEVVAEVAEMPTQMSPGAVEMSTPMSAEMMEMSTEVTEMTPGEALASSLFFQHHQFMCSECGSLYNTLEEVLSHQEQHMLAVSEEEALTTQNVGLEPELVPGAEGPFQCGECSQLILSPGELLAHQDAHLRESANQIQYQCWDCQELFPSPELWVAHRKAQHLSATVAEPPVPPPLPPPTPLPPPSPPSEVKMEPYECPECSTLCATPEEFLEHQGTHFDSLEKEERNGLEEEEEDDEEDEEDDEEMEDEEAMAEVGDDAVGGDESTAGWAQGCGDCPQHQPSAGARRQHRRTAHSPASATHPFHCSQCQRSFSSANRLQAHGRAHVGGTHECTTCSKVFKKAASLEQHLRLHRGEARYLCVDCGRGFGTELTLVAHRRAHTANPLHRCRCGKTFSNMTKFLYHRRTHAGKSGAPPTGATAPPAPAEPTPPPPPPAPPAQLPCPQCSKSFASASRLSRHRRAVHGPPERRHRCGVCGKGFKKLIHVRNHLRTHTGERPFQCHSCGKTFASLANLSRHQLTHTGARPYQCLDCGKRFTQSSNLQQHRRLHLRPVAFARAPRLPITGLYNKSPYYCGTCGRWFRAMAGLRLHQRVHARARTLTLQPPRSPSPAPPPPPEPQQTIMCTELGETIAIIETSQPLALEDTLQLCQAALGASEAGGLLQLDTAFV

SEQ ID NO: 4058 - protein, 981 aa, Homo sapiens
MPAELLLLLIVAFASPSCQVLSSLRMAAILDDQTVCGRGERLALALAREQINGIIEVPAKARVEVDIFELQRDSQYETTDTMCQILPKGVVSVLGPSSSPASASTVSHICGEKEIPHIKVGPEETPRLQYLRFASVSLYPSNEDVSLAVSRILKSFNYPSASLICAKAECLLRLEELVRGFLISKETLSVRMLDDSRDPTPLLKEIRDDKVSTIIIDANASISHLILRKASELGMTSAFYKYILTTMDFPILHLDGIVEDSSNILGFSMFNTSHPFYPEFVRSLNMSWRENCEASTYLGPALSAALMFDAVHVVVSAVRELNRSQEIGVKPLACTSANIWPHGTSLMNYLRMVEYDGLTGRVEFNSKGQRTNYTLRILEKSRQGHREIGVWYSNRTLAMNATTLDINLSQTLANKTLVVTTILENPYVMRRPNFQALSGNERFEGFCVDMLRELAELLRFRYRLRLVEDGLYGAPEPNGSWTGMVGELINRKADLAVAAFTITAEREKVIDFSKPFMTLGISILYRVHMGRKPGYFSFLDPFSPAVWLFMLLAYLAVSCVLFLAARLSPYEWYNPHPCLRARPHILENQYTLGNSLWFPVGGFMQQGSEIMPRALSTRCVSGVWWAFTLIIISSYTANLAAFLTVQRMEVPVESADDLADQTNIEYGTIHAGSTMTFFQNSRYQTYQRMWNYMQSKQPSVFVKSTEEGIARVLNSRYAFLLESTMNEYHRRLNCNLTQIGGLLDTKGYGIGMPLGSPFRDEITLAILQLQENNRLEILKRKWWEGGRCPKEEDHRAKGLGMENIGGIFIVLICGLIIAVFVAVMEFIWSTRRSAESEETPALHPAACQCSALGPRTPLKEPSMLLVKVPSTRVQVAFSRTSLRQVCPFLLQHQLSSLYWIQATNVQICCHFSSLKPSPDLTFPPSHRPLSSLLFTALAAVGGLPDASSFFFPPISSCPPLQSGIGPCHSTEATLVTSNFHV

SEQ ID NO: 4059 - protein, 147 aa, Homo sapiens
MAAQRLGKRVLSKLQSPSRARGPGGSPGGLQKRHARVTVKYDRRELQRRLDVEKWIDGRLEELYRGMEADMPDEINIDELLELESEEERSRKIQGLLKSCGKPVEDFIQELLAKLQGLHRQPGLRQPSPSHDGSLSPLQDRARTAHP

SEQ ID NO: 4060 - protein, 252 aa, Homo sapiens
MAQLCGLRRSRAFLALLGSLLLSGVLAADRERSIHDFCLVSKVVGRCRASMPRWWYNVTDGSCQLFVYGGCDGNSNNYLTKEECLKKCATVTENATGDLATSRNAADSSVPSAPRRQDSEDHSSDMFNYEEYCTANAVTGPCRASFPRWYFDVERNSCNNFIYGGCRGNKNSYRSEEACMLRCFRQQENPPLPLGSKVVVLAGLFVMVLILFLGASMVYLIRVARRNQERALRTVWSSGDDKEQLVKNTYVL

SEQ ID NO: 4061 - protein, 128 aa, Homo sapiens
MRTALLLLAALAVATGPALTLRCHVCTSSSNCKHSVVCPASSRFCKTTNTVEPLRGNLVKKDCAESCTPSYTLQGQVSSGTSSTQCCQEDLCNEKLHNAAPTRTALAHSALSLGLALSLLAVILAPSL

SEQ ID NO: 4062 - protein, 454 aa, Homo sapiens
MSTFRQEDVEDHYEMGEELGSGQFAIVRKCRQKGTGKEYAAKFIKKRRLSSSRRGVSREEIEREVNILREIRHPNIITLHDIFENKTDVVLILELVSGGELFDFLAEKESLTEDEATQFLKQILDGVHYLHSKRIAHFDLKPENIMLLDKNVPNPRIKLIDFGIAHKIEAGNEFKNIFGTPEFVAPEIVNYEPLGLEADMWSIGVITYILLSGASPFLGETKQETLTNISAVNYDFDEEYFSNTSELAKDFIRRLLVKDPKRRMTIAQSLEHSWIKAIRRRNVRGEDSGRKPERRRLKTTRLKEYTIKSHSSLPPNNSYADFERFSKVLEEAAAAEEGLRELQRSRRLCHEDVEALAAIYEEKEAWYREESDSLGQDLRRLRQELLKTEALKRQAQEEAKGALLGTSGLKRRFSRLENRYEALAKQVASEMRFVQDLVRALEQEKLQGVECGLR

SEQ ID NO: 4063 - protein, 282 aa, Homo sapiens
MGSPGMVLGLLVQIWALQEASSLSVQQGPNLLQVRQGSQATLVCQVDQATAWERLRVKWTKDGAILCQPYITNGSLSLGVCGPQGRLSWQAPSHLTLQLDPVSLNHSGAYVCWAAVEIPELEEAEGNITRLFVDPDDPTQNRNRIASFPGFLFVLLGVGSMGVAAIVWGAWFWGRRSCQQRDSGNSPGNAFYSNVLYRPRGAPKKSEDCSGEGKDQRGQSIYSTSFPQPAPRQPHLASRPCPSPRPCPSPRPGHPVSMVRVSPRPSPTQQPRPKGFPKVGEE

SEQ ID NO: 4064 - protein, 441 aa, Homo sapiens
MKKFFQEFKADIKFKSAGPGQKLKESVGEKAHKEKPNQPAPRPPRQGPTNEAQMAAAAALARLEQKQSRAWGPTSQDTIRNQVRKELQAEATVSGSPEAPGTNVVSEPREEGSAHLAVPGVYFTCPLTGATLRKDQRDACIKEAILLHFSTDPVAASIMKIYTFNKDQDRVKLGVDTIAKYLDNIHLHPEEEKYRKIKLQNKVFQERINCLEGTHEFFEAIGFQKVLLPAQDQEDPEEFYVLSETTLAQPQSLERHKEQLLAAEPVRAKLDRQRRVFQPSPLASQFELPGDFFNLTAEEIKREQRLRSEAVERLSVLRTKAMREKEEQRGLRKYNYTLLRVRLPDGCLLQGTFYARERLGAVYGFVREALQSDWLPFELLASGGQKLSEDENLALNECGLVPSALLTFSWDMAVLEDIKAAGAEPDSILKPELLSAIEKLL

SEQ ID NO: 4065 - protein, 647 aa, Homo sapiens
MASLVSLELGLLLAVLVVTATASPPAGLLSLLTSGQGALDQEALGGLLNTLADRVHCANGPCGKCLSVEDALGLGEPEGSGLPPGPVLEARYVARLSAAAVLYLSNPEGTCEDARAGLWASHADHLLALLESPKALTPGLSWLLQRMQARAAGQTPKMACVDIPQLLEEAVGAGAPGSAGGVLAALLDHVRSGSCFHALPSPQYFVDFVFQQHSSEVPMTLAELSALMQRLGVGREAHSDHSHRHRGASSRDPVPLISSSNSSSVWDTVCLSARDVMAAYGLSEQAGVTPEAWAQLSPALLQQQLSGACTSQSRPPVQDQLSQSERYLYGSLATLLICLCAVFGLLLLTCTGCRGVTHYILQTFLSLAVGAVTGDAVLHLTPKVLGLHTHSEEGLSPQPTWRLLAMLAGLYAFFLFENLFNLLLPRDPEDLEDGPCGHSSHSHGGHSHGVSLQLAPSELRQPKPPHEGSRADLVAEESPELLNPEPRRLSPELRLLPYMITLGDAVHNFADGLAVGAAFASSWKTGLATSLAVFCHELPHELGDFAALLHAGLSVRQALLLNLASALTAFAGLYVALAVGVSEESEAWILAVATGLFLYVALCDMLPAMLKVRDPRPWLLFLLHNVGLLGGWTVLLLLSLYEDDITF

SEQ ID NO: 4066 - protein, 517 aa, Homo sapiens
MSLGSELFRDVAIVFSQEEWQWLAPAQRDLYRDVMLETYSNLVSLGLAVSKPDVISFLEQGKEPWMVERVVSGGLCPVLESRYDTKELFPKQHVYEVESPQWEIMESLTSYGLECSSFQDDWECRNQFDRQQGNPDRHFHQMIIRHEEMPTFDQHASLTFYQKIHTREKPFGYNKCRKDFWQKELLINHQGIYTNEKPYKCKECGKAFKYGSRLIQHENIHSGKKPYECKECGKAFNSGSNFIQHQRVHTGEKPYECKDCEKAFSRSSQLIEHQRTHTGEKPYQCKECGKAFNRISHLKVHYRIHTGEKPYACKECGKTFSHRSQLIQHQTVHTGRKLYECKECGKAFNQGSTLIRHQRIHTGEKPYECKVCGKAFRVSSQLKQHQRIHTGEKPYQCKVCGRAFKRVSHLTVHYRIHTGEKPYECKECGKAFSHCSQLIHHQVIHTEKKPYEYKECEKTLSHDSTTVQPQRMHNRETHVNIINVEKPSISSYPLLIIREFMLASNHMNGSNGESPLA

SEQ ID NO: 4067 - protein, 412 aa, Homo sapiens
MRGKLLPLAGLYLVQGLPYGLQSGLLPVLLRAGGLSLTRVGLAKVLYAPWLLKLAWAPLVDAQGSARAWVTRSTAGLGLVCGLLAGLPPPGAGQAGLPAAVAGLLLLLNLGAAMQDVALDALAVQLLEPAELGPGNTVQVVAYKLGAALAGGALLALLPTFSWPQLFLLLAATYWLAAALAWAAPALRRLPQQPPSEQRPHTAHLLRDVLAVPGTVWTAGFVLTYKLGEQGASSLFPLLLLDHGVSAPELGLWNGVGAVVCSIAGSSLGGTLLAKHWKLLPLLRSVLRFRLGGLACQTALVFHLDTLGASMDAGTILRGSALLSLCLQHFLGGLVTTVTFTGMMRCSQLAPRALQATHYSLLATLELLGKLLLGTLAGGLADGLGPHPCFLLLLILSAFPVLYLDLAPSTFL

SEQ ID NO: 4068 - protein, 298 aa, Homo sapiens
MAARRALHFVFKVGNRFQTARFYRDVLGMKVLRHEEFEEGCKAACNGPYDGKWSKTMVGFGPEDDHFVAELTYNYGVGDYKLGNDFMGITLASSQAVSNARKLEWPLTEVAEGVFETEAPGGYKFYLQNRSLPQSDPVLKVTLAVSDLQKSLNYWCNLLGMKIYEKDEEKQRALLGYADNQCKLELQGVKGGVDHAAAFGRIAFSCPQKELPDLEDLMKRENQKILTPLVSLDTPGKATVQVVILADPDGHEICFVGDEAFRELSKMDPEGSKLLDDAMAADKSDEWFAKHNKPKASG

SEQ ID NO: 4069 - protein, 838 aa, Homo sapiens
MYAFYSLLIYIFYSLFRRDGGAAAAAEPGDPAQRARKPRGRRRPDLPAPELWTELTGLAASSEPEDGSEGAAEGRAAAVSLEEALLRLAEFLSVQLGAEESCGGPADLGQSGEVPSLLTVTSQLLALLAWLRSPRGRQALLQGTQPAPRVRPPSPDGSTSQEESPSHFTAVPGEPLGDETQGQQPLQLEEDQRAWQRLEQLILGQLEELKQQLEQQEEELGRLRLGVGATDSEKRVQHLTLENEALKQSLSLMRDLLLHWGPGPPIRAPQEEAEALLELQGRLQEAQDTTEALRAQLGVQEVQLQGLQGALQQLQQETEQNCRRELQQMHGQLAGLRARMASLRQGCGDLRGLVSTFTQSCQGSLSEARGQVSWALGALSSGGPGTQLPEGQQGPPAGCPGRLPELKGNIRVLCRLRPGTSSSLVSVEPGPGGTVTTCYRGRHRRFRLDWVFPPDASQEEVFRELEPAVLSCLRGYSVCIFTYGQTGTGKTYSMEGPPEDPGIVPRALQSLFREMGAGRQHRVTLSMVEIYNEAVRDLLAPGPPERLAVRQGPEGQGGIQVAGLTHWDVPNLETLHQMLKLGRSNRATAATAMNQRSSRSHALVTLTLRAASPPRAPGTAGTLHLVDLAGSERARKAGAAGPPRGDPDGARRLREAQTINRSLLALGGVMAALRAHRPHVPFRDSQLTRLLQPALGPGTTAVLLLQVGAGAGQVCACRSPPTRARPPAPLARRSPRGRRISGRQSAPSSSPTEWVKWSWGQPGAAGSRAPPGRLLPSAPTLRSPGPPAPLRRPLAVLHAPVPTTARARLSRPQRACPSSPGSRPCPWGLRPGLCWQRR

SEQ ID NO: 4070 - protein, 804 aa, Homo sapiens
MAAHRPGPLKQQNKAHKGGRHRGRGSAQRDGKGRLALKTLSKKVRKELSRVDQRHRASQLRKQKKEAVLAEKRQLGGKDGPPHQVLVVPLHSRISLPEAMQLLQDRDTGTVHLNELGNTQNFMLLCPRLKHRWFFTSARPGDLHVVLDMAKVADTILFLLDPLEGWDSTGDYCLSCLFAQGLPTYTLAVQGISGLPLKKQIDTRKKLSKAVEKRFPHDKLLLLDTQQEAGMLLRQLANQKQQHLAFRDRRAYLFAHAVDFVPSEENNLVGTLKISGYVRGQTLNVNRLLHIVGYGDFQMKQIDAPGDPFPLNPRGIKPQKDPDMAMEICATDAVDDMEEGLKVLMKADPGRQESLQAEVIPDPMEGEQTWPTEEELSEAKDFLKESSKVVKKVPKGTSSYQAEWILDGGSQSGGEGDEYEYDDMEHEDFMEEESQDESSEEEEEYETMTIGESVHDDLYDKKVDEEAEAKMLEKYKQERLEEMFPDEVDTPRDVAARIRFQKYRGLKSFRTSPWDPKENLPQDYARIFQFQNFTNTRKSIFKEVEEKEVEGAEVGWYVTLHVSEVPVSVVECFRQGTPLIAFSLLPHEQKMSVLNMVVRRDPGNTEPVKAKEELIFHCGFRRFRASPLFSQHTAADKHKLQRFLTADMALVATVYAPITFPPASVLLFKQKSNGMHSLIATGHLMSVDPDRMVIKRVVLSGHPFKIFTKMAVVRYMFFNREDVLWFKPVELRTKWGRRGHIKEPLGTHGHMKCSFDGKLKSQDTVLMNLYKRVFPKWTYDPYVPEPVPWLKSEISSTVPQGGME

SEQ ID NO: 4071 - protein, 205 aa, Homo sapiens
MKVLLLTGLGALFFAYYWDDNFDPGGLDYLVLNHIGGAPAGTRARSPQATRWLMQVNFVSYVQLTSRALPSLTDSKGSLVVVSSLLGRVPTSFSTPYSAAKFALDGFFGSLRRELDVQDVNVAITMCVLGLRDRASAAEAVRGVTRVKAAPGPKAALAVIRGGATRAAGVFYPWRFRLLCLLRRWLPRPRAWFIRQELNVTAAAA

SEQ ID NO: 4072 - protein, 264 aa, Homo sapiens
MLRCGGRGLLLGLAVAAAAVMAARLMGWWGPRAGFRLFIPEELSRYRGGPGDPGLYLALLGRVYDVSSGRRHYEPGSHYSGFAGRDASRAFVTGDCSEAGLVDDVSDLSAAEMLTLHNWLSFYEKNYVCVGRVTGRFYGEDGLPTPALTQVEAAITRGLEANKLQLQEKQTFPPCNAEWSSARGSRLWCSQKSGGVSRDWIGVPRKLYKPGAKEPRCVCVRTTGPPSGQMPDNPPHRNRGDLDHPNLAEYTGCPPLAITCSFPL

SEQ ID NO: 4073 - protein, 155 aa, Homo sapiens
MSKRLLLLLLLSMGGTWASKEPLRPRCRPINATLAVEKEGCPVCITVNTTICAGYCPTMTRVLQGVLPALPQVVCNYRDVRFESIRLPGCPRGVNPVVSYAVALSCQCALCRRSTTDCGGPKDHPLTCDDPRFQDSSSSKAPPPSLPSPSRLPGP

SEQ ID NO: 4074 - protein, 165 aa, Homo sapiens
MEMFQGLLLLLLLSMGGTWASKEPLRPRCRPINATLAVEKEGCPVCITVNTTICAGYCPTMTRVLQGVLPALPQVVCNYRDVRFESIRLPGCPRGVNPVVSYAVALSCQCALCRRSTTDCGGPKDHPLTCDDPRFQDSSSSKAPPPSLPSPSRLPGPSDTPILPQ

SEQ ID NO: 4075 - protein, 262 aa, Homo sapiens
MWFLVLCLALSLGGTGAAPPIQSRIVGGWECEQHSQPWQAALYHFSTFQCGGILVHRQWVLTAAHCISDNYQLWLGRHNLFDDENTAQFVHVSESFPHPGFNMSLLENHTRQADEDYSHDLMLLRLTEPADTITDAVKVVELPTEEPEVGSTCLASGWGSIEPENFSFPDDLQCVDLKILPNDECKKAHVQKVTDFMLCVGHLEGGKDTCVGDSGGPLMCDGVLQGVTSWGYVPCGTPNKPSVAVRVLSYVKWIEDTIAENS

SEQ ID NO: 4076 - protein, 406 aa, Homo sapiens
MSGAPTAGAALMLCAATAVLLSAQGGPVQSKSPRFASWDEMNVLAHGLLQLGQGLREHAERTRSQLSALERRLSACGSACQGTEGSTDLPLAPESRVDPEVLHSLQTQLKAQNSRIQQLFHKVAQQQRHLEKQHLRIQHLQSQFGLLDHKHLDHEVAKPARRKRLPEMAQPVDPAHNVSRLHRLPRDCQELFQVGERQSGLFEIQPQGSPPFLVNCKMTSDGGWTVIQRRHDGSVDFNRPWEAYKAGFGDPHGEFWLGLEKVHSITGDRNSRLAVQLRDWDGNAELLQFSVHLGGEDTAYSLQLTAPVAGQLGATTVPPSGLSVPFSTWDQDHDLRRDKNCAKSLSGGWWFGTCSHSNLNGQYFRSIPQQRQKLKKGIFWKTWRGRYYPLQATTMLIQPMAAEAAS

SEQ ID NO: 4077 - protein, 113 aa, Homo sapiens
MASATRLIQRLRNWASGHDLQGKLQLRYQEISKRTQPPPKLPVGPSHKLSNNYYCTRDGRRESVPPSIIMSSQKALVSGKPAESSAVAATEKKAVTPAPPIKRWELSSDQPYL

SEQ ID NO: 4078 - protein, 282 aa, Homo sapiens
MSGGWMAQVGAWRTGALGLALLLLLGLGLGLEAAASPLSTPTSAQAAGPSSGSCPPTKFQCRTSGLCVPLTWRCDRDLDCSDGSDEEECRIEPCTQKGQCPPPPGLPCPCTGVSDCSGGTDKKLRNCSRLACLAGELRCTLSDDCIPLTWRCDGHPDCPDSSDELGCGTNEILPEGDATTMGPPVTLESVTSLRNATTMGPPVTLESVPSVGNATSSSAGDQSGSPTAYGVIAAAAVLSASLVTATLLLLSWLRAQERLRPLGLLVAMKESLLLSEQKTSLP

SEQ ID NO: 4079 - protein, 523 aa, Homo sapiens
MPSVMEKPSAGSGILSRSRAKTVPNGGQPHSEDDSSEEEHSHDSMIRVGTNYQAVIPECKPESPARYSNKELKGMLVWSPNHCVSDAKLDKYIAMAKEKHGYNIEQALGMLLWHKHDVEKSLADLANFTPFPDEWTVEDKVLFEQAFGFHGKCFQRIQQMLPDKLIPSLVKYYYSWKKTRSRTSVMDRQARRLGGRKDKEDSDELEEGRGGVSEGEPDPADPKREPLPSRPLNARPGPGKKEVQVSQYRHHPLRTRRRPPKGMYLSPEGLTAVSGSPDLANLTLRGLDSQLISLKRQVQSMKQTNSSLRQALEGGIDPLRPPEANTKFNSRWTTDEQLLAVQAIRRYGKDFGAIAEVIGNKTLTQVKTFFVSYRRRFNLEEVLQEWEAEQDGAPGAPVPMEEARRGAPLPAPALEEDDEVQITSVSTSVPRSVPPAPPPPPPPTSLSQPPPLLRPPLPTAPTLLRQPPPLQQGRFLQPRLAPNQPPPPLIRPALAAPRHSARPGPQPPPTLIGTPLEPPAPSL

SEQ ID NO: 4080 - protein, 442 aa, Homo sapiens
MRRTRRPRFVLMNKMDDLNLHYRFLNWRRRIREIREVRAFRYQERFKHILVDGDTLSYHGNSGEVGCYVASRPLTKDSNYFEVSIVDSGVRGTIAVGLVPQYYSLDHQPGWLPDSVAYHADDGKLYNGRAKGRQFGSKCNSGDRIGCGIEPVSFDVQTAQIFFTKNGKRVGSTIMPMSPDGLFPAVGMHSLGEEVRLHLNAELGREDDSVMMVDSYEDEWGRLHDVRVCGTLLEYLGKGKSIVDVGLAQARHPLSTRSHYFEVEIVDPGEKCYIALGLARKDYPKNRHPGWSRGSVAYHADDGKIFHGSGVGDPFGPRCYKGDIMGCGIMFPRDYILDSEGDSDDSCDTVILSPTARAVRNVRNVMYLHQEGEEEEEEEEEEEDGEEIEPEHEGRKVVVFFTRNGKIIGKKDAVVPSGGFFPTIGMLSCGEKVKVDLHPLSG

SEQ ID NO: 4081 - protein, 240 aa, Homo sapiens
MTPHRLLPPLLLLLALLLAASPGGALARCPGCGQGVQAGCPGGCVEEEDGGSPAEGCAEAEGCLRREGQECGVYTPNCAPGLQCHPPKDDEAPLRALLLGRGRCLPARAPAVAEENPKESKPQAGTARPQDVNRRDQQRNPGTSTTPSQPNSAGVQDTEMGPCRRHLDSVLQQLQTEVYRGAQTLYVPNCDHRGFYRKRQCRSSQGQRRGPCWCVDRMGKSLPGSPDGNGSSSCPTGSSG

SEQ ID NO: 4082 - protein, 402 aa, Homo sapiens
MAAVILPSTAAPSSLFPASQQKGHTQGGELVNELLTSWLRGLVTFEDVAVEFTQEEWALLDPAQRTLYRDVMLENCRNLASLGCRVNKPSLISQLEQDKKVVTEERGILPSTCPDLETLLKAKWLTPKKNVFRKEQSKGVKTERSHRGVKLNECNQCFKVFSTKSNLTQHKRIHTGEKPYDCSQCGKSFSSRSYLTIHKRIHNGEKPYECNHCGKAFSDPSSLRLHLRIHTGEKPYECNQCFHVFRTSCNLKSHKRIHTGENHHECNQCGKAFSTRSSLTGHNSIHTGEKPYECHDCGKTFRKSSYLTQHVRTHTGEKPYECNECGKSFSSSFSLTVHKRIHTGEKPYECSDCGKAFNNLSAVKKHLRTHTGEKPYECNHCGKSFTSNSYLSVHKRIHNRWI

SEQ ID NO: 4083 - protein, 126 aa, Homo sapiens
MSYKPIAPAPSSTPGSSTPGPGTPVPTGSVPSPSGSVPGAGAPFRPLFNDFGPPSMGYVQAMKPPGAQGSQSTYTDLLSVIEEMGKEIRPTYAGSKSAMERLKRGIIHARALVRECLAETERNART

SEQ ID NO: 4084 - protein, 198 aa, Homo sapiens
MASGNARIGKPAPDFKATAVVDGAFKEVKLSDYKGKYVVLFFYPLDFTFVCPTEIIAFSNRAEDFRKLGCEVLGVSVDSQFTHLAWINTPRKEGGLGPLNIPLLADVTRRLSEDYGVLKTDEGIAYRGLFIIDGKGVLRQITVNDLPVGRSVDEALRLVQAFQYTDEHGEVCPAGWKPGSDTIKPNVDDSKEYFSKHN

SEQ ID NO: 4085 - protein, 244 aa, Homo sapiens
MPLLTLYLLLFWLSGYSIVTQITGPTTVNGLERGSLTVQCVYRSGWETYLKWWCRGAIWRDCKILVKTSGSEQEVKRDRVSIKDNQKNRTFTVTMEDLMKTDADTYWCGIEKTGNDLGVTVQVTIDPAPVTQEETSSSPTLTGHHLDNRSEGSQAANYRPAAHQAQAPEAQCPPAPHLHHIAAAFGGRLTLGLEDDEVPAESSRDVPRAGTAAPGGRPLLCRPDPAAGRNLPAKGYHEAFLCPG

SEQ ID NO: 4086 - protein, 206 aa, Homo sapiens
MAATRCLRWGLSRAGVWLLPPPARCPRRALHKQKDGTEFKSIYSLDKLYPESQGSDTAWRVPNGAKQADSDIPLDRLTISYCRSSGPGGQNVNKVNSKAEVRFHLATAEWIAEPVRQKIAITHKNKINRLGELILTSESSRYQFRNLADCLQKIRDMITEASQTPKEPTKEDVKLHRIRIENMNRERLRQKRIHSAVKTSRRVDMD

SEQ ID NO: 4087 - protein, 161 aa, Homo sapiens
MAGRKLALKTIDWVAFAEIIPQNQKAIASSLKSWNETLTSRLAALPENPPAIDWAYYKANVAKAGLVDDFEKKFNALKVPVPEDKYTAQVDAEEKEDVKSCAEWVSLSKARIVEYEKEMEKMKNLIPFDQMTIEDLNEAFPETKLDKKKYPYWPHQPIENL

SEQ ID NO: 4088 - protein, 660 aa, Homo sapiens
MNPDLRRERDSASFNPELLTHILDGSPEKTRRRREIENMILNDPDFQHEDLNFLTRSQRYEVAVRKSAIMVKKMREFGIADPDEIMWFKKLHLVNFVEPVGLNYSMFIPTLLNQGTTAQKEKWLLSSKGLQIIGTYAQTEMGHGTHLRGLETTATYDPETQEFILNSPTVTSIKWWPGGLGKTSNHAIVLAQLITKGKCYGLHAFIVPIREIGTHKPLPGITVGDIGPKFGYDEIDNGYLKMDNHRIPRENMLMKYAQVKPDGTYVKPLSNKLTYGTMVFVRSFLVGEAARALSKACTIAIRYSAVRHQSEIKPGEPEPQILDFQTQQYKLFPLLATAYAFQFVGAYMKETYHRINEGIGQGDLSELPELHALTAGLKAFTSWTANTGIEACRMACGGHGYSHCSGLPNIYVNFTPSCTFEGENTVMMLQTARFLMKSYDQVHSGKLVCGMVSYLNDLPSQRIQPQQVAVWPTMVDINSPESLTEAYKLRAARLVEIAAKNLQKEVIHRKSKEVAWNLTSVDLVRASEAHCHYVVVKLFSEKLLKIQDKAIQAVLRSLCLLYSLYGISQNAGDFLQGSIMTEPQITQVNQRVKELLTLIRSDAVALVDAFDFQDVTLGSVLGRYDGNVYENLFEWAKNSPLNKAEVHESYKHLKSLQSKL

SEQ ID NO: 4089 - protein, 234 aa, Homo sapiens
MSCINLPTVLPGSPSKTRGQIQVILGPMFSGKSTELMRRVRRFQIAQYKCLVIKYAKDTRYSSSFCTHDRNTMEALPACLLRDVAQEALGVAVIGIDEGQFFPDIVEFCEAMANAGKTVIVAALDGTFQRKPFGAILNLVPLAESVVKLTAVCMECFREAAYTKRLGTEKEVEVIGGADKYHSVCRLCYFKKASGQPAGPDNKENCPVPGKPGEAVAARKLFAPQQILQCSPAN

SEQ ID NO: 4090 - protein, 530 aa, Homo sapiens
MLLWPLLLLLLLLPTLALLRQQRSQDARLSWLAGLQHRVAWGALVWAATWQRRRLEQSTLHVHQSQQQALRWCLQGAQRPHCSLRRSTDISTFRNHLPLTKASQTQQEDSGEQPLPPTSNQDLGEASLQATLLGLAALNKAYPEVLAQGRTARVTLTSPWPRPLPWPGNTLGQVGTPGTKDPRALLLDALRSPGLRALEAGTAVELLDVFLGLETDGEELAGAIAAGNPGAPLRERAAELREALEQGPRGLALRLWPKLQVVVTLDAGGQAEAVAALGALWCQGLAFFSPAYAASGGVLGLNLQPEQPHGLYLLPPGAPFIELLPVKEGTQEEAASTLLLAEAQQGKEYELVLTDRASLTRCRLGDVVRVVGAYNQCPVVRFICRLDQTLSVRGEDIGEDLFSEALGRAVGQWAGAKLLDHGCVESSILDSSAGSAPHYEVFVALRGLRNLSEENRDKLDHCLQEASPRYKSLRFWGSVGPARVHLVGQGAFRALRAALAACPSSPFPPAMPRVLRHRHLAQCLQERVVS

SEQ ID NO: 4091 - protein, 552 aa, Homo sapiens
MLDHKDLEAEIHPLKNEERKSQENLGNPSKNEDNVKSAPPQSRLSRCRAAAFFLSLFLCLFVVFVVSFVIPCPDRPASQRMWRIDYSAAVIYDFLAVDDINGDRIQDVLFLYKNTNSSNNFSRSCVDEGFSSPCTFAAAVSGANGSTLWERPVAQDVALVECAVPQPRGSEAPSACILVGRPSSFIAVNLFTGETLWNHSSSFSGNASILSPLLQVPDVDGDGAPDLLVLTQEREEVSGHLYSGSTGHQIGLRGSLGVDGESGFLLHVTRTGAHYILFPCASSLCGCSVKGLYEKVTGSGGPFKSDPHWESMLNATTRRMLSHSSGAVRYLMHVPGNAGADVLLVGSEAFVLLDGQELTPRWTPKAAHVLRKPIFGRYKPDTLAVAVENGTGTDRQILFLDLGTGAVLCSLALPSLPGGPLSASLPTADHRSAFFFWGLHELGSTSETETGEARHSLYMFHPTLPRVLLELANVSTHIVAFDAVLFEPSRHAAYILLTGPADSEAPGLVSVIKHKVRDLVPSSRVVRLGEGGPDSDQAIRDRFSRLRYQSEA

SEQ ID NO: 4092 - protein, 213 aa, Homo sapiens
MQLPLALCLVCLLVHTAFRVVEGQGWQAFKNDATEIIPELGEYPEPPPELENNKTMNRAENGGRPPHHPFETKDVSEYSCRELHFTRYVTDGPCRSAKPVTELVCSGQCGPARLLPNAIGRGKWWRPSGPDFRCIPDRYRAQRVQLLCPGGEAPRARKVRLVASCKCKRLTRFHNQSELKDFGTEAARPQKGRKPRPRARSAKANQAELENAY

SEQ ID NO: 4093 - protein, 355 aa, Homo sapiens
MARRPRNSRAWHFVLSAARRDADARAVALAGSTNWGYDSDGQHSDSDSDPEYSTLPPSIPSAVPVTGESFCDCAGQSEASFCSSLHSAHRGRDCRCGEEDEYFDWVWDDLNKSSATLLSCDNRKVSFHMEYSCGTAAIRGTKELGEGQHFWEIKMTSPVYGTDMMVGIGTSDVDLDKYRHTFCSLLGRDEDSWGLSYTGLLHHKGDKTSFSSRFGQGSIIGVHLDTWHGTLTFFKNRKCIGVAATKLQNKRFYPMVCSTAARSSMKVTRSCASATSLQYLCCHRLRQLRPDSGDTLEGLPLPPGLKQVLHNKLGWVLSMSCSRRKAPVSDPQAATSAHPSSREPRPCQRKRCRRT

SEQ ID NO: 4094 - protein, 327 aa, Homo sapiens
MNTSPGTVGSDPVILATAGYDHTVRFWQAHSGICTRTVQHQDSQVNALEVTPDRSMIAAAGYQHIRMYDLNSNNPNPIISYDGVNKNIASVGFHEDGRWMYTGGEDCTARIWDLRSRNLQCQRIFQVNAPINCVCLHPNQAELIVGDQSGAIHIWDLKTDHNEQLIPEPEVSITSAHIDPDASYMAAVNSTGNCYVWNLTGGIGDEVTQLIPKTKIPAHTRYALQCRFSPDSTLLATCSADQTCKIWRTSNFSLMTELSIKSGNPGESSRGWMWGCAFSGDSQYIVTGEPRPGLPHPWPPALASRASPPRLQLPLCWGRLLGLHLRS

SEQ ID NO: 4095 - protein, 302 aa, Homo sapiens
MALVASVRVPARVLLRAGARLPGAALGRTERAAGGGDGARRFGSQRVLVEPDAGAGVAVMKFKNPPVNSLSLEFLTELVISLEKLENDKSFRGVILTSDRPGVFSAGLDLTEMCGRSPAHYAGYWKAVQELWLRLYQSNLVLVSAINGACPAGGCLVALTCDYRILADNPRYCIGLNETQLGIIAPFWLKDTLENTIGHRAAERALQLGLLFPPAEALQVGIVDQVVPEEQVQSTALSAIAQWMAIPDHARQLTKAMMRKATASRLVTQRDADVQNFVSFISKDSIQKSLQMYLERLKEEKG

SEQ ID NO: 4096 - protein, 305 aa, Homo sapiens
MDLSGVKKKSLLGVKENNKKSSTRAPSPTKRKDRSDEKSKDRSKDKGATKESSEKDRGRDKTRKRRSASSGSSSTRSRSSSTSSSGSSTSTGSSSGSSSSSASSRSGSSSTSRSSSSSSSSGSPSPSRRRHDNRRRSRSKSKPPKRDEKERKRRSPSPKPTKVHIGRLTRNVTKDHIMEIFSTYGKIKMIDMPVERMHPHLSKGYAYVEFENPDEAEKALKHMDGGQIDGQEITATAVLAPWPRPPPRRFSPPRRMLPPPPMWRRSPPRMRRRSRSPRRRSPVRRRSRSPGRRRHRSRSSSNSSR

SEQ ID NO: 4097 - protein, 234 aa, Homo sapiens
MAENHCELLSPARGGIGAGLGGGLCRRCSAGLGALAQRPGSVSKWVRLNVGGTYFLTTRQTLCRDPKSFLYRLCQADPDLDSDKDETGAYLIDRDPTYFGPVLNYLRHGKLVINKDLAEEGVLEEAEFYNITSLIKLVKDKIRERDSKTSQVPVKHVYRVLQCQEEELTQMVSTMSDGWKFEQLVSIGSSYNYGNEDQAEFLCVVSKELHNTPYGTASEPSEKAKILQERGSRM

SEQ ID NO: 4098 - protein, 2752 aa, Homo sapiens
MYNGIGLPTPRGSGTNGYVQRNLSLVRGRRGERPDYKGEEELRRLEAALVKRPNPDILDHERKRRVELRCLELEEMMEEQGYEEQQIQEKVATFRLMLLEKDVNPGGKEETPGQRPAVTETHQLAELNEKKNERLRAAFGISDSYVDGSSFDPQRRAREAKQPAPEPPKPYSLVRESSSSRSPTPKQKKKKKKKDRGRRSESSSPRRERKKSSKKKKHRSESESKKRKHRSPTPKSKRKSKDKKRKRSRSTTPAPKSRRAHRSTSADSASSSDTSRSRSRSAAAKTHTTALAGRSPSPASGRRGEGDAPFSEPGTTSTQRPSSPETATKQPSSPYEDKDKDKKEKSATRPSPSPERSSTGPEPPAPTPLLAERHGGSPQPLATTPLSQEPVNPPSEASPTRDRSPPKSPEKLPQSSSSESSPPSPQPTKVSRHASSSPESPKPAPAPGSHREISSSPTSKNRSHGRAKRDKSHSHTPSRRMGRSRSPATAKRGRSRSRTPTKRGHSRSRSPQWRRSRSAQRWGRSRSPQRRGRSRSPQRPGWSRSRNTQRRGRSRSARRGRSHSRSPATRGRSRSRTPARRGRSRSRTPARRRSRSRTPTRRRSRSRTPARRGRSRSRTPARRRSRTRSPVRRRSRSRSPARRSGRSRSRTPARRGRSRSRTPARRGRSRSRTPARRSGRSRSRTPARRGRSRSRTPRRGRSRSRSLVRRGRSHSRTPQRRGRSGSSSERKNKSRTSQRRSRSNSSPEMKKSRISSRRSRSLSSPRSKAKSRLSLRRSLSGSSPCPKQKSQTPPRRSRSGSSQPKAKSRTPPRRSRSSSSPPPKQKSKTPSRQSHSSSSPHPKVKSGTPPRQGSITSPQANEQSVTPQRRSCFESSPDPELKSRTPSRHSCSGSSPPRVKSSTPPRQSPSRSSSPQPKVKAIISPRQRSHSGSSSPSPSRVTSRTTPRRSRSVSPCSNVESRLLPRYSHSGSSSPDTKVKPETPPRQSHSGSISPYPKVKAQTPPGPSLSGSKSPCPQEKSKDSLVQSCPGSLSLCAGVKSSTPPGESYFGVSSLQLKGQSQTSPDHRSDTSSPEVRQSHSESPSLQSKSQTSPKGGRSRSSSPVTELASRSPIRQDRGEFSASPMLKSGMSPEQSRFQSDSSSYPTVDSNSLLGQSRLETAESKEKMALPPQEDATASPPRQKDKFSPFPVQDRPESSLVFKDTLRTPPRERSGAGSSPETKEQNSALPTSSQDEELMEVVEKSEEPAGQILSHLSSELKEMSTSNFESSPEVEERPAVSLTLDQSQSQASLEAVEVPSMASSWGGPHFSPEHKELSNSPLRENSFGSPLEFRNSGPLGTEMNTGFSSEVKEDLNGPFLNQLETDPSLDMKEQSTRSSGHSSSELSPDAVEKAGMSSNQSISSPVLDAVPRTPSRERSSSASSPEMKDGLPRTPSRRSRSGSSPGLRDGSGTPSRHSLSGSSPGMKDIPRTPSRGRSECDSSPEPKALPQTPRPRSRSPSSPELNNKCLTPQRERSGSESSVDQKTVARTPLGQRSRSGSSQELDVKPSASPQERSESDSSPDSKAKTRTPLRQRSRSGSSPEVDSKSRLSPRRSRSGSSPEVKDKPRAAPRAQSGSDSSPEPKAPAPRALPRRSRSGSSSKGRGPSPEGSSSTESSPEHPPKSRTARRGSRSSPEPKTKSRTPPRRRSSRSSPELTRKARLSRRSRSASSSPETRSRTPPRHRRSPSVSSPEPAEKSRSSRRRRSASSPRTKTTSRRGRSPSPKPRGLQRSRSRSRREKTRTTRRRDRSGSSQSTSRRRQRSRSRSRVTRRRRGGSGYHSRSPARQESSRTSSRRRRGRSRTPPTSRKRSRSRTSPAPWKRSRSRASPATHRRSRSRTPLISRRRSRSRTSPVSRRRSRSRTSVTRRRSRSRASPVSRRRSRSRTPPVTRRRSRSRTPTTRRRSRSRTPPVTRRRSRSRTPPVTRRRSRSRTSPITRRRSRSRTSPVTRRRSRSRTSPVTRRRSRSRTSPVTRRRSRSRTPPAIRRRSRSRTPLLPRKRSRSRSPLAIRRRSRSRTPRTARGKRSLTRSPPAIRRRSASGSSSDRSRSATPPATRNHSGSRTPPVALNSSRMSCFSRPSMSPTPLDRCRSPGMLEPLGSSRTPMSVLQQAGGSMMDGPGPRIPDHQRTSVPENHAQSRIALALTAISLGTARPPPSMSAAGLAARMSQVPAPVPLMSLRTAPAANLASRIPAASAAAMNLASARTPAIPTAVNLADSRTPAAAAAMNLASPRTAVAPSAVNLADPRTPTAPAVNLAGARTPAALAALSLTGSGTPPTAANYPSSSRTPQAPASANLVGPRSAHATAPVNIAGSRTAAALAPASLTSARMAPALSGANLTSPRVPLSAYERVSGRTSPPLLDRARSRTPPSAPSQSRMTSERAPSPSSRMGQAPSQSLLPPAQDQPRSPVPSAFSDQSRCLIAQTTPVAGSQSLSSGAVATTTSSAGDHNGMLSVPAPGVPHSDVGEPPASTGAQQPSALAALQPAKERRSSSSSSSSSSSSSSSSSSSSSSSSSGSSSSDSEGSSLPVQPEVALKRVPSPTPAPKEAVREGRPPEPTPAKRKRRSSSSSSSSSSSSSSSSSSSSSSSSSSSSSSSSSSSSSSSSSSPSPAKPGPQALPKPASPKKPPPGERRSRSPRKPIDSLRDSRSLSYSPVERRRPSPQPSPRDQQSSSSERGSRRGQRGDSRSPSHKRRRETPSPRPMRHRSSRSP

SEQ ID NO: 4099 - protein, 166 aa, Homo sapiens
MAVSTVFSTSSLMLALSRHSLLSPLLSVTSFRRFYRGDSPTDSQKDMIEIPLPPWQERTDESIETKRARLLYESRKRGMLENCILLSLFAKEHLQHMTEKQLNLYDRLINEPSNDWDIYYWATEAKPAPEIFENEVMALLRDFAKNKNKEQRLRAPDLEYLFEKPR

SEQ ID NO: 4100 - protein, 1140 aa, Homo sapiens [sequence omitted]

SEQ ID NO: 4101 - protein, 355 aa, Homo sapiens
METLKDKTLQELEELQNDSEAIDQLALESPEVQDLQLEREMALATNRSLAERNLEFQGPLEISRSNLSDRYQELRKLVERCQEQKAKLEKFSSALQPGTLLDLLQVEGMKIEEESEAMAEKFLEGEVPLETFLENFSSMRMLSHLRRVRVEKLQEVVRKPRASQELAGDAPPPRPPPPVRPVPQGTPPVVEEQPQPPLAMPPYPLPYSPSPSLPVGPTAHGALPPAPFPVVSQPSFYSGPLGPTYPAAQLGPRGAAGYSWSPQRSMPPRPGYPGTPMGASGPGYPLRGGRAPSPGYPQQSPYPATGGKPPYPIQPQLPSFPGQPQPSVPLQPPYPPGPAPPYGFPPPPGPAWPGY

SEQ ID NO: 4102 - protein, 219 aa, Homo sapiens
MWAGLLLRAACVALLLPGAPARGYTGRKPPGHFAAERRRLGPHVCLSGFGSGCCPGWAPSMGGGHCTLPLCSFGCGSGICIAPNVCSCQDGEQGATCPETHGPCGEYGCDLTCNHGGCQEVARVCPVGFSMTETAVGIRCTDIDECVTSSCEGHCVNTEGGFVCECGPGMQLSADRHSCQDTDECLGTPCQQRCKNSIGSYKCSCRTGFHLHGNRHSCM

SEQ ID NO: 4103 - protein, 747 aa, Homo sapiens
MEVKRLKVTELRSELQRRGLDSRGLKVDLAQRLQEALDAEMLEDEAGGGGAGPGGACKAEPRPVAASGGGPGGDEEEDEEEEEEDEEALLEDEDEEPPPAQALGQAAQPPPEPPEAAAMEAAAEPDASEKPAEATAGSGGVNGGEEQGLGKREEDEPEERSGDETPGSEVPGDKAAEEQGDDQDSEKSKPAGSDGERRGVKRQRDEKDEHGRAYYEFREEAYHSRSKSPLPPEEEAKDEEEDQTLVNLDTYTSDLHFQVSKDRYGGQPLFSEKFPTLWSGARSTYGVTKGKVCFEAKVTQNLPMKEGCTEVSLLRVGWSVDFSRPQLGEDEFSYGFDGRGLKAENGQFEEFGQTFGENDVIGCFANFETEEVELSFSKNGEDLGVAFWISKDSLADRALLPHVLCKNCVVELNFGQKEEPFFPPPEEFVFIHAVPVEERVRTAVPPKTIEECEVILMVGLPGSGKTQWALKYAKENPEKRYNVLGAETVLNQMRMKGLEEPEMDPKSRDLLVQQASQCLSKLVQIASRTKRNFILDQCNVYNSGQRRKLLLFKTFSRKVVVVVPNEEDWKKRLELRKEVEGDDVPESIMLEMKANFSLPEKCDYMDEVTYGELEKEEAQPIVTKYKEEARKLLPPSEKRTNRRNNRNKRNRQNRSRGQGYVGGQRRGYDNRAYGQQYWGQPGNRGGYRNFYDRYRGDYDRFYGRDYEYNRYRDYYRQYNRDWQSYYYHHPQDRDRYYRNYYGYQGYR

SEQ ID NO: 4104 - protein, 172 aa, Homo sapiens
MFYHISLEHEILLHPRYFGPNLLNTVKQKLFTEVEGTCTGKYGFVIAVTTIDNIGAGVIQPGRGFVLYPVKYKAIVFRPFKGEVVDAVVTQVNKVGLFTEIGPMSCFISRHSIPSEMEFDPNSNPPCYKTMDEDIVIQQDDEIRLKIVGTRVDKNDIFAIGSLMDDYLGLVS

SEQ ID NO: 4105 - protein, 208 aa, Homo sapiens
MDPFLVLLHSVSSSLSSSELTELKFLCLGRVGKRKLERVQSGLDLFSMLLEQNDLEPGHTELLRELLASLRRHDLLRRVDDFEAGAAAGAAPGEEDLCAAFNVICDNVGKDWRRLARQLKVSDTKIDSIEDRYPRNLTERVRESLRIWKNTEKENATVAHLVGALRSCQMNLVADLVQEVQQARDLQNRSGAMSPMSWNSDASTSEAS

SEQ ID NO: 4106 - protein, 550 aa, Homo sapiens
MWKASAGHAVSIAQDDAGADDWETDPDFVNDVSEKEQRWGAKTVQGSGHQEHINIHKLRENVFQEHQTLKEKELETGPKASHGYGGKFGVEQDRMDKSAVGHEYQSKLSKHCSQVDSVRGFGGKFGVQMDRVDQSAVGFEYQGKTEKHASQKDYSSGFGGKYGVQADRVDKSAVGFDYQGKTEKHESQRDYSKGFGGKYGIDKDKVDKSAVGFEYQGKTEKHESQKDYVKGFGGKFGVQTDRQDKCALGWDHQEKLQLHESQKDYKTGFGGKFGVQSERQDSAAVGFDYKEKLAKHESQQDYSKGFGGKYGVQKDRMDKNASTFEDVTQVSSAYQKTVPVEAVTSKTSNIRANFENLAKEKEQEDRRKAEAERAQRMAKERQEQEEARRKLEEQARAKTQTPPVSPAPQPTEERLPSSPVYEDAASFKAELSYRGPVSGTEPEPVYSMEAADYREASSQQGLAYATEAVYESAEAPGHYPAEDSTYDEYENDLGITAVALYDYQAAGDDEISFDPDDIITNIEMIDDGWWRGVCKGRYGLFPANYVELRQ

SEQ ID NO: 4107 - protein, 176 aa, Homo sapiens
MKVLLCDLLLLSLFSSVFSSCQRDCLTCQEKLHPALDSFDLEVCILECEEKVFPSPLWTPCTKVMARSSWQLSPAAPEHVAAALYQPRASEMQHLRRMPRVRSLFQEQEEPEPGMEEAGEMEQKQLQKRFGGFTGARKSARKLANQKRFSEFMRQYLVLSMQSSQRRRTLHQNGNV

SEQ ID NO: 4108 - protein, 296 aa, Homo sapiens
MANVLCNRARLVSYLPGFCSLVKRVVNPKAFSTAGSSGSDESHVAAAPPDICSRTVWPDETMGPFGPQDQRFQLPGNIGFDCHLNGTASQKKSLVHKTLPDVLAEPLSSERHEFVMAQYVNEFQGNDAPVEQEINSAETYFESARVECAIQTCPELLRKDFESLFPEVANGKLMILTVTQKTKNDMTVWSEEVEIEREVLLEKFINGAKEICYALRAEGYWADFIDPSSGLAFFGPYTNNTLFETDERYRHLGFSVDDLGCCKVIRHSLWGTHVVVGSIFTNATPDSHIMKKLSGN

SEQ ID NO: 4109 - protein, 493 aa, Homo sapiens
MERSPDVSPGPSRSFKEELLCAVCYDPFRDAVTLRCGHNFCRGCVSRCWEVQVSPTCPVCKDRASPADLRTNHTLNNLVEKLLREEAEGARWTSYRFSRVCRLHRGQLSLFCLEDKELLCCSCQADPRHQGHRVQPVKDTAHDFRAKCRNMEHALREKAKAFWAMRRSYEAIAKHNQVEAAWLEGRIRQEFDKLREFLRVEEQAILDAMAEETRQKQLLADEKMKQLTEETEVLAHEIERLQMEMKEDDVSFLMKHKSRKRRLFCTMEPEPVQPGMLIDVCKYLGSLQYRVWKKMLASVESVPFSFDPNTAAGWLSVSDDLTSVTNHGYRVQVENPERFSSAPCLLGSRVFSQGSHAWEVALGGLQSWRVGVVRVRQDSGAEGHSHSCYHDTRSGFWYVCRTQGVEGDHCVTSDPATSPLVLAIPRRLRVELECEEGELSFYDAERHCHLYTFHARFGEVRPYFYLGGARGAGPPEPLRICPLHISVKEELDG

SEQ ID NO: 4110 - protein, 113 aa, Homo sapiens
MAGPAAAFRRLGALSGAAALGFASYGAHGAQFPDAYGKELFDKANKHHFLHSLALLGVPHCRKPLWAGLLLASGTTLFCTSFYYQALSGDPSIQTLAPAGGTLLLLGWLALAL

SEQ ID NO: 4111 - protein, 564 aa, Homo sapiens
MATAERRALGIGFQWLSLATLVLICAGQGGRREDGGPACYGGFDLYFILDKSGSVLHHWNEIYYFVEQLAHKFISPQLRMSFIVFSTRGTTLMKLTEDREQIRQGLEELQKVLPGGDTYMHEGFERASEQIYYENRQGYRTASVIIALTDGELHEDLFFYSEREANRSRDLGAIVYCVGVKDFNETQLARIADSKDHVFPVNDGFQALQGIIHSILKKSCIEILAAEPSTICAGESFQVVVRGNGFRHARNVDRVLCSFKINDSVTLNEKPFSVEDTYLLCPAPILKEVGMKAALQVSMNDGLSFISSSVIITTTHCSDGSILAIALLILFLLLALALLWWFWPLCCTVIIKEVPPPPAEESEEEDDDGLPKKKWPTVDASYYGGRGVGGIKRMEVRWGEKGSTEEGAKLEKAKNARVKMPEQEYEFPEPRNLNNNMRRPSSPRKWYSPIKGKLDALWVLLRKGYDRVSVMRPQPGDTGRCINFTRVKNNQPAKYPLNNAYHTSSPPPAPIYTPPPPAPHCPPPPPSAPTPPIPSPPSTLPPPPQAPPPNRAPPPSRPPPRPSV

SEQ ID NO: 4112 - protein, 179 aa, Homo sapiens
MAATEPILAATGSPAAVPPEKLEGAGSSSAPERNCVGSSLPEASPPAPEPSSPNAAVPEAIPTPRAAASAALELPLGPAPVSVAPQAEAEARSTPGPAGSRLGPETFRQRFRQFRYQDAAGPREAFRQLRELSRQWLRPDIRTKEQIVEMLVQEQLLAILPEAARARRIRRRTDVRITG

SEQ ID NO: 4113 - protein, 377 aa, Homo sapiens
MKTLPLFVCICALSACFSFSEGRERDHELRHRRHHHQSPKSHFELPHYPGLLAHQKPFIRKSYKCLHKRCRPKLPPSPNNPPKFPNPHQPPKHPDKNSSVVNPTLVATTQIPSVTFPSASTKITTLPNVTFLPQNATTISSRENVNTSSSVATLAPVNSPAPQDTTAAPPTPSATTPAPPSSSAPPETTAAPPTPSATTQAPPSSSAPPETTAAPPTPPATTPAPPSSSAPPETTAAPPTPSATTPAPLSSSAPPETTAVPPTPSATTLDPSSASAPPETTAAPPTPSATTPAPPSSPAPQETTAAPITTPNSSPTTLAPDTSETSAAPTHQTTTSVTTQTTTTKQPTSAPGQNKISRFLLYMKNLLNRIIDDMVEQ

SEQ ID NO: 4114 - protein, 150 aa, Homo sapiens
MVLCFPLLLLLLVLWGPVCPLHAWPKRLTKAHWFEIQHIQPSPLQCNRAMSGINNYTQHCKHQNTFLHDSFQNVAAVCDLLSIVCKNRRHNCHQSSKPVNMTDCRLTSGKYPQCRYSAAAQYKFFIVACDPPQKSDPPYKLVPVHLDSIL

SEQ ID NO: 4115 - protein, 578 aa, Homo sapiens
MNISVDLETNYAELVLDVGRVTLGENSRKKMKDCKLRKKQNESVSRAMCALLNSGGGVIKAEIENEDYSYTKDGIGLDLENSFSNILLFVPEYLDFMQNGNYFLIFVKSWSLNTSGLRITTLSSNLYKRDITSAKVMNATAALEFLKDMKKTRGRLYLRPELLAKRPCVDIQEENNMKALAGVFFDRTELDRKEKLTFTESTHVEIKNFSTEKLLQRIKEILPQYVSAFANTDGGYLFIGLNEDKEIIGFKAEMSDLDDLEREIEKSIRKMPVHHFCMEKKKINYSCKFLGVYDKGSLCGYVCALRVERFCCAVFAKEPDSWHVKDNRVMQLTRKEWIQFMVEAEPKFSSSYEEVISQINTSLPAPHSWPLLEWQRQRHHCPGLSGRITYTPENLCRKLFLQHEGLKQLICEEMDSVRKGSLIFSRSWSVDLGLQENHKVLCDALLISQDSPPVLYTFHMVQDEEFKGYSTQTALTLKQKLAKIGGYTKKVCVMTKIFYLSPEGMTSCQYDLRSQVIYPESYYFTRRKYLLKALFKALKRLKSLRDQFSFAENLYQIIGIDCFQKNDKKMFKSCRRLT

SEQ ID NO: 4116 - protein, 219 aa, Homo sapiens
MVKYFLGQSVLRSSWDQVFAAFWQRYPNPYSKHVLTEDIVHREVTPDQKLLSRRLLTKTNRMPRWAERLFPANVAHSVYVLEDSIVDPQNQTMTTFTWNINHARLMVVEERCVYCVNSDNSGWTEIRREAWVSSSLFGVSRAVQEFGLARFKSNVTKTMKGFEYILAKLQGEAPSKTLVETAKEAKEKAKETALAATEKAKDLASKAATKKQQQQQQFV

SEQ ID NO: 4117 - protein, 903 aa, Homo sapiens
MEGYSEEASLLRHLEKVASEEEEVPLVVYLKENAALLTANGLHLSQNREAQQSSPAPPPAEVHSPAADVNQNLASPSATLTTPTSNSSHNPPATDVNQNPPATVVPQSLPLSSIQQNSSEAQLPSNGTGPASKPSTLCADGQPQAPAEEVRCSTLLIDKVSTPATTTSTFSREATLIPSSRPPASDFMSSSLLIDIQPNTLVVSADQEMSGRAAATTPTKVYSEVHFTLAKPPSVVNRTARPFGIQAPGGTSQMERSPMLERRHFGEKAPAPQPPSLPDRSPRPQRHIMSRSPMVERRMMGQRSPASERRPLGNFTAPPTYTETLSTAPLASWVRSPPSYSVLYPSSDPKSSHLKGQAVPASKTGILEESMARRGSRKSMFTFVEKPKVTPNPDLLDLVQTADEKRRQRDQGEVGVEEEPFALGAEASNFQQEPAPRDRASPAAAEEVVPEWASCLKSPRIQAKPKPKPNQNLSEASGKGAELYARRQSRMEKYVIESSSHTPELARCPSPTMSLPSSWKYPTNAPGAFRVASRSPARTPPASLYHGYLPENGVLRPEPTKQPPYQLRPSLFVLSPIKEPAKVSPRAASPAKPSSLDLVPNLPKGALPPSPALPRPSRSSPGLYTSPGQDSLQPTAVSPPYGGDISPVSPSRAWSPRAKQAPRPSFSTRNAGIEAQDRRESLPTSPPWTPGASRPPSSLDGWVSPGPWEPGRGSSMSSPPPLPPPPPMSPSWSERSVSPLRPETEARPPSRQLQALLARNIINAARRKSASPRSAGAENPRPFSPPRAPPPPPPPPPPPPRMRSPQPARPGSAAVPGAAFAPIPRSPLPAGPSSCTSPRSPLPAPPRPFLYRRSPTDSDVSLDSEDSGAKSPGILGYNICPRGWNGSLRLKRGSLPAEASCTT

SEQ ID NO: 4118 - protein, 183 aa, Homo sapiens
MQAPRAALVFALVIALVPVGRGNYEELENSGDTTVESERPNKVTIPSTFAAVTIKETLNANINSTNFAPDENQLEFILMVLIPLILLVLLLLSVVFLATYYKRKRTKQEPSSQGSQSALQTYELGSENVKVPIFEEDTPSVMEIEMEELDKWMNSMNRNADFECLPTLKEEKESNHNPSDSES

SEQ ID NO: 4119 - protein, 227 aa, Homo sapiens
MNIKGSPWKGSLLLLLVSNLLLCQSVAPLPICPGGAARCQVTLRDLFDRAVVLSHYIHNLSSEMFSEFDKRYTHGRGFITKAINSCHTSSLATPEDKEQAQQMNQKDFLSLIVSILRSWNEPLYHLVTEVRGMQEAPEAILSKAVEIEEQTKRLLEGMELIVSQVHPETKENEIYPVWSGLPSLQMADEESRLSAYYNLLHCLRRDSHKIDNYLKLLKCRIIHNNNC

SEQ ID NO: 4120 - protein, 102 aa, Homo sapiens
MADDVDQQQTTNTVEEPLDLIRLSLDERIYVKMRNDRELRGRLHAYDQHLNMILGDVEETVTTIEIDEETYEEIYKSTKRNIPMLFVRGDGVVLVAPPLRVG

SEQ ID NO: 4121 - protein, 553 aa, Homo sapiens
MAAPAGGGGSAVSVLAPNGRRHTVKVTPSTVLLQVLEDTCRRQDFNPCEYDLKFQRSVLDLSLQWRFANLPNNAKLEMVPASRSREGPENMVRIALQLDDGSRLQDSFCSGQTLWELLSHFPQIRECLQHPGGATPVCVYTRDEVTGEAALRGTTLQSLGLTGGSATIRFVMKCYDPVGKTPGSLGSSASAGQAAASAPLPLESGELSRGDLSRPEDADTSGPCCEHTQEKQSTRAPAAAPFVPFSGGGQRLGGPPGPTRPLTSSSAKLPKSLSSPGGPSKPKKSKSGQDPQQEQEQERERDPQQEQERERPVDREPVDREPVVCHPDLEERLQAWPAELPDEFFELTVDDVRRRLAQLKSERKRLEEAPLVTKAFREAQIKEKLERYPKVALRVLFPDRYVLQGFFRPSETVGDLRDFVRSHLGNPELSFYLFITPPKTVLDDHTQTLFQANLFPAALVHLGAEEPAGVYLEPGLLEHAISPSAADVLVARYMSRAAGSPSPLPAPDPAPKSEPAAEEGALVPPEPIPGTAQPVKRSLGKVPKWLKLPASKR

SEQ ID NO: 4122 - protein, 520 aa, Homo sapiens
MATTSTTGSTLLQPLSNAVQLPIDQVNFVVCQLFALLAAIWFRTYLHSSKTSSFIRHVVATLLGLYLALFCFGWYALHFLVQSGISYCIMIIIGVENMHNYCFVFALGYLTVCQVTRVYIFDYGQYSADFSGPMMIITQKITSLACEIHDGMFRKDEELTSSQRDLAVRRMPSLLEYLSYNCNFMGILAGPLCSYKDYITFIEGRSYHITQSGENGKEETQYERTEPSPNTAVVQKLLVCGLSLLFHLTICTTLPVEYNIDEHFQATASWPTKIIYLYISLLAARPKYYFAWTLADAINNAAGFGFRGYDENGAARWDLISNLRIQQIEMSTSFKMFLDNWNIQTALWLKRVCYERTSFSPTIQTFILSAIWHGVYPGYYLTFLTGVLMTLAARAMRNNFRHYFIEPSQLKLFYDVITWIVTQVAISYTVVPFVLLSIKPSLTFYSSWYYCLHILGILVLLLLPVKKTQRRKNTHENIQLSQSKKFDEGENSLGQNSFSTTNNVCNQNQEIASRHSSLKQ

SEQ ID NO: 4123 - protein, 364 aa, Homo sapiens
MHRLIFVYTLICANFCSCRDTSATPQSASIKALRNANLRRDDLYRRDETIQVKGNGYVQSPRFPNSYPRNLLLTWRLHSQENTRIQLVFDNQFGLEEAENDICRYDFVEVEDISETSTIIRGRWCGHKEVPPRIKSRTNQIKITFKSDDYFVAKPGFKIYYSLLEDFQPAAASETNWESVTSSISGVSYNSPSVTDPTLIADALDKKIAEFDTVEDLLKYFNPESWQEDLENMYLDTPRYRGRSYHDRKSKVDLDRLNDDAKRYSCTPRNYSVNIREELKLANVVFFPRCLLVQRCGGNCGCGTVNWRSCTCNSGKTVKKYHEVLQFEPGHIKRRGRAKTMALVDIQLDHHERCDCICSSRPPR

SEQ ID NO: 4124 - protein, 456 aa, Homo sapiens
MNKFQGPVTLKDVIVEFTKEEWKLLTPAQRTLYKDVMLENYSHLVSVGYHVNKPNAVFKLKQGKEPWILEVEFPHRGFPEDLWSIHDLEARYQESQAGNSRNGELTKHQKTHTTEKACECKECGKFFCQKSALIVHQHTHSKGKSYDCDKCGKSFSKNEDLIRHQKIHTRDKTYECKECKKIFYHLSSLSRHLRTHAGEKPYECNQCEKSFYQKPHLTEHQKTHTGEKPFECTECGKFFYVKAYLMVHQKTHTGEKPYECKECGKAFSQKSHLTVHQRMHTGEKPYKCKECGKFFSRNSHLKTHQRSHTGEKPYECKECRKCFYQKSALTVHQRTHTGEKPFECNKCGKTFYYKSDLTKHQRKHTGEKPYECTECGKSFAVNSVLRLHQRTHTGEKPYACKECGKSFSQKSHFIIHQRKHTGEKPYECQECGETFIQKSQLTAHQKTHTKKRNAEK

SEQ ID NO: 4125 - protein, 422 aa, Homo sapiens
MAKQLQARRLDGIDYNPWVEFVKLASEHDVVNLGQGFPDFPPPDFAVEAFQHAVSGDFMLNQYTKTFGYPPLTKILASFFGELLGQEIDPLRNVLVTVGGYGALFTAFQALVDEGDEVIIIEPFFDCYEPMTMMAGGRPVFVSLKPGPIQNGELGSSSNWQLDPMELAGKFTSRTKALVLNTPNNPLGKVFSREELELVASLCQQHDVVCITDEVYQWMVYDGHQHISIASLPGMWERTLTIGSAGKTFSATGWKVGWVLGPDHIMKHLRTVHQNSVFHCPTQSQAAVAESFEREQLLFRQPSSYFVQFPQAMQRCRDHMIRSLQSVGLKPIIPQGSYFLITDISDFKRKMPDLPGAVDEPYDRRFVKWMIKNKGLVAIPVSIFYSVPHQKHFDHYIRFCFVKDEATLQAMDEKLRKWKVEL

SEQ ID NO: 4126 - protein, 284 aa, Homo sapiens
MFDKTRLPYVALDVLCVLLAGLPFAILTSRHTPFQRGVFCNDESIKYPYKEDTIPYALLGGIIIPFSIIVIILGETLSVYCNLLHSNSFIRNNYIATIYKAIGTFLFGAAASQSLTDIAKYSIGRLRPHFLDVCDPDWSKINCSDGYIEYYICRGNAERVKEGRLSFYSGHSSFSMYCMLFVALYLQARMKGDWARLLRPTLQFGLVAVSIYVGLSRVSDYKHHWSDVLTGLIQGALVAILVAVYVSDFFKERTSFKERKEEDSHTTLHETPTTGNHYPSNHQP

SEQ ID NO: 4127 - protein, 286 aa, Homo sapiens
MEEKRRRARVQGAWAAPVKSQAIAQPATTAKSHLHQKPGQTWKNKEHHLSDREFVFKEPQQVVRRAPEPRVIDREGVYEISLSPTGVSRVCLYPGFVDVKEADWILEQLCQDVPWKQRTGIREDITYQQPRLTAWYGELPYTYSRITMEPNPHWHPVLRTLKNRIEENTGHTFNSLLCNLYRNEKDSVDWHSDDEPSLGRCPIIASLSFGATRTFEMRKKPPPEENGDYTYVERVKIPLDHGTLLIMEGATQADWQHRVPKEYHSREPRVNLTFRTVYPDPRGAPW

SEQ ID NO: 4128 - protein, 97 aa, Homo sapiens
MKVSAALLWLLLIAAAFSPQGLAGPASVPTTCCFNLANRKIPLQRLESYRRITSGKCPQKAVIFKTKLAKDICADPKKKWVQDSMKYLDQKSPTPKP

SEQ ID NO: 4129 - protein, 1118 aa, Homo sapiens
MPAVASVPKELYLSSSLKDLNKKTEVKPEKISTKSYVHSALKIFKTAEECRLDRDEERAYVLYMKYVTVYNLIKKRPDFKQQQDYFHSILGPGNIKKAVEEAERLSESLKLRYEEAEVRKKLEEKDRQEEAQRLQQKRQETGREDGGTLAKGSLENVLDSKDKTQKSNGEKNEKCETKEKGAITAKELYTMMTDKNISLIIMDARRMQDYQDSCILHSLSVPEEAISPGVTASWIEAHLPDDSKDTWKKRGNVEYVVLLDWFSSAKDLQIGTTLRSLKDALFKWESKTVLRNEPLVLEGGYENWLLCYPQYTTNAKVTPPPRRQNEEVSISLDFTYPSLEESIPSKPAAQTPPASIEVDENIELISGQNERMGPLNISTPVEPVAASKSDVSPIIQPVPSIKNVPQIDRTKKPAVKLPEEHRIKSESTNHEQQSPQSGKVIPDRSTKPVVFSPTLMLTDEEKARIHAETALLMEKNKQEKELRERQQEEQKEKLRKEEQEQKAKKKQEAEENEITEKQQKAKEEMEKKESEQAKKEDKETSAKRGKEITGVKRQSKSEHETSDAKKSVEDRGKRCPTPEIQKKSTGDVPHTSVTGDSGSGKPFKIKGQPESGILRTGTFREDTDDTERNKAQREPLTRARSEEMGRIVPGLPSGWAKFLDPITGTFRYYHSPTNTVHMYPPEMAPSSAPPSTPPTHKAKPQIPAERDREPSKLKRSYSSPDITQAIQEEEKRKPTVTPTVNRENKPTCYPKAEISRLSASQIRNLNPVFGGSGPALTGLRNLGNTCYMNSILQCLCNAPHLADYFNRNCYQDDINRSNLLGHKGEVAEEFGIIMKALWTGQYRYISPKDFKITIGKINDQFAGYSQQDSQELLLFLMDGLHEDLNKADNRKRYKEENNDHLDDFKAAEHAWQKHKQLNESIIVALFQGQFKSTVQCLTCHKKSRTFEAFMYLSLPLASTSKCTLQDCLRLFSKEEKLTDNNRFYCSHCRARRDSLKKIEIWKLPPVLLVHLKRFSYDGRWKQKLQTSVDFPLENLDLSQYVIGPKNNLKKYNLFSVSNHYGGLDGGHYTAYCKNAARQRWFKFDDHEVSDISVSSVKSSAAYILFYTSLGPRVTDVAT

SEQ ID NO: 4130 - protein, 329 aa, Homo sapiens
MLPLLLGLLGPAACWALGPTPGPGSSELRSAFSAARTTPLEGTSEMAVTFDKVYVNIGGDFDVATGQFRCRVPGAYFFSFTAGKAPHKSLSVMLVRNRDEVQALAFDEQRRPGARRAASQSAMLQLDYGDTVWLRLHGAPQYALGAPGATFSGYLVYADADADAPARGPPAPPEPRSAFSAARTRSLVGSDAGPGPRHQPLAFDTEFVNIGGDFDAAAGVFRCRLPGAYFFSFTLGKLPRKTLSVKLMKNRDEVQAMIYDDGASRRREMQSQSVMLALRRGDAVWLLSHDHDGYGAYSNHGKYITFSGFLVYPDLAPAAPPGLGASELL

SEQ ID NO: 4131 - protein, 327 aa, Homo sapiens
MRALPGLLEARARTPRLLLLQCLLAAARPSSADGSAPDSPFTSPPLREEIMANNFSLESHNISLTEHSSMPVEKNITLERPSNVNLTCQFTTSGDLNAVNVTWKKDGEQLENNYLVSATGSTLYTQYRFTIINSKQMGSYSCFFREEKEQRGTFNFKVPELHGKNKPLISYVGDSTVLTCKCQNCFPLNWTWYSSNGSVKVPVGVQMNKYVINGTYANETKLKITQLLEEDGESYWCRALFQLGESEEHIELVVLSYLVPLKPFLVIVAEVILLVATILLCEKYTQKKKKHSDEGKEFEQIEQLKSDDSNGIENNVPRHRKNESLGQ

SEQ ID NO: 4132 - protein, 548 aa, Homo sapiens
MAGLRARGGPGPGLLALSALGFCLMLQVSAKRPPKTPPCPPSCSCTRDTAFCVDSKAVPRNLPSEVISLTLVNAAFSEIQDGAFSHLPLLQFLLLNSNKFTLIGDNAFTGLSHLQYLFIENNDIWALSKFTFRGLKSLTHLSLANNNLQTLPRDIFRPLDILNDLDLRGNSLNCDCKVKWLVEWLAHTNTTVAPIYCASPPRFQEHKVQDLPLREFDCITTDFVLYQTLAFPAVSAEPFLYSSDLYLALAQPGVSACTILKWDYVERQLRDYDRIPAPSAVHCKPMVVDSQLYVVVAQLFGGSYIYHWDPNTTRFTRLQDIDPQRVRKPNDLEAFRIDGDWYFAVADSSKAGATSLYRWHQNGFYSHQALHPWHRDTDLEFVDGEGKPRLIVSSSSQAPVIYQWSRTQKQFVAQGEVTQVPDAQAVKHFRAGRDSYLCLSRYIGDSKILRWEGTRFSEVQALPSRGSLALQPFLVGGRRYLALGSDFSFTQIYQWDEGRQKFVRFQELAVQAPRAFCYMPAGDAQLLLAPSFKGQTLVYRHIVVDLSA

SEQ ID NO: 4133 - protein, 390 aa, Homo sapiens
MKETRGYGGDAPFCTRLNHSYTGMWAPERSAEARGNLTRPPGSGEDCGSVSVAFPITMLLTGFVGNALAMLLVSRSYRRRESKRKKSFLLCIGWLALTDLVGQLLTTPVVIVVYLSKQRWEHIDPSGRLCTFFGLTMTVFGLSSLFIASAMAVERALAIRAPHWYASHMKTRATRAVLLGVWLAVLAFALLPVLGVGQYTVQWPGTWCFISTGRGGNGTSSSHNWGNLFFASAFAFLGLLALTVTFSCNLATIKALVSRCRAKATASQSSAQWGRITTETAIQLMGIMCVLSVCWSPLLIMMLKMIFNQTSVEHCKTHTEKQKECNFFLIAVRLASLNQILDPWVYLLLRKILLRKFCQIRYHTNNYASSSTSLPCQCSSTLMWSDHLER

SEQ ID NO: 4134 - protein, 160 aa, Homo sapiens
MVPKLFTSQICLLLLLGLMGVEGSLHARPPQFTRAQWFAIQHISLNPPRCTIAMRAINNYRWRCKNQNTFLRTTFANVVNVCGNQSIRCPHNRTLNNCHRSRFRVPLLHCDLINPGAQNISNCTYADRPGRRFYVVACDNRDPRDSPRYPVVPVHLDTTI

SEQ ID NO: 4135 - protein, 79 aa, Homo sapiens
MKSLTWILGLWALAACFTPGESQRGPRGPYPPGPLAPPQPFGPGFVPPPPPPPYGPGRIPPPPPAPYGPGIFPPPPPQP

SEQ ID NO: 4136 - protein, 370 aa, Homo sapiens
MVGKLKQNLLLACLVISSVTVFYLGQHAMECHHRIEERSQPVKLESTRTTVRTGLDLKANKTFAYHKDMPLIFIGGVPRSGTTLMRAMLDAHPDIRCGEETRVIPRILALKQMWSRSSKEKIRLDEAGVTDEVLDSAMQAFLLEIIVKHGEPAPYLCNKDPFALKSLTYLSRLFPNAKFLLMVRDGRASVHSMISRKVTIAGFDLNSYRDCLTKWNRAIETMYNQCMEVGYKKCMLVHYEQLVLHPERWMRTLLKFLQIPWNHSVLHHEEMIGKAGGVSLSKVERSTDQVIKPVNVGALSKWVGKIPPDVLQDMAVIAPMLAKLGYDPYANPPNYGKPDPKIIENTRRVYKGEFQLPDFLKEKPQTEQVE

SEQ ID NO: 4137 - protein, 248 aa, Homo sapiens
MGLSRVRAVFFDLDNTLIDTAGASRRGMLEVIKLLQSKYHYKEEAEIICDKVQVKLSKECFHPYNTCITDLRTSHWEEAIQETKGGAANRKLAEECYFLWKSTRLQHMTLAEDVKAMLTELRKEVRLLLLTNGDRQTQREKIEACACQSYFDAVVVGGEQREEKPAPSIFYYCCNLLGVQPGDCVMVGDTLETDIQGGLNAGLKATVWINKNGIVPLKSSPVPHYMVSSVLELPALLQSIDCKVSMST

SEQ ID NO: 4138 - protein, 664 aa, Homo sapiens
MLMDAGQDYMVFEDVAIHFSQEEWGILNDVQRHLHSDVMLENFALLSSVGCWHGAKDEEAPSKQCVSVGVSQVTTLKPALSTQKAQPCETCSSLLKDILHLAEHDGTHPKRTAKLYLHQKEHLREKLTRSDEGRPSFVNDSVHLAKRNLTCMQGGKDFTGDSDLQQQALHSGWKPHRDTHGVEAFQSGQNNYSCTQCGKDFCHQHTLFEHQKIHTEERPYECSECGKLFRYNSDLIKHQRNHTGERPYKCSECGKAFSLKYNVVQHQKIHTGERPYECSECGKAFLRKSHLLQHQRIHTRPRPYVCSECGKAFLTQAHLVGHQKIHTGERPYGCNECGKYFMYSSALIRHQKVHTGERPFYCCECGKFFMDSCTLIIHQRVHTGEKPYECNECGKFFRYRSTLIRHQKVHTGEKPYECSECGKFFMDTSTLIIHQRVHTGEKPYECNKCGKFFRYCFTLNRHQRVHSGERPYECSECGKFFVDSCTLKSHQRVHTGERPFECSICGKSFRCRSTLDTHQRIHTGERPYECSECGKFFRHNSNHIRHRRNHFGERSFECTECGRVFSQNSHLIRHQKVHTRERTYKCSKCGKFFMDSSTLISHERVHTGEKPYECSECGKVFRYNSSLIKHRRIHTGERPYQCSECGRVFNQNSHLIQHQKVHTR

SEQ ID NO: 4139 - protein, 288 aa, Homo sapiens
MAAAAYVDHFAAECLVSMSSRAVVHGPREGPESRPEGAAVAATPTLPRVEERRDGKDSASLFVVARILADLNQQAPAPAPAERREGAAARKARTPCRLPPPAPEPTSPGAEGAAAAPPSPAWSEPEPEAGLEPEREPGPAGSGEPGLRQRVRRGRSRADLESPQRKHKCHYAGCEKVYGKSSHLKAHLRTHTGERPFACSWQDCNKKFARSDELARHYRTHTGEKKFSCPICEKRFMRSDHLTKHARRHANFHPGMLQRRGGGSRTGSLSDYSRSDASSPTISPASSP

SEQ ID NO: 4140 - protein, 182 aa, Homo sapiens
MSGRSVPHAHPATAEYEFANPSRLGEQRFGEGLLPEEILTPTLYHGYYVRPRAAPAGEGSRAGASELRLSEGKFQAFLDVSHFTPDEVTVRTVDNLLEVSARHPQRLDRHGFVSREFCRTYVLPADVDPWRVRAALSHDGILNLEAPRGGRHLDTEVNEVYISLLPAPPDPEEEEEAAIVEP

SEQ ID NO: 4141 - protein, 133 aa, Homo sapiens
MEEDQELERKISGLKTSMAEGERKTALEMVQAAGTDRHCVTFVLHEEDHTLGNSLRYMIMKNPEVEFCGYTTTHPSESKINLRIQTRGTLPAVEPFQRGLNELMNVCQHVLDKFEASIKDYKDQKASRNESTF

SEQ ID NO: 4142 - protein, 393 aa, Homo sapiens [sequence omitted]

SEQ ID NO: 4143 - protein, 714 aa, Homo sapiens
MPVRFKGLSEYQRNFLWKKSYLSESCNSSVGRKYPWAGLRSDQLGITKEPSFISKRRVPYHDPQISKSLEWNGAISESNVVASPEPEAPETPKSQEAEQKDVTQERVHSLEASRVPKRTRSHSADSRAEGASDVENNEGVTNHTPVNENVELEHSTKVLSENVDNGLDRLLRKKAGLTVVPSYNALRNSEYQRQFVWKTSKETAPAFAANQVFHNKSQFVPPFKGNSVIHETEYKRNFKGLSPVKEPKLRNDLRENRNLETVSPERKSNKIDDRLKLEAEMELKDLHQPKRKLTPWKHQRLGKVNSEYRAKFLSPAQYLYKAGAWTHVKGNMPNQVKELREKAEFYRKRVQGTHFSRDHLNQILSDSNCCWDVSSTTSSEGTVSSNIRALDLAGDPTSHKTLQKCPSTEPEEKGNIVEEQPQKNTTEKLGVSAPTIPVRRRLAWDTENTSEDVQKQPGEKEEEDDNEEEGDRKTGKQAFMGEQEKLDVREKSKADKMKEGSDSSVSSEKGGRLPTPKLRELGGIQRTHHDLTTPAVGGAVLVSPSKMKPPAPEQRKRMTSQDCLETSKNDFTKKESRAVSLLTSPAAGIKTVDPLPLREDSEDNIHKFAEATLPVSKIPKYPTNPPGQLPSPPHVPSYWHPSRRIQGSLRDPEFQHNVGKARMNNLQLPQHEAFNDEDEDRLSEISARSAASSLRAFQTLARAKKRKENFWGKT

SEQ ID NO: 4144 - protein, 322 aa, Homo sapiens
MSSLGGGSQDAGGSSSSSTNGSGGSGSSGPKAGAADKSAVVAAAAPASVADDTPPPERRNKSGIISEPLNKSLRRSRPLSHYSSFGSSGGSGGGSMMGGESADKATAAAAAASLLANGHDLAAAMAVDKSNPTSKHKSGAVASLLSKAERATELAAEGQLTLQQFAQSTEMLKRVVQEHLPLMSEAGAGLPDMEAVAGAEALNGQSDFPYLGAFPINPGLFIMTPAGVFLAESALHMAGLAEYPMQGELASAISSGKKKRKRCGMCAPCRRRINCEQCSSCRNRKTGHQICKFRKCEELKKKPSAALEKVMLPTGAAFRWFQ

SEQ ID NO: 4145 - protein, 175 aa, Homo sapiens
MAGRVPSLLVLLVFPSSCLAFRSPLSVFKRFKETTRPFSNECLGTTRPVVPIDSSDFALDIRMPGVTPKQLTSSLEPAWILSITCYFLDAICLHPLEVTGFVMKEPVQIKPIFCMPGREMLPLPGSPKVLDSELEERLEVNTLYYRYTMGILVLLEIITRTVLVCPYTSHVCHSL

SEQ ID NO: 4146 - protein, 1767 aa, Homo sapiens
MEPWSSRWKTKRWLWDFTVTTLALTFLFQAREVRGAAPVDVLKALDFHNSPEGISKTTGFCTNRKNSKGSDTAYRVSKQAQLSAPTKQLFPGGTFPEDFSILFTVKPKKGIQSFLLSIYNEHGIQQIGVEVGRSPVFLFEDHTGKPAPEDYPLFRTVNIADGKWHRVAISVEKKTVTMIVDCKKKTTKPLDRSERAIVDTNGITVFGTRILDEEVFEGDIQQFLITGDPKAAYDYCEHYSPDCDSSAPKAAQAQEPQIDEANIVDDFQEYNYGTMESYQTEAPRHVSGTNEPNPVEEIFTEEYLTGEDYDSQRKNSEDTLYENKEIDGRDSDLLVDGDLGEYDFYEYKEYEDKPTSPPNEEFGPGVPAETDITETSINGHGAYGEKGQKGEPAVVEPGMLVEGPPGPAGPAGIMGPPGLQGPTGPPGDPGDRGPPGRPGLPGADGLPGPPGTMLMLPFRYGGDGSKGPTISAQEAQAQAILQQARIALRGPPGPMGLTGRPGPVGGPGSSGAKGESGDPGPQGPRGVQGPPGPTGKPGKRGRPGADGGRGMPGEPGAKGDRGFDGLPGLPGDKGHRGERGPQGPPGPPGDDGMRGEDGEIGPRGLPGEAGPRGLLGPRGTPGAPGQPGMAGVDGPPGPKGNMGPQGEPGPPGQQGNPGPQGLPGPQGPIGPPGEKGPQGKPGLAGLPGADGPPGHPGKEGQSGEKGALGPPGPQGPIGYPGPRGVKGADGVRGLKGSKGEKGEDGFPGFKGDMGLKGDRGEVGQIGPRGEDGPEGPKGRAGPTGDPGPSGQAGEKGKLGVPGLPGYPGRQGPKGSTGFPGFPGANGEKGARGVAGKPGPRGQRGPTGPRGSRGARGPTGKPGPKGTSGGDGPPGPPGERGPQGPQGPVGFPGPKGPPGPPGKDGLPGHPGQRGETGFQGKTGPPGPGGVVGPQGPTGETGPIGERGHPGPPGPPGEQGLPGAAGKEGAKGDPGPQGISGKDGPAGLRGFPGERGLPGAQGAPGLKGGEGPQGPPGPVGSPGERGSAGTAGPIGLPGRPGPQGPPGPAGEKGAPGEKGPQGPAGRDGVQGPVGLPGPAGPAGSPGEDGDKGEIGEPGQKGSKGDKGENGPPGPPGLQGPVGAPGIAGGDGEPGPRGQQGMFGQKGDEGARGFPGPPGPIGLQGLPGPPGEKGENGDVGPMGPPGPPGPRGPQGPNGADGPQGPPGSVGSVGGVGEKGEPGEAGNPGPPGEAGVGGPKGERGEKGEAGPPGAAGPPGAKGPPGDDGPKGNPGPVGFPGDPGPPGEPGPAGQDGVGGDKGEDGDPGQPGPPGPSGEAGPPGPPGKRGPPGAAGAEGRQGEKGAKGEAGAEGPPGKTGPVGPQGPAGKPGPEGLRGIPGPVGEQGLPGAAGQDGPPGPMGPPGLPGLKGDPGSKGEKGHPGLIGLIGPPGEQGEKGDRGLPGTQGSPGAKGDGGIPGPAGPLGPPGPPGLPGPQGPKGNKGSTGPAGQKGDSGLPGPPGSPGPPGEVIQPLPILSSKKTRRHTEGMQADADDNILDYSDGMEEIFGSLNSLKQDIEHMKFPMGTQTNPARTCKDLQLSHPDFPDGEYWIDPNQGCSGDSFKVYCNFTSGGETCIYPDKKSEGVRISSWPKEKPGSWFSEFKRGKLLSYLDVEGNSINMVQMTFLKLLTASARQNFTYHCHQSAAWYDVSSGSYDKALRFLGSNDEEMSYDNNPFIKTLYDGCASRKGYEKTVIEINTPKIDQVPIVDVMINDFGDQNQKFGFEVGPVCFLG

SEQ ID NO: 4147 - protein, 509 aa, Homo sapiens
MDFLLALVLVSSLYLQAAAEFDGRWPRQIVSSIGLCRYGGRIDCCWGWARQSWGQCQPVCQPRCKHGECIGPNKCKCHPGYAGKTCNQDLNECGLKPRPCKHRCMNTYGSYKCYCLNGYMLMPDGSCSSALTCSMANCQYGCDVVKGQIRCQCPSPGLQLAPDGRTCVDVDECATGRASCPRFRQCVNTFGSYICKCHKGFDLMYIGGKYQCHDIDECSLGQYQCSSFARCYNIRGSYKCKCKEGYQGDGLTCVYIPKVMIEPSGPIHVPKGNGTILKGDTGNNNWIPDVGSTWWPPKTPYIPPIITNRPTSKPTTRPTPKPTPIPTPPPPPPLPTELRTPLPPTTPERPTTGLTTIAPAASTPPGGITVDNRVQTDPQKPRGDVFSVLVHSCNFDHGLCGWIREKDNDLHWEPIRDPAGGQYLTVSAAKAPGGKAARLVLPLGRLMHSGDLCLSFRHKVTGLHSGTLQVFVRKHGAHGAALWGRNGGHGWRQTQITLRGADIKSESQR

SEQ ID NO: 4148 - protein, 488 aa, Homo sapiens
MAAGSEATTPVIVAAGAGGEEGEHVKPFKPEKAKEIIMSLQQPAIFCNMVFDWPARHWNAKYLSQVLHGKQIRFRMGMKSMSTVPQFETTCNYVEATLEEFLTWNCDQSSISGPFRDYDHSKFWAYADYKYFVSLFEDKTDLFQDVKWSDFGFPGRNGQESTLWIGSLGAHTPCHLDSYGCNLVFQVQGRKRWHLFPPEDTPFLYPTRIPYEESSVFSKINVVNPDLKRFPQFRKAQRHAVTLSPGQVLFVPRHWWHYVESIDPVTVSINSWIELEEDHLARVEEAITRMLVCALKTAENPQNTRAWLNPTEVEETSHAVNCCYLNAAVSAFFDRCRTSEVVEIQALRTDGEHMKKEELNVCNHMEVGQTGSQNLTTGTDKPEAASPFGPDLVPVAQRSEEPPSERGGIFGSDGKDFVDKDGEHFGKLHCAKRQQIMSNSENAIEEQIASNTTTTPQTFISTDDLLDCLVNPQVTRIVAQLLIQGRSL

SEQ ID NO: 4149 - protein, 233 aa, Homo sapiens
MSQSNRELVVDFLSYKLSQKGYSWSQFSDVEENRTEAPEGTESEMETPSAINGNPSWHLADSPAVNGATGHSSSLDAREVIPMAAVKQALREAGDEFELRYRRAFSDLTSQLHITPGTAYQSFEQVVNELFRDGVNWGRIVAFFSFGGALCVESVDKEMQVLVSRIAAWMATYLNDHLEPWIQENGGWDTFVELYGNNAAAESRKGQERFNRWFLTGMTVAGVVLLGSLFSRK

SEQ ID NO: 4150 - protein, 371 aa, Homo sapiens
MSSRGGKKKSTKTSRSAKAGVIFPVGRMLRYIKKGHPKYRIGVGAPVYMAAVLEYLTAEILELAGNAARDNKKGRVTPRHILLAVANDEELNQLLKGVTIASGGVLPNIHPELLAKKRGSKGKLEAIITPPPAKKAKSPSQKKPVSKKAGGKKGARKSKKQGEVSKAASADSTTEGTPADGFTVLSTKSLFLGQKLNLIHSEISNLAGFEVEAIINPTNADIDLKDDLGNTLEKKGGKEFVEAVLELRKKNGPLEVAGAAVSAGHGLPAKFVIHCNSPVWGADKCEELLEKTVKNCLALADDKKLKSIAFPSIGSGRNGFPKQTAAQLILKAISSYFVSTMSSSIKTVYFVLFDSESIGIYVQEMAKLDAN

SEQ ID NO: 4151 - protein, 623 aa, Homo sapiens
MSTQDERQINTEYAVSLLEQLKLFYEQQLFTDIVLIVEGTEFPCHKMVLATCSSYFRAMFMSGLSESKQTHVHLRNVDAATLQIIITYAYTGNLAMNDSTVEQLYETACFLQVEDVLQRCREYLIKKINAENCVRLLSFADLFSCEELKQSAKRMVEHKFTAVYHQDAFMQLSHDLLIDILSSDNLNVEKEETVREAAMLWLEYNTESRSQYLSSVLSQIRIDALSEVTQRAWFQGLPPNDKSVVVQGLYKSMPKFFKPRLGMTKEEMMIFIEASSENPCSLYSSVCYSPQAEKVYKLCSPPADLHKVGTVVTPDNDIYIAGGQVPLKNTKTNHSKTSKLQTAFRTVNCFYWFDAQQNTWFPKTPMLFVRIKPSLVCCEGYIYAIGGDSVGGELNRRTVERYDTEKDEWTMVSPLPCAWQWSAAVVVHDCIYVMTLNLMYCYFPRSDSWVEMAMRQTSRSFASAAAFGDKIFYIGGLHIATNSGIRLPSGTVDGSSVTVEIYDVNKNEWKMAANIPAKRYSDPCVRAVVISNSLCVFMRETHLNERAKYVTYQYDLELDRWSLRQHISERVLWDLGRDFRCTVGKLYPSCLEESPWKPPTYLFSTDGTEEFELDGEMVALPPV

SEQ ID NO: 4152 - protein, 347 aa, Homo sapiens
MSSWSRQRPKSPGGIQPHVSRTLFLLLLLAASAWGVTLSPKDCQVFRSDHGSSISCQPPAEIPGYLPADTVHLAVEFFNLTHLPANLLQGASKLQELHLSSNGLESLSPEFLRPVPQLRVLDLTRNALTGLPPGLFQASATLDTLVLKENQLEVLEVSWLHGLKALGHLDLSGNRLRKLPPGLLANFTLLRTLDLGENQLETLPPDLLRGPLQLERLHLEGNKLQVLGKDLLLPQPDLRYLFLNGNKLARVAAGAFQGLRQLDMLDLSNNSLASVPEGLWASLGQPNWDMRDGFDISGNPWICDQNLSDLYRWLQAQKDKMFSQNDTRCAGPEAVKGQTLLAVAKSQ

SEQ ID NO: 4153 - protein, 843 aa, Homo sapiens
MSSAMLVTCLPDPSSSFREDAPRPPVPGEEGETPPCQPGVGKGQVTKPMPVSSNTRRNEDGLGEPEGRASPDSPLTRWTKSLHSLLGDQDGAYLFRTFLEREKCVDTLDFWFACNGFRQMNLKDTKTLRVAKAIYKRYIENNSIVSKQLKPATKTYIRDGIKKQQIDSIMFDQAQTEIQSVMEENAYQMFLTSDIYLEYVRSGGENTAYMSNGGLGSLKVVCGYLPTLNEEEEWTCADFKCKLSPTVVGLSSKTLRATASVRSTETVDSGYRSFKRSDPVNPYHIGSGYVFAPATSANDSEISSDALTDDSMSMTDSSVDGIPPYRVGSKKQLQREMHRSVKANGQVSLPHFPRTHRLPKEMTPVEPATFAAELISRLEKLKLELESRHSLEERLQQIREDEEREGSELTLNSREGAPTQHPLSLLPSGSYEEDPQTILDDHLSRVLKTPGCQSPGVGRYSPRSRSPDHHHHHHSQYHSLLPPGGKLPPAAASPGACPLLGGKGFVTKQTTKHVHHHYIHHHAVPKTKEEIEAEATQRVHCFCPGGSEYYCYSKCKSHSKAPETMPSEQFGGSRGSTLPKRNGKGTEPGLALPAREGGAPGGAGALQLPREEGDRSQDVWQWMLESERQSKPKPHSAQSTKKAYPLESARSSPGERASRHHLWGGNSGHPRTTPRAHLFTQDPAMPPLTPPNTLAQLEEACRRLAEVSKPPKQRCCVASQQRDRNHSATVQTGATPFSNPSLAPEDHKEPKKLAGVHALQASELVVTYFFCGEEIPYRRMLKAQSLTLGHFKEQLSKKGNYRYYFKKASDEFACGAVFEEIWEDETVLPMYEGRILGKVERID

SEQ ID NO: 4154 - protein, 882 aa, Homo sapiens
MAVRSRRPWMSVALGLVLGFTAASWLIAPRVAELSERKRRGSSLCSYYGRSAAGPRAGAQQPLPQPQSRPRQEQSPPPARQDLQGPPLPEAAPGITSFRSSPWQQPPPLQQRRRGREPEGATGLPGAPAAEGEPEEEDGGAAGQRRDGRPGSSHNGSGDGGAAAPSARPRDFLYVGVMTAQKYLGSRALAAQRTWARFIPGRVEFFSSQQPPNAGQPPPPLPVIALPGVDDSYPPQKKSFMMIKYMHDHYLDKYEWFMRADDDVYIKGDKLEEFLRSLNSSKPLYLGQTGLGNIEELGKLGLEPGENFCMGGPGMIFSREVLRRMVPHIGECLREMYTTHEDVEVGRCVRRFGGTQCVWSYEMQQLFHENYEHNRKGYIQDLHNSKIHAAITLHPNKRPAYQYRLHNYMLSRKISELRYRTIQLHRESALMSKLSNTEVSKEDQQLGVIPSFNHFQPRERNEVIEWEFLTGKLLYSAAENQPPRQSLSSILRTALDDTVLQVMEMINENAKSRGRLIDFKEIQYGYRRVNPMHGVEYILDLLLLYKRHKGRKLTVPVRRHAYLQQLFSKPFFRETEELDVNSLVESINSETQSFSFISNSLKILSSFQGAKEMGGHNEKKVHILVPLIGRYDIFLRFMENFENMCLIPKQNVKLVIILFSRDSGQDSSKHIELIKGYQNKYPKAEMTLIPMKGEFSRGLGLEMASAQFDNDTLLLFCDVDLIFREDFLQRCRDNTIQGQQVYYPIIFSQYDPKVTNGGNPPTDDYFIFSKKTGFWRDYGYGITCIYKSDLLGAGGFDTSIQGWGLEDVDLYNKVILSGLRPFRSQEVGVVHIFHPVHCDPNLDPKQYKMCLGSKASTFASTMQLAELWLEKHLGVRYNRTLS

SEQ ID NO: 4155 - protein, 764 aa, Homo sapiens
MNGEADCPTDLEMAAPKGQDRWSQEDMLTLLECMKNNLPSNDSSKFKTTESHMDWEKVAFKDFSGDMCKLKWVEISNEVRKFRTLTELILDAQEHVKNPYKGKKLKKHPDFPKKPLTPYFRFFMEKRAKYAKLHPEMSNLDLTKILSKKYKELPEKKKMKYIQDFQREKQEFERNLARFREDHPDLIQNAKKSDIPEKPKTPQQLWYTHEKKVYLKVRPDATTKEVKDSLGKQWSQLSDKKRLKWIHKALEQRKEYEEIMRDYIQKHPELNISEEGITKSTLTKAERQLKDKFDGRPTKPPPNSYSLYCAELMANMKDVPSTERMVLCSQQWKLLSQKEKDAYHKKCDQKKKDYEVELLRFLESLPEEEQQRVLGEEKMLNINKKQATSPASKKPAQEGGKGGSEKPKRPVSAMFIFSEEKRRQLQEERPELSESELTRLLARMWNDLSEKKKAKYKAREAALKAQSERKPGGEREERGKLPESPKRAEEIWQQSVIGDYLARFKNDRVKALKAMEMTWNNMEKKEKLMWIKKAAEDQKRYERELSEMRAPPAATNSSKKMKFQGEPKKPPMNGYQKFSQELLSNGELNHLPLKERMVEIGSRWQRISQSQKEHYKKLAEEQQKQYKVHLDLWVKSLSPQDRAAYKEYISNKRKSMTKLRGPNPKSSRTTLQSKSESEEDDEEDEDDEDEDEEEEDDENGDSSEDGGDSSESSSEDESEDGDENEEDDEDEDDDEDDDEDEDNESEGSSSSSSSSGDSSDSDSN

SEQ ID NO: 4156 - protein, 197 aa, Homo sapiens
MQRWKAAALASVLCSSVLSIWMCREGLLLSHRLGPALVPLHRLPRTLDARIARLAQYRALLQGAPDAMELRELTPWAGRPPGPRRRAGPRRRRARARLGARPCGLRELEVRVSELGLGYASDETVLFRYCAGACEAAARVYDLGLRRLRQRRRLRRERVRAQPCCRPTAYEDEVSFLDAHSRYHTVHELSARECACV

SEQ ID NO: 4157 - protein, 468 aa, Homo sapiens
MPPWGAALALILAVLALLGLLGPRLRGPWGRAVGERTLPGAQDRDDGEEADGGGPADQFSDGREPLPGGCSLVCKPSALAQCLLRALRRSEALEAGPRSWFSGPHLQTLCHFVLPVAPGPELAREYLQLADDGLVALDWVVGPCVRGRRITSAGGLPAVLLVIPNAWGRLTRNVLGLCLLALERGYYPVIFHRRGHHGCPLVSPRLQPFGDPSDLKEAVTYIRFRHPAAPLFAVSEGSGSALLLSYLGECGSSSYVTGAACISPVLRCREWFEAGLPWPYERGFLLHQKIALSRYATALEDTVDTSRLFRSRSLREFEEALFCHTKSFPISWDTYWDRNDPLRDVDEAAVPVLCICSADDPVCGPPDHTLTTELFHSNPYFFLLLSRHGGHCGFLRQEPLPAWSHEVILESFRALTEFFRTEERIKGLSRHRASFLGGRRRGGALQRREVSSSSNLEEIFNWKRSYTR

SEQ ID NO: 4158 - protein, 206 aa, Homo sapiens
MKDNDIKRLLYTHLLCIFSIILSVFIPSLFLENFSILETHLTWLCICSGFVTAVNLVLYLVVKPNTSSKRSSLSHKVTGFLKCCIYFLMSCFSFHVIFVLYGAPLIELALETFLFAVILSTFTTVPCLCLLGPNLKAWLRVFSRNGVTSIWENSLQITTISSFVGAWLGALPIPLDWERPWQMTVERKRSTYRSLHVPCRGLGTVK

SEQ ID NO: 4159 - protein, 350 aa, Homo sapiens
METNSSLPTNISGGTPAVSAGYLFLDIITYLVFAVTFVLGVLGNGLVIWVAGFRMTHTVTTISYLNLAVADFCFTSTLPFFMVRKAMGGHWPFGWFLCKFVFTIVDINLFGSVFLIALIALDRCVCVLHPVWTQNHRTVSLAKKVIIGPWVMALLLTLPVIIRVTTVPGKTGTVACTFNFSPWTNDPKERINVAVAMLTVRGIIRFIIGFSAPMSIVAVSYGLIATKIHKQGLIKSSRPLRVLSFVAAAFFLCWSPYQVVALIATVRIRELLQGMYKEIGIAVDVTSALAFFNSCLNPMLYVFMGQDFRERLIHALPASLERALTEDSTQTSDTATNSTLPSAEVELQAK

SEQ ID NO: 4160 - protein, 4493 aa, Homo sapiens
MPRPGTMALCLLTLVLSLLPPQAAAEQDLSVNRAVWDGGGCISQGDVLNRQCQQLSQHVRTGSAANTATGTTSTNVVEPRMYLSCSTNPEMTSIESSVTSDTPGVSSTRMTPTESRTTSESTSDSTTLFPSSTEDTSSPTTPEGTDVPMSTPSEESISSTMAFVSTAPLPSFEAYTSLTYKVDMSTPLTTSTQASSSPTTPESTTIPKSTNSEGSTPLTSMPASTMKVASSEAITLLTTPVEISTPVTISAQASSSPTTAEGPSLSNSAPSGGSTPLTRMPLSVMLVVSSEASTLSTTPAATNIPVITSTEASSSPTTAEGTSIPTSTYTEGSTPLTSTPASTMPVATSEMSTLSITPVDTSTLVTTSTEPSSLPTTAEATSMLTSTLSEGSTPLTNMPVSTILVASSEASTTSTIPVDSKTFVTTASEASSSPTTAEDTSIATSTPSEGSTPLTSMPVSTTPVASSEASNLSTTPVDSKTQVTTSTEASSSPPTAEVNSMPTSTPSEGSTPLTSMSVSTMPVASSEASTLSTTPVDTSTPVTTSSEASSSSTTPEGTSIPTSTPSEGSTPLTNMPVSTRLVVSSEASTTSTTPADSNTFVTTSSEASSSSTTAEGTSMPTSTYSERGTTITSMSVSTTLVASSEASTLSTTPVDSNTPVTTSTEATSSSTTAEGTSMPTSTYTEGSTPLTSMPVNTTLVASSEASTLSTTPVDTSTPVTTSTEASSSPTTADGASMPTSTPSEGSTPLTSMPVSKTLLTSSEASTLSTTPLDTSTHITTSTEASCSPTTTEGTSMPISTPSEGSPLLTSIPVSITPVTSPEASTLSTTPVDSNSPVTTSTEVSSSPTPAEGTSMPTSTYSEGRTPLTSMPVSTTLVATSAISTLSTTPVDTSTPVTNSTEARSSPTTSEGTSMPTSTPGEGSTPLTSMPDSTTPVVSSEARTLSATPVDTSTPVTTSTEATSSPTTAEGTSIPTSTPSEGTTPLTSTPVSHTLVANSEASTLSTTPVDSNTPLTTSTEASSPPPTAEGTSMPTSTPSEGSTPLTRMPVSTTMVASSETSTLSTTPADTSTPVTTYSQASSSSTTADGTSMPTSTYSEGSTPLTSVPVSTRLVVSSEASTLSTTPVDTSIPVTTSTEASSSPTTAEGTSIPTSPPSEGTTPLASMPVSTTLVVSSEANTLSTTPVDSKTQVATSTEASSPPPTAEVTSMPTSTPGERSTPLTSMPVRHTPVASSEASTLSTSPVDTSTPVTTSAETSSSPTTAEGTSLPTSTTSEGSTLLTSIPVSTTLVTSPEASTLLTTPVDTKGPVVTSNEVSSSPTPAEGTSMPTSTYSEGRTPLTSIPVNTTLVASSAISILSTTPVDNSTPVTTSTEACSSPTTSEGTSMPNSNPSEGTTPLTSIPVSTTPVVSSEASTLSATPVDTSTPGTTSAEATSSPTTAEGISIPTSTPSEGKTPLKSIPVSNTPVANSEASTLSTTPVDSNSPVVTSTAVSSSPTPAEGTSIAISTPSEGSTALTSIPVSTTTVASSEINSLSTTPAVTSTPVTTYSQASSSPTTADGTSMQTSTYSEGSTPLTSLPVSTMLVVSSEANTLSTTPIDSKTQVTASTEASSSTTAEGSSMTISTPSEGSPLLTSIPVSTTPVASPEASTLSTTPVDSNSPVITSTEVSSSPTPAEGTSMPTSTYTEGRTPLTSITVRTTPVASSAISTLSTTPVDNSTPVTTSTEARSSPTTSEGTSMPNSTPSEGTTPLTSIPVSTTPVLSSEASTLSATPIDTSTPVTTSTEATSSPTTAEGTSIPTSTLSEGMTPLTSTPVSHTLVANSEASTLSTTPVDSNSPVVTSTAVSSSPTPAEGTSIATSTPSEGSTALTSIPVSTTTVASSETNTLSTTPAVTSTPVTTYAQVSSSPTTADGSSMPTSTPREGRPPLTSIPVSTTTVASSEINTLSTTLADTRTPVTTYSQASSSPTTADGTSMPTPAYSEGSTPLTSMPLSTTLVVSSEASTLSTTPVDTSTPATTSTEGSSSPTTAGGTSIQTSTPSERTTPLAGMPVSTTLVVSSEGNTLSTTPVDSKTQVTNSTEASSSATAEGSSMTISAPSEGSPLLTSIPLSTTPVASPEASTLSTTPVDSNSPVITSTEVSSSPIPTEGTSMQTSTYSDRRTPLTSMPVSTTVVASSAISTLSTTPVDTSTPVTNSTEARSSPTTSEGTSMPTSTPSEGSTPFTSMPVSTMPVVTSEASTLSATPVDTSTPVTTSTEATSSPTTAEGTSIPTSTLSEGTTPLTSIPVSHTLVANSEVSTLSTTPVDSNTPFTTSTEASSPPPTAEGTSMPTSTSSEGNTPLTRMPVSTTMVASFETSTLSTTPADTSTPVTTYSQAGSSPTTADDTSMPTSTYSEGSTPLTSVPVSTMPVVSSEASTHSTTPVDTSTPVTTSTEASSSPTTAEGTSIPTSPPSEGTTPLASMPVSTTPVVSSEAGTLSTTPVDTSTPMTTSTEASSSPTTAEDIVVPISTASEGSTLLTSIPVSTTPVASPEASTLSTTPVDSNSPVVTSTEISSSATSAEGTSMPTSTYSEGSTPLRSMPVSTKPLASSEASTLSTTPVDTSIPVTTSTETSSSPTTAKDTSMPISTPSEVSTSLTSILVSTMPVASSEASTLSTTPVDTRTLVTTSTGTSSSPTTAEGSSMPTSTPGERSTPLTNILVSTTLLANSEASTLSTTPVDTSTPVTTSAEASSSPTTAEGTSMRISTPSDGSTPLTSILVSTLPVASSEASTVSTTAVDTSIPVTTSTEASSSPTTAEVTSMPTSTPSETSTPLTSMPVNHTPVASSEAGTLSTTPVDTSTPVTTSTKASSSPTTAEGIVVPISTASEGSTLLTSIPVSTTPVASSEASTLSTTPVDTSIPVTTSTEGSSSPTTAEGTSMPISTPSEVSTPLTSILVSTVPVAGSEASTLSTTPVDTRTPVTTSAEASSSPTTAEGTSMPISTPGERRTPLTSMSVSTMPVASSEASTLSRTPADTSTPVTTSTEASSSPTTAEGTGIPISTPSEGSTPLTSIPVSTTPVAIPEASTLSTTPVDSNSPVVTSTEVSSSPTPAEGTSMPISTYSEGSTPLTGVPVSTTPVTSSAISTLSTTPVDTSTPVTTSTEAHSSPTTSEGTSMPTSTPSEGSTPLTYMPVSTMLVVSSEDSTLSATPVDTSTPVTTSTEATSSTTAEGTSIPTSTPSEGMTPLTSVPVSNTPVASSEASILSTTPVDSNTPLTTSTEASSSPPTAEGTSMPTSTPSEGSTPLTSMPVSTTTVASSETSTLSTTPADTSTPVTTYSQASSSPPIADGTSMPTSTYSEGSTPLTNMSFSTTPVVSSEASTLSTTPVDTSTPVTTSTEASLSPTTAEGTSIPTSSPSEGTTPLASMPVSTTPVVSSEVNTLSTTPVDSNTLVTTSTEASSSPTIAEGTSLPTSTTSEGSTPLSIMPLSTTPVASSEASTLSTTPVDTSTPVTTSSPTNSSPTTAEVTSMPTSTAGEGSTPLTNMPVSTTPVASSEASTLSTTPVDSNTFVTSSSQASSSPATLQVTTMRMSTPSEGSSSLTTMLLSSTYVTSSEASTPSTPSVDRSTPVTTSTQSNSTPTPPEVITLPMSTPSEVSTPLTIMPVSTTSVTISEAGTASTLPVDTSTPVITSTQVSSSPVTPEGTTMPIWTPSEGSTPLTTMPVSTTRVTSSEGSTLSTPSVVTSTPVTTSTEAISSSATLDSTTMSVSMPMEISTLGTTILVSTTPVTRFPESSTPSIPSVYTSMSMTTASEGSSSPTTLEGTTTMPMSTTSERSTLLTTVLISPISVMSPSEASTLSTPPGDTSTPLLTSTKAGSFSIPAEVTTIRISITSERSTPLTTLLVSTTLPTSFPGASIASTPPLDTSTTFTPSTDTASTPTIPVATTISVSVITEGSTPGTTIFIPSTPVTSSTADVFPATTGAVSTPVITSTELNTPSTSSSSTTTSFSTTKEFTTPAMTTAAPLTYVTMSTAPSTPRTTSRGCTTSASTLSATSTPHTSTSVTTRPVTPSSESSRPSTITSHTIPPTFPPAHSSTPPTTSASSTTVNPEAVTTMTTRTKPSTRTTSFPTVTTTAVPTNTTIKSNPTSTPTVPRTTTCFGDGCQNTASRCKNGGTWDGLKCQCPNLYYGELCEEVVSSIDIGPPETISAQMELTVTVTSVKFTEELKNHSSQEFQEFKQTFTEQMNIVYSGIPEYVGVNITKLRLGSVVVEHDVLLRTKYTPEYKTVLDNATEVVKEKITKVTTQQIMINDICSDMMCFNTTGTQVQNITVTQYDPEEDCRKMAKEYGDYFVVEYRDQKPYCISPCEPGFSVSKNCNLGKCQMSLSGPQCLCVTTETHWYSGETCNQGTQKSLVYGLVGAGVVLMLIILVALLMLVFRSKREVKRQKYRLSQLYKWQEEDSGPAPGTFQNIGFDICQDDDSIHLESIYSNFQPSLRHIDPETKIRIQRPQVMTTSF

SEQ ID NO: 4161 - protein, 135 aa, Homo sapiens
MKGSIFTLFLFSVLFAISEVRSKESVRLCGLEYIRTVIYICASSRWRRHQEGIPQAQQAETGNSFQLPHKREFSEENPAQNLPKVDASGEDRLWGGQMPTEELWKSKKHSVMSRQDLQTLCCTDGCSMTDLSALC

SEQ ID NO: 4162 - protein, 651 aa, Homo sapiens
MARGSAVAWAALGPLLWGCALGLQGGMLYPQESPSRECKELDGLWSFRADFSDNRRRGFEEQWYRRPLWESGPTVDMPVPSSFNDISQDWRLRHFVGWVWYEREVILPERWTQDLRTRVVLRIGSAHSYAIVWVNGVDTLEHEGGYLPFEADISNLVQVGPLPSRLRITIAINNTLTPTTLPPGTIQYLTDTSKYPKGYFVQNTYFDFFNYAGLQRSVLLYTTPTTYIDDITVTTSVEQDSGLVNYQISVKGSNLFKLEVRLLDAENKVVANGTGTQGQLKVPGVSLWWPYLMHERPAYLYSLEVQLTAQTSLGPVSDFYTLPVGIRTVAVTKSQFLINGKPFYFHGVNKHEDADIRGKGFDWPLLVKDFNLLRWLGANAFRTSHYPYAEEVMQMCDRYGIVVIDECPGVGLALPQFFNNVSLHHHMQVMEEVVRRDKNHPAVVMWSVANEPASHLESAGYYLKMVIAHTKSLDPSRPVTFVSNSNYAADKGAPYVDVICLNSYYSWYHDYGHLELIQLQLATQFENWYKKYQKPIIQSEYGAETIAGFHQDPPLMFTEEYQKSLLEQYHLGLDQKRRKYVVGELIWNFADFMTEQSPTRVLGNKKGIFTRQRQPKSAAFLLRERYWKIANETRYPHSVAKSQCLENSLFT

SEQ ID NO: 4163 - protein, 479 aa, Homo sapiens
MSDGFDRAPGAGRGRSRGLGRGGGGPEGGGFPNGAGPAERARHQPPQPKAPGFLQPPPLRQPRTTPPPGAQCEVPASPQRPSRPGALPEQTRPLRAPPSSQDKIPQQNSESAMAKPQVVVAPVLMSKLSVNAPEFYPSGYSSSYTESYEDGCEDYPTLSEYVQDFLNHLTEQPGSFETEIEQFAETLNGCVTTDDALQELVELIYQQATSIPNFSYMGARLCNYLSHHLTISPQSGNFRQLLLQRCRTEYEVKDQAAKGDEVTRKRFHAFVLFLGELYLNLEIKGTNGQVTRADILQVGLRELLNALFSNPMDDNLICAVKLLKLTGSVLEDAWKEKGKMDMEEIIQRIENVVLDANCSRDVKQMLLKLVELRSSNWGRVHATSTYREATPENDPNYFMNEPTFYTSDGVPFTAADPDYQEKYQELLEREDFFPDYEENGTDLSGAGDPYLDDIDDEMDPEIEEAYEKFCLESERKRKQ

SEQ ID NO: 4164 - protein, 145 aa, Homo sapiens
MTVHNLYLFDRNGVCLHYSEWHRKKQAGIPKEEEYKLMYGMLFSIRSFVSKMSPLDMKDGFLAFQTSRYKLHYYETPTGIKVVMNTDLGVGPIRDVLHHIYSALYVELVVKNPLCPLGQTVQSELFRSRLDSYVRSLPFFSARAG

SEQ ID NO: 4165 - protein, 1125 aa, Homo sapiens
MASEEASLRALESLMTEFFHDCTTNERKREIEELLNNFAQQIGAWRFCLYFLSSTRNDYVMMYSLTVFENLINKMWLGVPSQDKMEIRSCLPKLLLAHHKTLPYFIRNKLCKVIVDIGRQDWPMFYHDFFTNILQLIQSPVTTPLGLIMLKTTSEELACPREDLSVARKEELRKLLLDQVQTVLGLLTGILETVWDKHSVTAATPPPSPTSGESGDLLSNLLQSPSSAKLLNQPIPILDVESEYICSLALECLAHLFSWIPLSASITPSLLTTIFHFARFGCDIRARKMASVNGSSQNCVSGQERGRLGVLAMSCINELMSKNCVPMEFEEYLLRMFQQTFYLLQKITKDNNAHTVKSRLEELDESYIEKFTDFLRLFVSVHLRRIESYSQFPVVEFLTLLFKYTFHQPTHEGYFSCLDIWTLFLDYLTSKIKSRLGDKEAVLNRYEDALVLLLTEVLNRIQFRYNQAQLEELDDETLDDDQQTEWQRYLRQSLEVVAKVMELLPTHAFSTLFPVLQDNLEVYLGLQQFIVTSGSGHRLNITAENDCRRLHCSLRDLSSLLQAVGRLAEYFIGDVFAARFNDALTVVERLVKVTLYGSQIKLYNIETAVPSVLKPDLIDVHAQSLAALQAYSHWLAQYCSEVHRQNTQQFVTLISTTMDAITPLISTKVQDKLLLSACHLLVSLATTVRPVFLISIPAVQKVFNRITDASALRLVDKAQVLVCRALSNILLLPWPNLPENEQQWPVRSINHASLISALSRDYRNLKPSAVAPQRKMPLDDTKLIIHQTLSVLEDIVENISGESTKSRQICYQSLQESVQVSLALFPAFIHQSDVTDEMLSFFLTLFRGLRVQMGVPFTEQIIQTFLNMFTREQLAESILHEGSTGCRVVEKFLKILQVVVQEPGQVFKPFLPSIIALCMEQVYPIIAERPSPDVKAELFELLFRTLHHNWRYFFKSTVLASVQRGIAEEQMENEPQFSAIMQAFGQSFLQPDIHLFKQNLFYLETLNTKQKLYHKKIFRTAMLFQFVNVLLQVLVHKSHDLLQEEIGIAIYNMASVDFDGFFAAFLPEFLTSCDGVDANQKSVLGRNFKMDRDLPSFTQNVHRLVNDLRYYRLCNDSLPPGTVKL

SEQ ID NO: 4166 - protein, 477 aa, Homo sapiens [sequence omitted]

SEQ ID NO: 4167 - protein, 396 aa, Homo sapiens
MAVQESAAQLSMTLKVQEYPTLKVPYETLNKRFRAAQKNIDRETSHVTMVVAELEKTLSGCPAVDSVVSLLDGVVEKLSVLKRKAVESIQAEDESAKLCKRRIEHLKEHSSDQPAAASVWKRKRMDRMMVEHLLRCGYYNTAVKLARQSGIEDLVNIEMFLTAKEVEESLERRETATCLAWCHDNKSRLRKMKSCLEFSLRIQEFIELIRQNKRLDAVRHARKHFSQAEGSQLDEVRQAMGMLAFPPDTHISPYKDLLDPARWRMLIQQFRYDNYRLHQLGNNSVFTLTLQAGLSAIKTPQCYKEDGSSKSPDCPVCSRSLNKLAQPLPMAHCANSRLVCKISGDVMNENNPPMMLPNGYVYGYNSLLSIRQDDKVVCPRTKEVFHFSQAEKVYIM

SEQ ID NO: 4168 - protein, 260 aa, Homo sapiens
MSATGPISNYYVDSLISHDNEDLLASRFPATGAHPAAARPSGLVPDCSDFPSCSFAPKPAVFSTSWAPVPSQSSVVYHPYGPQPHLGADTRYMRTWLEPLSGAVSFPSFPAGGRHYALKPDAYPGRRADCGPGEGRSYPDYMYGSPGELRDRAPQTLPSPEADALAGSKHKEEKADLDPSNPVANWIHARSTRKKRCPYTKYQTLELEKEFLFNMYLTRDRRYEVARVLNLTERQVKIWFQNRRMKMKKMNKEKTDKEQS

SEQ ID NO: 4169 - protein, 358 aa, Homo sapiens
MAATLGSGERWTEAYIDAVRRNKYPEDTPPESHDPCGCCNCMKAQKEKKSENEWTQTRQGEGNSTYSEEQLLGVQRIKKCRNYYEILGVSRDASDEELKKAYRKLALKFHPDKNCAPGATDAFKAIGNAFAVLSNPDKRLRYDEYGDEQVTFTAPRARPYNYYRDFEADITPEELFNVFFGGHFPTGNIHMFSNVTDDTYYYRRRHRHERTQTQKEEEEEKPQTTYSAFIQLLPVLVIVIISVITQLLATNPPYSLFYKSTLGYTISRETQNLQVPYFVDKNFDKAYRGASLHDLEKTIEKDYIDYIQTSCWKEKQQKSELTNLAGLYRDERLKQKAESLKLENCEKLSKLIGLRRGG

SEQ ID NO: 4170 - protein, 632 aa, Homo sapiens
MKALLLLVLPWLSPANYIDNVGNLHFLYSELCKGASHYGLTKDRKRRSQDGCPDGCASLTATAPSPEVSAAATISLMTDEPGLDNPAYVSSAEDGQPAISPVDSGRSNRTRARPFERSTIRSRSFKKINRALSVLRRTKSGSAVANHADQGRENSENTTAPEVFPRLYHLIPDGEITSIKINRVDPSESLSIRLVGGSETPLVHIIIQHIYRDGVIARDGRLLPGDIILKVNGMDISNVPHNYAVRLLRQPCQVLWLTVMREQKFRSRNNGQAPDAYRPRDDSFHVILNKSSPEEQLGIKLVRKVDEPGVFIFNVLDGGVAYRHGQLEENDRVLAINGHDLRYGSPESAAHLIQASERRVHLVVSRQVRQRSPDIFQEAGWNSNGSWSPGPGERSNTPKPLHPTITCHEKVVNIQKDPGESLGMTVAGGASHREWDLPIYVISVEPGGVISRDGRIKTGDILLNVDGVELTEVSRSEAVALLKRTSSSIVLKALEVKEYEPQEDCSSPAALDSNHNMAPPSDWSPSWVMWLELPRCLYNCKDIVLRRNTAGSLGFCIVGGYEEYNGNKPFFIKSIVEGTPAYNDGRIRCGDILLAVNGRSTSGMIHACLARLLKELKGRITLTIVSWPGTFL

SEQ ID NO: 4171 - protein, 394 aa, Homo sapiens
MSGEDEQQEQTIAEDLVVTKYKMGGDIANRVLRSLVEASSSGVSVLSLCEKGDAMIMEETGKIFKKEKEMKKGIAFPTSISVNNCVCHFSPLKSDQDYILKEGDLVKIDLGVHVDGFIANVAHTFVVDVAQGTQVTGRKADVIKAAHLCAEAALRLVKPGNQNTQVTEAWNKVAHSFNCTPIEGMLSHQLKQHVIDGEKTIIQNPTDQQKKDHEKAEFEVHEVYAVDVLVSSGEGKAKDAGQRTTIYKRDPSKQYGLKMKTSRAFFSEVERRFDAMPFTLRAFEDEKKARMGVVECAKHELLQPFNVLYEKEGEFVAQFKFTVLLMPNGPMRITSGPFEPDLYKSEMEVQDAELKALLQSSASRKTQKKKKKKASKTAENATSGETLEENEAGD

SEQ ID NO: 4172 - protein, 194 aa, Homo sapiens [sequence omitted]

SEQ ID NO: 4173 - protein, 790 aa, Homo sapiens
MNIMNTEQSQNSIVSRIKVFEGQTNIETSGLPKKPEITPRSLPPKPTVSSGKPSVAPKPAANRASGEWDSGTENRLKVTSKEGLTPYPPLQEAGSIPVTKPELPKKPNPGLIRSVNPEIPGRGPLAESSDSGKKVPTPAPRPLLLKKSVSSENPTYPSAPLKPVTVPPRLAGASQAKAYKSLGEGPPANPPVPVLQSKPLVDIDLISFDDDVLPTPSGNLAEESVGSEMVLDPFQLPAKTEPIKERAVQPAPTRKPTVIRIPAKPGKCLHEDPQSPPPLPAEKPIGNTFSTVSGKLSNVERTRNLESNHPGQTGGFVRVPPRLPPRPVNGKTIPTQQPPTKVPPERPPPPKLSATRRSNKKLPFNRSSSDMDLQKKQSNLATGLSKAKSQVFKNQDPVLPPRPKPGHPLYSKYMLSVPHGIANEDIVSQNPGELSCKRGDVLVMLKQTENNYLECQKGEDTGRVHLSQMKIITPLDEHLRSRPNDPSHAQKPVDSGAPHAVVLHDFPAEQVDDLNLTSGEIVYLLEKIDTDWYRGNCRNQIGIFPANYVKVIIDIPEGGNGKRECVSSHCVKGSRCVARFEYIGEQKDELSFSEGEIIILKEYVNEEWARGEVRGRTGIFPLNFVEPVEDYPTSGANVLSTKVPLKTKKEDSGSNSQVNSLPAEWCEALHSFTAETSDDLSFKRGDRIQILERLDSDWCRGRLQDREGIFPAVFVRPCPAEAKSMLAIVPKGRKAKALYDFRGENEDELSFKAGDIITELESVDDDWMSGELMGKSGIFPKNYIQFLQIS

SEQ ID NO: 4174 - protein, 1130 aa, Homo sapiens
MAVRKKDGGPNVKYYEAADTVTQFDNVRLWLGKNYKKYIQAEPPTNKSLSSLVVQLLQFQEEVFGKHVSNAPLTKLPIKCFLDFKAGGSLCHILAAAYKFKSDQGWRRYDFQNPSRMDRNVEMFMTIEKSLVQNNCLSRPNIFLCPEIEPKLLGKLKDIIKRHQGTVTEDKNNASHVVYPVPGNLEEEEWVRPVMKRDKQVLLHWGYYPDSYDTWIPASEIEASVEDAPTPEKPRKVHAKWILDTDTFNEWMNEEDYEVNDDKNPVSRRKKISAKTLTDEVNSPDSDRRDKKGGNYKKRKRSPSPSPTPEAKKKNAKKGPSTPYTKSKRGHREEEQEDLTKDMDEPSPVPNVEEVTLPKTVNTKKDSESAPVKGGTMTDLDEQEDESMETTGKDEDENSTGNKGEQTKNPDLHEDNVTEQTHHIIIPSYAAWFDYNSVHAIERRALPEFFNGKNKSKTPEIYLAYRNFMIDTYRLNPQEYLTSTACRRNLAGDVCAIMRVHAFLEQWGLINYQVDAESRPTPMGPPPTSHFHVLADTPSGLVPLQPKTPQGRQVDADTKAGRKGKELDDLVPETAKGKPELQTSASQQMLNFPDKGKEKPTDMQNFGLRTDMYTKKNVPSKSKAAASATREWTEQETLLLLEALEMYKDDWNKVSEHVGSRTQDECILHFLRLPIEDPYLEDSEASLGPLAYQPIPFSQSGNPVMSTVAFLASVVDPRVASAAAKSALEEFSKMKEEVPTALVEAHVRKVEEAAKVTGKADPAFGLESSGIAGTTSDEPERIEESGNDEARVEGQATDEKKEPKEPREGGGAIEEEAKEKTSEAPKKDEEKGKEGDSEKESEKSDGDPIVDPEKEKEPKEGQEEVLKEVVESEGERKTKVERDIGEGNLSTAAAAALAAAAVKAKHLAAVEERKIKSLVALLVETQMKKLEIKLRHFEELETIMDREREALEYQRQQLLADRQAFHMEQLKYAEMRARQQHFQQMHQQQQQPPPALPPGSQPIPPTGAAGPPAVHGLAVAPASVVPAPAGSGAPPGSLGPSEQIGQAGSTAGPQQQQPAGAPQPGAVPPGVPPPGPHGPSPFPNQQTPPSMMPGAVPGSGHPGVADPGTPLPPDPTAPSPGTVTPVPPPQ

SEQ ID NO: 4175 - protein, 202 aa, Homo sapiens
MLVAGFLLALPPSWAAGAPRAGRRPARPRGCADRPEELLEQLYGRLAAGVLSAFHHTLQLGPREQARNASCPAGGRPADRRFRPPTNLRSVSPWAYRISYDPARYPRYLPEAYCLCRGCLTGLFGEEDVRFRSAPVYMPTVVLRRTPACAGGRSVYTEAYVTIPVGCTCVPEPEKDADSINSSIDKQGAKLLLGPNDAPAGP

SEQ ID NO: 4176 - protein, 1332 aa, Homo sapiens
MESHSRAGKSRKSAKFRSISRSLMLCNAKTSDDGSSPDEKYPDPFEISLAQGKEGIFHSSVQLADTSEAGPSSVPDLALASEAAQLQAAGNDRGKTCRRIFFMKESSTASSREKPGKLEAQSSNFLFPKACHQRARSNSTSVNPYCTREIDFPMTKKSAAPTDRQPYSLCSNRKSLSQQLDCPAGKAAGTSRPTRSLSTAQLVQPSGGLQASVISNIVLMKGQAKGLGFSIVGGKDSIYGPIGIYVKTIFAGGAAAADGRLQEGDEILELNGESMAGLTHQDALQKFKQAKKGLLTLTVRTRLTAPPSLCSHLSPPLCRSLSSSTCITKDSSSFALESPSAPISTAKPNYRIMVEVSLQKEAGVGLGIGLCSVPYFQCISGIFVHTLSPGSVAHLDGRLRCGDEIVEISDSPVHCLTLNEVYTILSHCDPGPVPIIVSRHPDPQVSEQQLKEAVAQAVENTKFGKERHQWSLEGVKRLESSWHGRPTLEKEREKNSAPPHRRAQKVMIRSSSDSSYMSGSPGGSPGSGSAEKPSSDVDISTHSPSLPLAREPVVLSIASSRLPQESPPLPESRDSHPPLRLKKSFEILVRKPMSSKPKPPPRKYFKSDSDPQKSLEERENSSCSSGHTPPTCGQEARELLPLLLPQEDTAGRSPSASAGCPGPGIGPQTKSSTEGEPGWRRASPVTQTSPIKHPLLKRQARMDYSFDTTAEDPWVRISDCIKNLFSPIMSENHGHMPLQPNASLNEEEGTQGHPDGTPPKLDTANGTPKVYKSADSSTVKKGPPVAPKPAWFRQSLKGLRNRASDPRGLPDPALSTQPAPASREHLGSHIRASSSSSSIRQRISSFETFGSSQLPDKGAQRLSLQPSSGEAAKPLGKHEEGRFSGLLGRGAAPTLVPQQPEQVLSSGSPAASEARDPGVSESPPPGRQPNQKTLPPGPDPLLRLLSTQAEESQGPVLKMPSQRARSFPLTRSQSCETKLLDEKTSKLYSISSQVSSAVMKSLLCLPSSISCAQTPCIPKEGASPTSSSNEDSAANGSAETSALDTGFSLNLSELREYTEGLTEAKEDDDGDHSSLQSGQSVISLLSSEELKKLIEEVKVLDEATLKQLDGIHVTILHKEEGAGLGFSLAGGADLENKVITVHRVFPNGLASQEGTIQKGNEVLSINGKSLKGTTHHDALAILRQAREPRQAVIVTRKLTPEAMPDLNSSTDSAASASAASDVSVESTAEATVCTVTLEKMSAGLGFSLEGGKGSLHGDKPLTINRIFKGAASEQSETVQPGDEILQLGGTAMQGLTRFEAWNIIKALPDGPVTIVIRRKSLQSKETTAAGDS

SEQ ID NO: 4177 - protein, 93 aa, Homo sapiens
MKPVLPLQFLVVFCLALQLVPGSPKQRVLKYILEPPPCISAPENCTHLCTMQEDCEKGFQCCSSFCGIVCSSETFQKRNRIKHKGSEVIMPAN

SEQ ID NO: 4178 - protein, 63 aa, Homo sapiens
MEGAGAGSGFRKELVSRLLHLHFKDDKTKEAAVRGVRQAQAEDALRVDVDQLEKVLPQLLLDF

SEQ ID NO: 4179 - protein, 389 aa, Homo sapiens
MLSLRVPLAPITDPQQLQLSPLKGLSLVDKENTPPALSGTRVLASKTARRIFQEPTEPKTKAAAPGVEDEPLLRENPRRFVIFPIEYHDIWQMYKKAEASFWTAEEVDLSKDIQHWESLKPEERYFISHVLAFFAASDGIVNENLVERFSQEVQITEARCFYGFQIAMENIHSEMYSLLIDTYIKDPKEREFLFNAIETMPCVKKKADWALRWIGDKEATYGERVVAFAAVEGIFFSGSFASIFWLKKRGLMPGLTFSNELISRDEGLHCDFACLMFKHLVHKPSEERVREIIINAVRIEQEFLTEALPVKLIGMNCTLMKQYIEFVADRLMLELGFSKVFRVENPFDFMENISLEGKTNFFEKRVGEYQRMGVMSSPTENSFTLDADF

SEQ ID NO: 4180 - protein, 840 aa, Homo sapiens
MSVVGIDLGFQSCYVAVARAGGIETIANEYSDRCTPACISFGPKNRSIGAAAKSQVISNAKNTVQGFKRFHGRAFSDPFVEAEKSNLAYDIVQLPTGLTGIKVTYMEEERNFTTEQVTAMLLSKLKETAESVLKKPVVDCVVSVPCFYTDAERRSVMDATQIAGLNCLRLMNETTAVALAYGIYKQDLPALEEKPRNVVFVDMGHSAYQVSVCAFNRGKLKVLATAFDTTLGGRKFDEVLVNHFCEEFGKKYKLDIKSKIRALLRLSQECEKLKKLMSANASDLPLSIECFMNDVDVSGTMNRGKFLEMCNDLLARVEPPLRSVLEQTKLKKEDIYAVEIVGGATRIPAVKEKISKFFGKELSTTLNADEAVTRGCALQCAILSPAFKVREFSITDVVPYPISLRWNSPAEEGSSDCEVFSKNHAAPFSKVLTFYRKEPFTLEAYYSSPQDLPYPDPAIAQFSVQKVTPQSDGSSSKVKVKVRVNVHGIFSVSSASLVEVHKSEENEEPMETDQNAKEEEKMQVDQEEPHVEEQQQQTPAENKAESEEMETSQAGSKDKKMDQPPQAKKAKVKTSTVDLPIENQLLWQIDREMLNLYIENEGKMIMQDKLEKERNDAKNAVEEYVYEMRDKLSGEYEKFVSEDDRNSFTLKLEDTENWLYEDGEDQPKQVYVDKLAELKNLGQPIKIRFQESEERPKLFEELGKQIQQYMKIISSFKNKEDQYDHLDAADMTKVEKSTNEAMEWMNNKLNLQNKQSLTMDPVVKSKEIEAKIKELTSTCSPIISKPKPKVEPPKEEQKNAEQNGPVDGQGDNPGPQAAEQGTDTAVPSDSDKKLPEMDID

SEQ ID NO: 4181 - protein, 428 aa, Homo sapiens
MAKTVAYFYDPDVGNFHYGAGHPMKPHRLALTHSLVLHYGLYKKMIVFKPYQASQHDMCRFHSEDYIDFLQRVSPTNMQGFTKSLNAFNVGDDCPVFPGLFEFCSRYTGASLQGATQLNNKICDIAINWAGGLHHAKKFEASGFCYVNDIVIGILELLKYHPRVLYIDIDIHHGDGVQEAFYLTDRVMTVSFHKYGNYFFPGTGDMYEVGAESGRYYCLNVPLRDGIDDQSYKHLFQPVINQVVDFYQPTCIVLQCGADSLGCDRLGCFNLSIRGHGECVEYVKSFNIPLLVLGGGGYTVRNVARCWTYETSLLVEEAISEELPYSEYFEYFAPDFTLHPDVSTRIENQNSRQYLDQIRQTIFENLKMLNHAPSVQIHDVPADLLTYDRTDEADAEERGPEENYSRPEAPNEFYDGDHDNDKESDVEI

SEQ ID NO: 4182 - protein, 520 aa, Homo sapiens
MSAGEVERLVSELSGGTGGDEEEEWLYGDENEVERPEEENASANPPSGIEDETAENGVPKPKVTETEDDSDSDSDDDEDDVHVTIGDIKTGAPQYGSYGTAPVNLNIKTGGRVYGTTGTKVKGVDLDAPGSINGVPLLEVDLDSFEDKPWRKPGADLSDYFNYGFNEDTWKAYCEKQKRIRMGLEVIPVTSTTNKITVQQGRTGNSEKETALPSTKAEFTSPPSLFKTGLPPSRRLPGAIDVIGQTITISRVEGRRRANENSNIQVLSERSATEVDNNFSKPPPFFPPGAPPTHLPPPPFLPPPPTVSTAPPLIPPPGFPPPPGAPPPSLIPTIESGHSSGYDSRSARAFPYGNVAFPHLPGSAPSWPSLVDTSKQWDYYARREKDRDRERDRDRERDRDRDRERERTRERERERDHSPTPSVFNSDEERYRYREYAERGYERHRASREKEERHRERRHREKEETRHKSSRSNSRRRHESEEGDSHRRHKHKKSKRSKEGKEAGSEPAPEQESTEATPAE

SEQ ID NO: 4183 - protein, 482 aa, Homo sapiens
MAAPEKMTFPEKPSHKKYRAALKKEKRKKRRQELARLRDSGLSQKEEEEDTFIEEQQLEEEKLLERERQRLHEEWLLREQKAQEEFRIKKEKEEAAKKRQEEQERKLKEQWEEQQRKEREEEEQKRQEKKEKEEALQKMLDQAENELENGTTWQNPEPPVDFRVMEKDRANCPFYSKTGACRFGDRCSRKHNFPTSSPTLLIKSMFTTFGMEQCRRDDYDPDASLEYSEEETYQQFLDFYEDVLPEFKNVGKVIQFKVSCNLEPHLRGNVYVQYQSEEECQAALSLFNGRWYAGRQLQCEFCPVTRWKMAICGLFEIQQCPRGKHCNFLHVFRNPNNEFWEANRDIYLSPDRTGSSFGKNSERRERMGHHDDYYSRLRGRRNPSPDHSYKRNGESERKSSRHRGKKSHKRTSKSRERHNSRSRGRNRDRSRDRSRGRGSRSRSRSRSRRSRRSRSQSSSRSRSRGRRRSGNRDRTVQSPKSK

SEQ ID NO: 4184 - protein, 597 aa, Homo sapiens
MAAVQAAEVKVDGSEPKLSKNELKRRLKAEKKVAEKEAKQKELSEKQLSQATAAATNHTTDNGVGPEEESVDPNQYYKIRSQAIHQLKVNGEDPYPHKFHVDISLTDFIQKYSHLQPGDHLTDITLKVAGRIHAKRASGGKLIFYDLRGEGVKLQVMANSRNYKSEEEFIHINNKLRRGDIIGVQGNPGKTKKGELSIIPYEITLLSPCLHMLPHLHFGLKDKETRYRQRYLDLILNDFVRQKFIIRSKIITYIRSFLDELGFLEIETPMMNIIPGGAVAKPFITYHNELDMNLYMRIAPELYHKMLVVGGIDRVYEIGRQFRNEGIDLTHNPEFTTCEFYMAYADYHDLMEITEKMVSGMVKHITGSYKVTYHPDGPEGQAYDVDFTPPFRRINMVEELEKALGMKLPETNLFETEETRKILDDICVAKAVECPPPRTTARLLDKLVGEFLEVTCINPTFICDHPQIMSPLAKWHRSKEGLTERFELFVMKKEICNAYTELNDPMRQRQLFEEQAKAKAAGDDEAMFIDENFCTALEYGLPPTAGWGMGIDRVAMFLTDSNNIKEVLLFPAMKPEDKKENVATTDTLESTTVGTSV

SEQ ID NO: 4185 - protein, 212 aa, Homo sapiens
MGPGPRLLLPLVLCVGLGALVFSSGAEGFRKRGPSVTAKVFFDVRIGDKDVGRIVIGLFGKVVPKTVENFVALATGEKGYGYKGSKFHRVIKDFMIQGGDITTGDGTGGVSIYGETFPDENFKLKHYGIGWVSMANAGPDTNGSQFFITLTKPTWLDGKHVVFGKVIDGMTVVHSIELQATDGHDRPLTNCSIINSGKIDVKTPFVVEIADW

SEQ ID NO: 4186 - protein, 986 aa, Homo sapiens
MVSKSDQLLIVVSILEGRHFPKRPKHMLVVEAKFDGEQLATDPVDHTDQPEFATELAWEIDRKALHQHRLQRTPIKLQCFALDPVTSAKETIGYIVLDLRTAQETKQAPKWYQLLSNKYTKFKSEIQISIALETDTKPPVDSFKAKGAPPRDGKVPAILAGLDPRDIVAVLNEEGGYHQIGPAEYCTDSFIMSVTIAFATQLEQLIPCTMKLPERQPEFFFYYSLLGNDVTNEPFNDLINPNFEPERASVRIRSSVEILRVYLALQSKLQIHLCCGDQSLGSTEIPLTGLLKKGSTEINQHPVTVEGAFTLDPPNRAKQKLAPIPVELAPTVGVSVALQREGIDSQSLIELKTQNEHEPEHSKKKVLTPIKEKTLTGPKSPTVSPVPSHNQSPPTKDDATESEVESLQYDKDTKPNPKASSSVPASLAQLVTTSNASEVASGQKIAVPATSHHFCFSIDLRSIHALEIGFPINCILRYSYPFFGSAAPIMTNPPVEVRKNMEVFLPQSYCAFDFATMPHQLQDTFLRIPLLVELWHKDKMSKDLLLGIARIQLSNILSSEKTRFLGSNGEQCWRQTYSESVPVIAAQGSNNRIADLSYTVTLEDYGLVKMREIFISDSSQGVSAVQQKPSSLPPAPCPSEIQTEPRETLEYKAALELEMWKEMQEDIFENQLKQKELAHMQALAEEWKKRDRERESLVKKKVAEYTILEGKLQKTLIDLEKREQQLASVESELQREKKELQSERQRNLQELQDSIRRAKEDCIHQVELERLKIKQLEEDKHRLQQQLNDAENKYKILEKEFQQFKDQQNNKPEIRLQSEINLLTLEKVELERKLESATKSKLHYKQQWGRALKELARLKQREQESQMARLKKQQEELEQMRLRYLAAEEKDTVKTERQELLDIRNELNRLRQQEQKQYQDSTEIASGKKDGPHGSVLEEGLDDYLTRLIEERDTLMRTGVYNHEDRIISELDRQIREILAKSNASN

SEQ ID NO: 4187 - protein, 90 aa, Homo sapiens
MRLSVCLLLLTLALCCYRANAVVCQALGSEITGFLLAGKPVFKFQLAKFKAPLEAVAAKMEVKKCVDTMAYEKRVLITKTLGKIAEKCDR

SEQ ID NO: 4188 - protein, 398 aa, Homo sapiens
MSEGNAAGEPSTPGGPRPLLTGARGLIGRRPAPPLTPGRLPSIRSRDLTLGGVKKKTFTPNIISRKIKEEPKEEVTVKKEKRERDRDRQREGHGRGRGRPEVIQSHSIFEQGPAEMMKKKGNWDKTVDVSDMGPSHIINIKKEKRETDEETKQILRMLEKDDFLDDPGLRNDTRNMPVQLPLAHSGWLFKEENDEPDVKPWLAGPKEEDMEVDIPAVKVKEEPRDEEEEAKMKAPPKAARKTPGLPKDVSVAELLRELSLTKEEELLFLQLPDTLPGQPPTQDIKPIKTEVQGEDGQVVLIKQEKDREAKLAENACTLADLTEGQVGKLLIRKSGRVQLLLGKVTLDVTMGTACSFLQELVSVGLGDSRTGEMTVLGHVKHKLVCSPDFESLLDHKHR

SEQ ID NO: 4189 - protein, 244 aa, Homo sapiens
MMGIFLVYVGFVFFSVLYVQQGLSSQAKFTEFPRNVTATEGQNVEMSCAFQSGSASVYLEIQWWFLRGPEDLDPGAEGAGAQVELLPDRDPDSDGTKISTVKVQGNDISHKLQISKVRKKDEGLYECRVTDANYGELQEHKAQAYLKVNANSHARRMQAFEASPMWLQDMKPRKNVSAAIPSSIHGSANQRTHSTSSPQVVAKIPKQSPQSGMETHFEPFILPLTNAPQKGQSYRVDRFMNGDF

SEQ ID NO: 4190 - protein, 803 aa, Homo sapiens
MKKQFNRMKQLANQTVGRAEKTEVLSEDLLQIERRLDTVRSICHHSHKRLVACFQGQHGTDAERRHKKLPLTALAQNMQEASTQLEDSLLGKMLETCGDAENQLALELSQHEVFVEKEIVDPLYGIAEVEIPNIQKQRKQLARLVLDWDSVRARWNQAHKSSGTNFQGLPSKIDTLKEEMDEAGNKVEQCKDQLAADMYNFMAKEGEYGKFFVTLLEAQADYHRKALAVLEKTLPEMRAHQDKWAEKPAFGTPLEEHLKRSGREIALPIEACVMLLLETGMKEEGLFRIGAGASKLKKLKAALDCSTSHLDEFYSDPHAVAGALKSYLRELPEPLMTFNLYEEWTQVASVQDQDKKLQDLWRTCQKLPPQNFVNFRYLIKFLAKLAQTSDVNKMTPSNIAIVLGPNLLWARNEGTLAEMAAATSVHVVAVIEPIIQHADWFFPEEVEFNVSEAFVPLTTPSSNHSFHTGNDSDSGTLERKRPASMAVMEGDLVKKESPPKPKDPVSAAVPAPGRNNSQIASGQNQPQAAAGSHQLSMGQPHNAAGPSPHTLRRAVKKPAPAPPKPGNPPPGHPGGQSSSGTSQHPPSLSPKPPTRSPSPPTQHTGQPPGQPSAPSQLSAPRRYSSSLSPIQAPNHPPPQPPTQATPLMHTKPNSQGPPNPMALPSEHGLEQPSHTPPQTPTPPSTPPLGKQNPSLPAPQTLAGGNPETAQPHAGTLPRPRPVPKPRNRPSVPPPPQPPGVHSAGDSSLTNTAPTASKIVTDSNSRVSEPHRSIFPEMHSDSASKDVPGRILLDIDNDTESTAL

SEQ ID NO: 4191 - protein, 670 aa, Homo sapiens
MNQVTDWVDPSFDDFLECSGVSTITATSLGVNNSSHRRKNGPSTLESSRFPARKRGNLSSLEQIYGLENSKEYLSENEPWVDKYKPETQHELAVHKKKIEEVETWLKAQVLERQPKQGGSILLITGPPGCGKTTTLKILSKEHGIQVQEWINPVLPDFQKDDFKGMFNTESSFHMFPYQSQIAVFKEFLLRATKYNKLQMLGDDLRTDKKIILVEDLPNQFYRDSHTLHEVLRKYVRIGRCPLIFIISDSLSGDNNQRLLFPKEIQEECSISNISFNPVAPTIMMKFLNRIVTIEANKNGGKITVPDKTSLELLCQGCSGDIRSAINSLQFSSSKGENNLRPRKKGMSLKSDAVLSKSKRRKKPDRVFENQEVQAIGGKDVSLFLFRALGKILYCKRASLTELDSPRLPSHLSEYERDTLLVEPEEVVEMSHMPGDLFNLYLHQNYIDFFMEIDDIVRASEFLSFADILSGDWNTRSLLREYSTSIATRGVMHSNKARGYAHCQGGGSSFRPLHKPQWFLINKKYRENCLAAKALFPDFCLPALCLQTQLLPYLALLTIPMRNQAQISFIQDIGRLPLKRHFGRLKMEALTDREHGMIDPDSGDEAQLNGGHSAEESLGEPTQATVPETWSLPLSQNSASELPASQPQPFSAQGDMEENIIIEDYESDGT

SEQ ID NO: 4192 - protein, 219 aa, Homo sapiens
MSGLSGPPARRGPFPLALLLLFLLGPRLVLAISFHLPINSRKCLREEIHKDLLVTGAYEISDQSGGAGGLRSHLKITDSAGHILYSKEDATKGKFAFTTEDYDMFEVCFESKGTGRIPDQLVILDMKHGVEAKNYEEIAKVEKLKPLEVELRRLEDLSESIVNDFAYMKKREEEMRDTNESTNTRVLYFSIFSMFCLIGLATWQVFYLRRFFKAKKLIE

SEQ ID NO: 4193 - protein, 190 aa, Homo sapiens
MTAVGVQAQRPLGQRQPRRSFFESFIRTLIITCVALAVVLSSVSICDGHWLLAEDRLFGLWHFCTTTNQTICFRDLGQAHVPGLAVGMGLVRSVGALAVVAAIFGLEFLMVSQLCEDKHSQCKWVMGSILLLVSFVLSSGGLLGFVILLRNQVTLIGFTLMFWCEFTASFLLFLNAISGLHINSITHPWE

SEQ ID NO: 4194 - protein, 1626 aa, Homo sapiens
MAGLRGNAVAGLLWMLLLWSGGGGCQAQRAGCKSVHYDLVFLLDTSSSVGKEDFEKVRQWVANLVDTFEVGPDRTRVGVVRYSDRPTTAFELGLFGSQEEVKAAARRLAYHGGNTNTGDALRYITARSFSPHAGGRPRDRAYKQVAILLTDGRSQDLVLDAAAAAHRAGIRIFAVGVGEALKEELEEIASEPKSAHVFHVSDFNAIDKIRGKLRRRLCENVLCPSVRVEGDRFKHTNGGTKEITGFDLMDLFSVKEILGKRENGAQSSYVRMGSFPVVQSTEDVFPQGLPDEYAFVTTFRFRKTSRKEDWYIWQVIDQYSIPQVSIRLDGENKAVEYNAVGAMKDAVRVVFRGSRVNDLFDRDWHKMALSIQAQNVSLHIDCALVQTLPIEERENIDIQGKTVIGKRLYDSVPIDFDLQRIVIYCDSRHAELETCCDIPSGPCQVTVVTEPPPPPPPQRPPTPGSEQIGFLKTINCSCPAGEKGEMGVAGPMGLPGPKGDIGAIGPVGAPGPKGEKGDVGIGPFGQGEKGEKGSLGLPGPPGRDGSKGMRGEPGELGEPGLPGEVGMRGPQGPPGLPGPPGRVGAPGLQGERGEKGTRGEKGERGLDGFPGKPGDTGQQGRPGPSGVAGPQGEKGDVGPAGPPGVPGSVVQQEGLKGEQGAPGPRGHQGAPGPPGARGPIGPEGRDGPPGLQGLRGKKGDMGPPGIPGLLGLQGPPGPPGVPGPPGPGGSPGLPGEIGFPGKPGPPGPTGPPGKDGPNGPPGPPGTKGEPGERGEDGLPGKPGLRGEIGEQGLAGRPGEKGEAGLPGAPGFPGVRGEKGDQGEKGELGLPGLKGDRGEKGEAGPAGPPGLPGTTSLFTPHPRMPGEQGPKGEKGDPGLPGEPGLQGRPGELGPQGPTGPPGAKGQEGAHGAPGAAGNPGAPGHVGAPGPSGPPGSVGAPGLRGTPGKDGERGEKGAAGEEGSPGPVGPRGDPGAPGLPGPPGKGKDGEPGLRGSPGLPGPLGTKAACGKVRGSENCALGGQCVKGDRGAPGIPGSPGSRGDPGIGVAGPPGPSGPPGDKGSPGSRGLPGFPGPQGPAGRDGAPGNPGERGPPGKPGLSSLLSPGDINLLAKDVCNDCPPGPPGLPGLPGFKGDKGVPGKPGREGTEGKKGEAGPPGLPGPPGIAGPQGSQGERGADGEVGQKGDQGHPGVPGFMGPPGNPGPPGADGIAGAAGPPGIQGSPGKEGPPGPQGPSGLPGIPGEEGKEGRDGKPGPPGEPGKAGEPGLPGPEGARGPPGFKGHTGDSGAPGPRGESGAMGLPGQEGLPGKDGDTGPTGPQGPQGPRGPPGKNGSPGSPGEPGPSGTPGQKGSKGENGSPGLPGFLGPRGPPGEPGEKGVPGKEGVPGKPGEPGFKGERGDPGIKGDKGPPGGKGQPGDPGIPGHKGHTGLMGPQGLPGENGPVGPPGPPGQPGFPGLRGESPSMETLRRLIQEELGKQLETRLAYLLAQMPPAYMKSSQGRPGPPGPPGKDGLPGRAGPMGEPGRPGQGGLEGPSGPIGPKGERGAKGDPGAPGVGLRGEMGPPGIPGQPGEPGYAKDGLPGIPGPQGETGPAGHPGLPGPPGPPGQCDPSQCAYFASLAARPGNVKGP

SEQ ID NO: 4195 - protein, 538 aa, Homo sapiens
MLQIGEDVDYLLIPREVRLAGGVWRVISKPATKEAEFRERLTQFLEEEGRTLEDVARIMEKSTPHPPQPPKKPKEPRVRRRVQQMVTPPPRLVVGTYDSSNASDSEFSDFETSRDKSRQGPRRGKKVRKMPVSYLGSKFLGSDLESEDDEELVEAFLRRQEKQPSAPPARRRVNLPVPMFEDNLGPQLSKADRWREYVSQVSWGKLKRRVKGWAPRAGPGVGEARLASTAVESAGVSSAPEGTSPGDRLGNAGDVCVPQASPRRWRPKINWASFRRRRKEQTAPTGQGADIEADQGGEAADSQREEAIADQREGAAGNQRAGAPADQGAEAADNQREEAADNQRAGAPAEEGAEAADNQREEAADNQRAEAPADQRSQGTDNHREEAADNQRAEAPADQGSEVTDNQREEAVHDQRERAPAVQGADNQRAQARAGQRAEAAHNQRAGAPGIQEAEVSAAQGTTGTAPGARARKQVKTVRFQTPGRFSWFCKRRRAFWHTPRLPTLPKRVPRAGEARNLRVLRAEARAEAEQGEQEDQL

SEQ ID NO: 4196 - protein, 532 aa, Homo sapiens
MACLLRSFQRISAGVFFLALWGMVVGDKLLVVPQDGSHWLSMKDIVEVLSDRGHEIVVVVPEVNLLLKESKYYTRKIYPVPYDQEELKNRYQSFGNNHFAERSFLTAPQTEYRNNMIVIGLYFINCQSLLQDRDTLNFFKESKFDALFTDPALPCGVILAEYLGLPSVYLFRGFPCSLEHTFSRSPDPVSYIPRCYTKFSDHMTFSQRVANFLVNLLEPYLFYCLFSKYEELASAVLKRDVDIITLYQKVSVWLLRYDFVLEYPRPVMPNMVFIGGINCKKRKDLSQEFEAYINASGEHGIVVFSLGSMVSEIPEKKAMAIADALGKIPQTVLWRYTGTRPSNLANNTILVKWLPQNDLLGHPMTRAFITHAGSHGVYESICNGVPMVMMPLFGDQMDNAKRMETKGAGVTLNVLEMTSEDLENALKAVINDKSYKENIMRLSSLHKDRPVEPLDLAVFWVEFVMRHKGAPHLRPAAHDLTWYQYHSLDVIGFLLAVVLTVAFITFKCCAYGYRKCLGKKGRVKKAHKSKTH

SEQ ID NO: 4197 - protein, 803 aa, Homo sapiens
MEVKPVGEPTQEVSKFKLSTKVESTGHWLVEDHVRIWEVLKTEESSIQDWGEEVEEGAVYHVTLKRVQIQQAANKGARWLGVEGDQLPPGHTVSQYETCKIRTIKAGTLEKLVENLLTAFGDNDFTYISIFLSTYRGFASTKEVLELLLDRYGNLTSPNCEEDGSQSSSESKMVIRNAIASILRAWLDQCAEDFREPPHFPCLQKLLDYLTRMMPGSDPERRAQNLLEQFQKQEVETDNGLPNTISFSLEEEEELEGGESAEFTCFSEDLVAEQLTYMDAQLFKKVVPHHCLGCIWSRRDKKENKHLAPTIRATISQFNTLTKCVVSTILGGKELKTQQRAKIIEKWINIAHECRLLKNFSSLRAIVSALQSNSIYRLKKTWAAVPRDRMLMFEELSDIFSDHNNHLTSRELLMKEGTSKFANLDSSVKENQKRTQRRLQLQKDMGVMQGTVPYLGTFLTDLTMLDTALQDYIEGGLINFEKRRREFEVIAQIKLLQSACNSYCMTPDQKFIQWFQRQQLLTEEESYALSCEIEAAADASTTSPKPRKSMVKRLSLLFLGSDMITSPTPTKEQPKSTASGSSGESMDSVSVSSCESNHSEAEEGSITPMDTPDEPQKKLSESSSSCSSIHSMDTNSSGMSSLINPLSSPPSCNNNPKIHKRSVSVTSITSTVLPPVYNQQNEDTCIIRISVEDNNGNMYKSIMLTSQDKTPAVIQRAMLKHNLDSDPAEEYELVQVISEDKELVIPDSANVFYAMNSQVNFDFILRKKNSMEEQVKLRSRTSLTLPRTAKRGCWSNRHSKITL

SEQ ID NO: 4198 - protein, 166 aa, Homo sapiens
MAQTNSFFMLISSLMFLSLSQGQESQTELPNPRISCPEGTNAYRSYCYYFNEDPETWVDADLYCQNMNSGNLVSVLTQAEGAFVASLIKESSTDDSNVWIGLHDPKKNRRWHWSSGSLVSYKSWDTGSPSSANAGYCASLTSCSGFKKWKDESCEKKFSFVCKFKN

SEQ ID NO: 4199 - protein, 692 aa, Homo sapiens
MGTVSSRRSWWPLPLLLLLLLLLGPAGARAQEDEDGDYEELVLALRSEEDGLAEAPEHGTTATFHRCAKDPWRLPGTYVVVLKEETHLSQSERTARRLQAQAARRGYLTKILHVFHGLLPGFLVKMSGDLLELALKLPHVDYIEEDSSVFAQSIPWNLERITPPRYRADEYQPPDGGSLVEVYLLDTSIQSDHREIEGRVMVTDFENVPEEDGTRFHRQASKCDSHGTHLAGVVSGRDAGVAKGASMRSLRVLNCQGKGTVSGTLIGLEFIRKSQLVQPVGPLVVLLPLAGGYSRVLNAACQRLARAGVVLVTAAGNFRDDACLYSPASAPEVITVGATNAQDQPVTLGTLGTNFGRCVDLFAPGEDIIGASSDCSTCFVSQSGTSQAAAHVAGIAAMMLSAEPELTLAELRQRLIHFSAKDVINEAWFPEDQRVLTPNLVAALPPSTHGAGWQLFCRTVWSAHSGPTRMATAVARCAPDEELLSCSSFSRSGKRRGERMEAQGGKLVCRAHNAFGGEGVYAIARCCLLPQANCSVHTAPPAEASMGTRVHCHQQGHVLTGCSSHWEVEDLGTHKPPVLRPRGQPNQCVGHREASIHASCCHAPGLECKVKEHGIPAPQEQVTVACEEGWTLTGCSALPGTSHVLGAYAVDNTCVVRSRDVSTTGSTSEGAVTAVAICCRSRHLAQASQELQ

SEQ ID NO: 4200 - protein, 617 aa, Homo sapiens
MRPPQCLLHTPSLASPLLLLLLWLLGGGVGAEGREDAELLVTVRGGRLRGIRLKTPGGPVSAFLGIPFAEPPMGPRRFLPPEPKQPWSGVVDATTFQSVCYQYVDTLYPGFEGTEMWNPNRELSEDCLYLNVWTPYPRPTSPTPVLVWIYGGGFYSGASSLDVYDGRFLVQAERTVLVSMNYRVGAFGFLALPGSREAPGNVGLLDQRLALQWVQENVAAFGGDPTSVTLFGESAGAASVGMHLLSPPSRGLFHRAVLQSGAPNGPWATVGMGEARRRATQLAHLVGCPPGGTGGNDTELVACLRTRPAQVLVNHEWHVLPQESVFRFSFVPVVDGDFLSDTPEALINAGDFHGLQVLVGVVKDEGSYFLVYGAPGFSKDNESLISRAEFLAGVRVGVPQVSDLAAEAVVLHYTDWLHPEDPARLREALSDVVGDHNVVCPVAQLAGRLAAQGARVYAYVFEHRASTLSWPLWMGVPHGYEIEFIFGIPLDPSRNYTAEEKIFAQRLMRYWANFARTGDPNEPRDPKAPQWPPYTAGAQQYVSLDLRPLEVRRGLRAQACAFWNRFLPKLLSATASEAPSTCPGFTHGEAAPRPGLPLPLLLLHQLLLLFLSHLRRL

SEQ ID NO: 4201 - protein, 303 aa, Homo sapiens
MADAASQVLLGSGLTILSQPLMYVKVLIQVGYEPLPPTIGRNIFGRQVCQLPGLFSYAQHIASIDGRRGLFTGLTPRLCSGVLGTVVHGKVLQHYQESDKGEELGPGNVQKEVSSSFDHVIKETTREMIARSAATLITHPFHVITLRSMVQFIGRESKYCGLCDSIITIYREEGILGFFAGLVPRLLGDILSLWLCNSLAYLVNTYALDSGVSTMNEMKSYSQAVTGFFASMLTYPFVLVSNLMAVNNCGLAGGCPPYSPIYTSWIDCWCMLQKEGNMSRGNSLFFRKVPFGKTYCCDLKMLI

SEQ ID NO: 4202 - protein, 793 aa, Homo sapiens
MLGLRPPLLALVGLLSLGCVLSQECTKFKVSSCRECIESGPGCTWCQKLNFTGPGDPDSIRCDTRPQLLMRGCAADDIMDPTSLAETQEDHNGGQKQLSPQKVTLYLRPGQAAAFNVTFRRAKGYPIDLYYLMDLSYSMLDDLRNVKKLGGDLLRALNEITESGRIGFGSFVDKTVLPFVNTHPDKLRNPCPNKEKECQPPFAFRHVLKLTNNSNQFQTEVGKQLISGNLDAPEGGLDAMMQVAACPEEIGWRNVTRLLVFATDDGFHFAGDGKLGAILTPNDGRCHLEDNLYKRSNEFDYPSVGQLAHKLAENNIQPIFAVTSRMVKTYEKKRPPVKHVHPAFPLLVPCVQPEQKLTEIIPKSAVGELSEDSSNVVHLIKNAYNKLSSRVFLDHNALPDTLKVTYDSFCSNGVTHRNQPRGDCDGVQINVPITFQVKVTATECIQEQSFVIRALGFTDIVTVQVLPQCECRCRDQSRDRSLCHGKGFLECGICRCDTGYIGKNCECQTQGRSSQELEGSCRKDNNSIICSGLGDCVCGQCLCHTSDVPGKLIYGQYCECDTINCERYNGQVCGGPGRGLCFCGKCRCHPGFEGSACQCERTTEGCLNPRRVECSGRGRCRCNVCECHSGYQLPLCQECPGCPSPCGKYISCAECLKFEKGPFGKNCSAACPGLQLSNNPVKGRTCKERDSEGCWVAYTLEQQDGMDRYLIYVDESRECVAGPNIAAIVGGTVAGIVLIGILLLVIWKALIHLSDLREYRRFEKEKLKSQWNNDNPLFKSATTTVMNPKFAES

SEQ ID NO: 4203 - protein, 757 aa, Homo sapiens
MTSGSVFFYILIFGKYFSHGGGQDVKCSLGYFPCGNITKCLPQLLHCNGVDDCGNQADEDNCGDNNGWSLQFDKYFASYYKMTSQYPFEAETPECLVGSVPVQCLCQGLELDCDETNLRAVPSVSSNVTAMSLQWNLIRKLPPDCFKNYHDLQKLYLQNNKITSISIYAFRGLNSLTKLYLSHNRITFLKPGVFEDLHRLEWLIIEDNHLSRISPPTFYGLNSLILLVLMNNVLTRLPDKPLCQHMPRLHWLDLEGNHIHNLRNLTFISCSNLTVLVMRKNKINHLNENTFAPLQKLDELDLGSNKIENLPPLIFKDLKELSQLNLSYNPIQKIQANQFDYLVKLKSLSLEGIEISNIQQRMFRPLMNLSHIYFKKFQYCGYAPHVRSCKPNTDGISSLENLLASIIQRVFVWVVSAVTCFGNIFVICMRPYIRSENKLYAMSIISLCCADCLMGIYLFVIGGFDLKFRGEYNKHAQLWMESTHCQLVGSLAILSTEVSVLLLTFLTLEKYICIVYPFRCVRPGKCRTITVLILIWITGFIVAFIPLSNKEFFKNYYGTNGVCFPLHSEDTESIGAQIYSVAIFLGINLAAFIIIVFSYGSMFYSVHQSAITATEIRNQVKKEMILAKRFFFIVFTDALCWIPIFVVKFLSLLQVEIPGTITSWVVIFILPINSALNPILYTLTTRPFKEMIHRFWYNYRQRKSMDSKGQKTYAPSFIWVEMWPLQEMPPELMKPDLFTYPCEMSLISQSTRLNSYS

SEQ ID NO: 4204 - protein, 161 aa, Homo sapiens
MVPKLFTSQICLLLLLGLLAVEGSLHVKPPQFTWAQWFETQHINMTSQQCTNAMQVINNYQRRCKNQNTFLLTTFANVVNVCGNPNMTCPSNKTRKNCHHSGSQVPLIHCNLTTPSPQNISNCRYAQTPANMFYIVACDNRDQRRDPPQYPVVPVHLDRII

SEQ ID NO: 4205 - protein, 347 aa, Homo sapiens
MCTKMEQPFYHDDSYTATGYGRAPGGLSLHDYKLLKPSLAVNLADPYRSLKAPGARGPGPEGGGGGSYFSGQGSDTGASLKLASSELERLIVPNSNGVITTTPTPPGQYFYPRGGGSGGGAGGAGGGVTEEQEGFADGFVKALDDLHKMNHVTPPNVSLGATGGPPAGPGGVYAGPEPPPVYTNLSSYSPASASSGGAGAAVGTGSSYPTTTISYLPHAPPFAGGHPAQLGLGRGASTFKEEPQTVPEARSRDATPPVSPINMEDQERIKVERKRLRNRLAATKCRKRKLERIARLEDKVKTLKAENAGLSSTAGLLREQVAQLKQKVMTHVSNGCQLLLGVKGHAF

SEQ ID NO: 4206 - protein, 798 aa, Homo sapiens
MNLQPIFWIGLISSVCCVFAQTDENRCLKANAKSCGECIQAGPNCGWCTNSTFLQEGMPTSARCDDLEALKKKGCPPDDIENPRGSKDIKKNKNVTNRSKGTAEKLKPEDITQIQPQQLVLRLRSGEPQTFTLKFKRAEDYPIDLYYLMDLSYSMKDDLENVKSLGTDLMNEMRRITSDFRIGFGSFVEKTVMPYISTTPAKLRNPCTSEQNCTSPFSYKNVLSLTNKGEVFNELVGKQRISGNLDSPEGGFDAIMQVAVCGSLIGWRNVTRLLVFSTDAGFHFAGDGKLGGIVLPNDGQCHLENNMYTMSHYYDYPSIAHLVQKLSENNIQTIFAVTEEFQPVYKELKNLIPKSAVGTLSANSSNVIQLIIDAYNSLSSEVILENGKLSEGVTISYKSYCKNGVNGTGENGRKCSNISIGDEVQFEISITSNKCPKKDSDSFKIRPLGFTEEVEVILQYICECECQSEGIPESPKCHEGNGTFECGACRCNEGRVGRHCECSTDEVNSEDMDAYCRKENSSEICSNNGECVCGQCVCRKRDNTNEIYSGKFCECDNFNCDRSNGLICGGNGVCKCRVCECNPNYTGSACDCSLDTSTCEASNGQICNGRGICECGVCKCTDPKFQGQTCEMCQTCLGVCAEHKECVQCRAFNKGEKKDTCTQECSYFNITKVESRDKLPQPVQPDPVSHCKEKDVDDCWFYFTYSVNGNNEVMVHVVENPECPTGPDIIPIVAGVVAGIVLIGLALLLIWKLLMIIHDRREFAKFEKEKMNAKWDTGENPIYKSAVTTVVNPKYEGK

SEQ ID NO: 4207 - protein, 244 aa, Homo sapiens
MELFLAGRRVLVTGAGKGIGRGTVQALHATGARVVAVSRTQADLDSLVRECPGIEPVCVDLGDWEATERALGSVGPVDLLVNNAAVALLQPFLEVTKEAFDRSFEVNLRAVIQVSQIVARGLIARGVPGAIVNVSSQCSQRAVTNHSVYCSTKGALDMLTKVMALELGPHKIRVNAVNPTVVMTSMGQATWSDPHKAKTMLNRIPLGKFAEVEHVVNAILFLLSDRSGMTTGSTLPVEGGFWAC

SEQ ID NO: 4208 - protein, 356 aa, Homo sapiens
MAAEGWIWRWGWGRRCLGRPGLLGPGPGPTTPLFLLLLLGSVTADITDGNSEHLKREHSLIKPYQGVGSSSMPLWDFQGSTMLTSQYVRLTPDERSKEGSIWNHQPCFLKDWEMHVHFKVHGTGKKNLHGDGIALWYTRDRLVPGPVFGSKDNFHGLAIFLDTYPNDETTERVFPYISVMVNNGSLSYDHSKDGRWTELAGCTADFRNRDHDTFLAVRYSRGRLTVMTDLEDKNEWKNCIDITGVRLPTGYYFGASAGTGDLSDNHDIISMKLFQLMVEHTPDEESIDWTKIEPSVNFLKSPKDNVDDPTGNFRSGPLTGWRVFLLLLCALLGIVVCAVVGAVVFQKRQERNKRFY

SEQ ID NO: 4209 - protein, 130 aa, Homo sapiens
MSGRGKQGGKARAKAKTRSSRAGLQFPVGRVHRLLRKGNYSERVGAGAPVYLAAVLEYLTAEILELAGNAARDNKKTRIIPRHLQLAIRNDEELNKLLGRVTIAQGGVLPNIQAVLLPKKTESHHKAKGK

SEQ ID NO: 4210 - protein, 904 aa, Homo sapiens
MDRYLLLVIWGEGKFPSAASREAEHGPEVSSGEGTENQPDFTAANVYHLLKRSISASINPEDSTFPACSVGGIPGSKKWFFAVQAIYGFYQFCSSDWQEIHFDTEKDKIEDVLQTNIEECLGAVECFEEEDSNSRESLSLADLYEEAAENLHQLSDKLPAPGRAMVDIILLLSDKDPPKLKDYLPTVGALKHLREWYSAKITIAGNHCEINCQKIAEYLSANVVSLEDLRNVIDSKELWRGKIQIWERKFGFEISFPEFCLKGVTLKNFSTSNLNTDFLAKKIIPSKDKNILPKVFHYYGPALEFVQMIKLSDLPSCYMSDIEFELGLTNSTKQNSVLLLEQISSLCSKVGALFVLPCTISNILIPPPNQLSSRKWKEYIAKKPKTISVPDVEVKGECSSYYLLLQGNGNRRCKATLIHSANQINGSFALNLIHGKMKTKTEEAKLSFPFDLLSLPHFSGEQIVQREKQLANVQVLALEECLKRRKLAKQPETVSVAELKSLLVLTRKHFLDYFDAVIPKMILRKMDKIKTFNILNDFSPVEPNSSSLMETNPLEWPERHVLQNLETFEKTKQKMRTGSLPHSSEQLLGHKEGPRDSITLLDAKELLKYFTSDGLPIGDLQPLPIQKGEKTFVLTPELSPGKLQVLPFEKASVCHYHGIEYCLDDRKALERDGGFSELQSRLIRYETQTTCTRESFPVPTVLSPLPSPVVSSDPGSVPDGEVLQNELRTEVSRLKRRSKDLNCLYPRKRLVKSESSESLLSQTTGNSNHYHHHVTSRKPQTERSLPVTCPLVPIPSCETPKLATKTSSGQKSMHESKTSRQIKESRSQKHTRILKEVVTETLKKHSITETHECFTACSQRLFEISKFYLKDLKTSRGLFEEMKKTANNNAVQVIDWVLEKTSKK

SEQ ID NO: 4211 - protein, 379 aa, Homo sapiens
MAATEGVGEAAQGGEPGQPAQPPPQPHPPPPQQQHKEEMAAEAGEAVASPMDDGFVSLDSPSYVLYRDRAEWADIDPVPQNDGPNPVVQIIYSDKFRDVYDYFRAVLQRDERSERAFKLTRDAIELNAANYTVWHFRRVLLKSLQKDLHEEMNYITAIIEEQPKNYQVWHHRRVLVEWLRDPSQELEFIADILNQDAKNYHAWQHRQWVIQEFKLWDNELQYVDQLLKEDVRNNSVWNQRYFVISNTTGYNDRAVLEREVQYTLEMIKLVPHNESAWNYLKGILQDRGLSKYPNLLNQLLDLQPSHSSPYLIAFLVDIYEDMLENQCDNKEDILNKALELCEILAKEKDTIRKEYWRYIGRSLQSKHSTENDSPTNVQQ

SEQ ID NO: 4212 - protein, 1337 aa, Homo sapiens
MDFTAQPKPATALCGVVSADGKIAYPPGVKEITDKITTDEMIKRLKMVVKTFMDMDQDSEDEKQQYLPLALHLASEFFLRNPNKDVRLLVACCLADIFRIYAPEAPYTSHDKLKDIFLFITRQLKGLEDTKSPQFNRYFYLLENLAWVKSYNICFELEDCNEIFIQLFRTLFSVINNSHNKKVQMHMLDLMSSIIMEGDGVTQELLDSILINLIPAHKNLNKQSFDLAKVLLKRTVQTIEACIANFFNQVLVLGRSSVSDLSEHVFDLIQELFAIDPHLLLSVMPQLEFKLKSNDGEERLAVVRLLAKLFGSKDSDLATQNRPLWQCFLGRFNDIHVPVRLESVKFASHCLMNHPDLAKDLTEYLKVRSHDPEEAIRHDVIVTIITAAKRDLALVNDQLLGFVRERTLDKRWRVRKEAMMGLAQLYKKYCLHGEAGKEAAEKVSWIKDKLLHIYYQNSIDDKLLVEKIFAQYLVPHNLETEERMKCLYYLYASLDPNAVKALNEMWKCQNMLRSHVRELLDLHKQPTSEANCSAMFGKLMTIAKNLPDPGKAQDFVKKFNQVLGDDEKLRSQLELLISPTCSCKQADICVREIARKLANPKQPTNPFLEMVKFLLERIAPVHIDSEAISALVKLMNKSIEGTADDEEEGVSPDTAIRSGLELLKVLSFTHPTSFHSAETYESLLQCLRMEDDKVAEAAIQIFRNTGHKIETDLPQIRSTLIPILHQKAKRGTPHQAKQAVHCIHAIFTNKEVQLAQIFEPLSRSLNADVPEQLITPLVSLGHISMLAPDQFASPMKSVVANFIVKDLLMNDRSTGEKNGKLWSPDEEVSPEVLAKVQAIKLLVRWLLGMKNNQSKSANSTLRLLSAMLVSEGDLTEQKRISKSDMSRLRLAAGSAIMKLAQEPCYHEIITPEQFQLCALVINDECYQVRQIFAQKLHKALVKLLLPLEYMAIFALCAKDPVKERRAHARQCLLKNISIRREYIKQNPMATEKLLSLLPEYVVPYMIHLLAHDPDFTRSQDVDQLRDIKECLWFMLEVLMTKNENNSHAFMKKMAENIKLTRDAQSPDESKTNEKLYTVCDVALCVINSKSALCNADSPKDPVLPMKFFTQPEKDFCNDKSYISEETRVLLLTGKPKPAGVLGAVNKPLSATGRKPYVRSTGTETGSNINVNSELNPSTGNRSREQSSEAAETGVSENEENPVRIISVTPVKNIDPVKNKEINSDQATQGNISSDRGKKRTVTAAGAENIQQKTDEKVDESGPPAPSKPRRGRRPKSESQGNATKNDDLNKPINKGRKRAAVGQESPGGLEAGNAKAPKLQDLAKKAAPAERQIDLQR

SEQ ID NO: 4213 - protein, 514 aa, Homo sapiens
MSYGSIARGGGLGSRGPFGGPSRQGCQPLECARCWTEYGIRHFPCPSPESKLQNRCVGKDGEGDLGPAGTPIVPRARKRGPGVAPEGSRMPEPTSSPTIGPRKDSAAGPHGRMAGPSTTRAKKRKPNFCPQETEVLVSKVSKHHQLLFGTGLLKAEPTRRYRVWSRILQAVNALGYCRRDVVDLKHKWRDLRAVVRRKLGDLRKAAHGPSPGSGKPQALALTPVEQVVAKTFSCQALPSEGFSLEPPRATQVDPCNLQELFQEMSANVFRINSSVTSLERSLQSLGTPSDTQELRDSLHTAQQETNKTIAASASSVKQMAELLRSSCPQERLQQERPQLDRLKTQLSDAIQCYGVVQKKIAEKSRALLPMAQRGSKQQSPQAPFAELADDEKVFNGSDNMWQGQEQALLPDITEEDLEAIRLREEAILQMESNLLDVNQIIKDLASMVSEQGEAVDSIEASLEAASSHAEAARQLLAGASRHQLQRHKIKCCFLSAGVTALLVIIIIIATSVRK

SEQ ID NO: 4214 - protein, 242 aa, Homo sapiens
MPGPWLLLALALTLNLTGVPGGRAQPEAAQQEAVTAAEHPGLDDFLRQVERLLFLRENIQRLQGDQGEHSASQIFQSDWLSKRQHPGKREEEEEEGVEEEEEEEGGAVGPHKRQHPGRREDEASWSVDVTQHKRQHPGRRSPWLAYAVPKRQHPGRRLADPKAQRSWEEEEEEEEREEDLMPEKRQHPGKRALGGPCGPQGAYGQAGLLLGLLDDLSRSQGAEEKRQHPGRRAAWVREPLEE

SEQ ID NO: 4215 - protein, 513 aa, Homo sapiens
MAASRNGFEAVEAEGSAGCRGSSGMEVVLPLDPAVPAPLCPHGPTLLFVKVTQGKEETRRFYACSACRDRKDCNFFQWEDEKLSGARLAAREAHNRRCQPPLSRTQCVERYLKFIELPLTQRKFCQTCQQLLLPDDWGQHSEHQVLGNVSITQLRRPSQLLYPLENKKTNAQYLFADRSCQFLVDLLSALGFRRVLCVGTPRLHELIKLTASGDKKSNIKSLLLDIDFRYSQFYMEDSFCHYNMFNHHFFDGKTALEVCRAFLQEDKGEGIIMVTDPPFGGLVEPLAITFKKLIAMWKEGQSQDDSHKELPIFWIFPYFFESRICQFFPSFQMLDYQVDYDNHALYKHGKTGRKQSPVRIFTNIPPNKIILPTEEGYRFCSPCQRYVSLENQHCELCNSCTSKDGRKWNHCFLCKKCVKPSWIHCSICNHCAVPDHSCEGPKHGCFICGELDHKRSTCPNIATSKRANKAVRKQKQRKSNKMKMETTKGQSMNHTSATRRKKRRERAHQYLGS

SEQ ID NO: 4216 - protein, 257 aa, Homo sapiens
MVSWMICRLVVLVFGMLCPAYASYKAVKTKNIREYVRWMMYWIVFALFMAAEIVTDIFISWFPFYYEIKMAFVLWLLSPYTKGASLLYRKFVHPSLSRHEKEIDAYIVQAKERSYETVLSFGKRGLNIAASAAVQAATKSQGALAGRLRSFSMQDLRSISDAPAPAYHDPLYLEDQVSHRRPPIGYRAGGLQDSDTEDECWSDTEAVPRAPARPREKPLIRSQSLRVVKRKPPVREGTSRSLKVRTRKKTVPSDVDS

SEQ ID NO: 4217 - protein, 1271 aa, Homo sapiens
MVDPVGFAEAWKAQFPDSEPPRMELRSVGDIEQELERCKASIRRLEQEVNQERFRMIYLQTLLAKEKKSYDRQRWGFRRAAQAPDGASEPRASASRPQPAPADGADPPPAEEPEARPDGEGSPGKARPGTARRPGAAASGERDDRGPPASVAALRSNFERIRKGHGQPGADAEKPFYVNVEFHHERGLVKVNDKEVSDRISSLGSQAMQMERKKSQHGAGSSVGDASRPPYRGRSSESSCGVDGDYEDAELNPRFLKDNLIDANGGSRPPWPPLEYQPYQSIYVGGMMEGEGKGPLLRSQSTSEQEKRLTWPRRSYSPRSFEDCGGGYTPDCSSNENLTSSEEDFSSGQSSRVSPSPTTYRMFRDKSRSPSQNSQQSFDSSSPPTPQCHKRHRHCPVVVSEATIVGVRKTGQIWPNDGEGAFHGDADGSFGTPPGYGCAADRAEEQRRHQDGLPYIDDSPSSSPHLSSKGRGSRDALVSGALESTKASELDLEKGLEMRKWVLSGILASEETYLSHLEALLLPMKPLKAAATTSQPVLTSQQIETIFFKVPELYEIHKEFYDGLFPRVQQWSHQQRVGDLFQKLASQLGVYRAFVDNYGVAMEMAEKCCQANAQFAEISENLRARSNKDAKDPTTKNSLETLLYKPVDRVTRSTLVLHDLLKHTPASHPDHPLLQDALRISQNFLSSINEEITPRRQSMTVKKGEHRQLLKDSFMVELVEGARKLRHVFLFTDLLLCTKLKKQSGGKTQQYDCKWYIPLTDLSFQMVDELEAVPNIPLVPDEELDALKIKISQIKNDIQREKRANKGSKATERLKKKLSEQESLLLLMSPSMAFRVHSRNGKSYTFLISSDYERAEWRENIREQQKKCFRSFSLTSVELQMLTNSCVKLQTVHSIPLTINKEDDESPGLYGFLNVIVHSATGFKQSSNLYCTLEVDSFGYFVNKAKTRVYRDTAEPNWNEEFEIELEGSQTLRILCYEKCYNKTKIPKEDGESTDRLMGKGQVQLDPQALQDRDWQRTVIAMNGIEVKLSVKFNSREFSLKRMPSRKQTGVFGVKIAVVTKRERSKVPYIVRQCVEEIERRGMEEVGIYRVSGVATDIQALKAAFDVNNKDVSVMMSEMDVNAIAGTLKLYFRELPEPLFTDEFYPNFAEGIALSDPVAKESCMLNLLLSLPEANLLTFLFLLDHLKRVAEKEAVNKMSLHNLATVFGPTLLRPSEKESKLPANPSQPITMTDSWSLEVMSQVQVLLYFLQLEAIPAPDSKRQSILFSTEV

SEQ ID NO: 4218 - protein, 980 aa, Homo sapiens
MALAVLRVLEPFPTETPPLAVLLPPGGPWPAAELGLVLALRPAGESPAGPALLVAALEGPDAGTEEQGPGPPQLLVSRALLRLLALGSGAWVRARAVRRPPALGWALLGTSLGPGLGPRVGPLLVRRGETLPVPGPRVLETRPALQGLLGPGTRLAVTELRGRARLCPESGDSSRPPPPPVVSSFAVSGTVRRLQGVLGGTGDSLGVSRSCLRGLGLFQGEWVWVAQARESSNTSQPHLARVQVLEPRWDLSDRLGPGSGPLGEPLADGLALVPATLAFNLGCDPLEMGELRIQRYLEGSIAPEDKGSCSLLPGPPFARELHIEIVSSPHYSTNGNYDGVLYRHFQIPRVVQEGDVLCVPTIGQVEILEGSPEKLPRWREMFFKVKKTVGEAPDGPASAYLADTTHTSLYMVGSTLSPVPWLPSEESTLWSSLSPPGLEALVSELCAVLKPRLQPGGALLTGTSSVLLRGPPGCGKTTVVAAACSHLGLHLLKVPCSSLCAESSGAVETKLQAIFSRARRCRPAVLLLTAVDLLGRDRDGLGEDARVMAVLRHLLLNEDPLNSCPPLMVVATTSRAQDLPADVQTAFPHELEVPALSEGQRLSILRALTAHLPLGQEVNLAQLARRCAGFVVGDLYALLTHSSRAACTRIKNSGLAGGLTEEDEGELCAAGFPLLAEDFGQALEQLQTAHSQAVGAPKIPSVSWHDVGGLQEVKKEILETIQLPLEHPELLSLGLRRSGLLLHGPPGTGKTLLAKAVATECSLTFLSVKGPELINMYVGQSEENVREVFARARAAAPCIIFFDELDSLAPSRGRSGDSGGVMDRVVSQLLAELDGLHSTQDVFVIGATNRPDLLDPALLRPGRFDKLVFVGANEDRASQLRVLSAITRKFKLEPSVSLVNVLDCCPPQLTGADLYSLCSDAMTAALKRRVHDLEEGLEPGSSALMLTMEDLLQAAARLQPSVSEQELLRYKRIQRKFAAC

SEQ ID NO: 4219 - protein, 473 aa, Homo sapiens
MPKLQGFEFWSRTLRGARHVVAPMVDQSELAWRLLSRRHGAQLCYTPMLHAQVFVRDANYRKENLYCEVCPEDRPLIVQFCANDPEVFVQAALLAQDYCDAIDLNLGCPQMIAKRGHYGAFLQDEWDLLQRMILLAHEKLSVPVTCKIRVFPEIDKTVRYAQMLEKAGCQLLTVHGRTKEQKGPLSGAASWEHIKAVRKAVAIPVFANGNIQCLQDVERCLRDTGVQGVMSAEGNLHNPALFEGRSPAVWELAEEYLDIVREHPCPLSYVRAHLFKLWHHTLQVHQELREELAKVKTLEGIAAVSQELKLRCQEEISRQEGAKPTGDLPFHWICQPYIRPGPREGSKEKAGARSKRALEEEEGGTEVLSKNKQKKQLRNPHKTFDPSLKPKYAKCDQCGNPKGNRCVFSLCRGCCKKRASKETADCPGHGLLFKTKLEKSLAWKEAQPELQEPQPAAPGTPGGFSEVMGSALA

SEQ ID NO: 4220 - protein, 237 aa, Homo sapiens
MDKVCAVFGGSRGIGRAVAQLMARKGYRLAVIARNLEGAKAAAGDLGGDHLAFSCDVAKEHDVQNTFEELEKHLGRVNFLVNAAGINRDGLLVRTKTEDMVSQLHTNLLGSMLTCKAAMRTMIQQQGGSIVNVGSIVGLKGNSGQSVYSASKGGLVGFSRALAKEVARKKIRVNVVAPGFVHTDMTKDLKEEHLKKNIPLGRFGETIEVAHAVVFLLESPYITGHVLVVDGGLQLIL

SEQ ID NO: 4221 - protein, 64 aa, Homo sapiens
MRVLYLLFSFLFIFLMPLPGVFGGIGDPVTCLKSGAICHPVFCPRRYKQIGTCGLPGTKCCKKP

SEQ ID NO: 4222 - protein, 136 aa, Homo sapiens
MRTPGPLPVLLLLLAGAPAARPTPPTCYSRMRALSQEITRDFNLLQVSEPSEPCVRYLPRLYLDIHNYCVLDKLRDFVASPPCWKVAQVDSLKDKARKLYTIMNSFCRRDLVFLLDDCNALEYPIPVTTVLPDRQR

SEQ ID NO: 4223 - protein, 583 aa, Homo sapiens
MAPELTPEEEQATKQFLEEINKWTVQYNVSPLSWNVAVKFLMARKFDVLRAIELFHSYRETRRKEGIVKLKPHEEPLRSEILSGKFTILNVRDPTGASIALFTARLHHPHKSVQHVVLQALFYLLDRAVDSFETQRNGLVFIYDMCGSNYANFELDLGKKVLNLLKGAFPARLKKVLIVGAPIWFRVPYSIISLLLKDKVRERIQILKTSEVTQHLPRECLPENLGGYVKIDLATWNFQFLPQVNGHPDPFDEIILFSLPPALDWDSVHVPGPHAMTIQELVDYVNARQKQGIYEEYEDIRRENPVGTFHCSMSPGNLEKNRYGDVPCLDQTRVKLTKRSGHTQTDYINASFMDGYKQKNAYIGTQGPLENTYRDFWLMVWEQKVLVIVMTTRFEEGGRRKCGQYWPLEKDSRIRFGFLTVTNLGVENMNHYKKTTLEIHNTEERQKRQVTHFQFLSWPDYGVPSSAASLIDFLRVVRNQQSLAVSNMGARSKGQCPEPPIVVHCSAGIGRTGTFCSLDICLAQLEELGTLNVFQTVSRMRTQRAFSIQTPEQYYFCYKAILEFAEKEGMVSSGQNLLAVESQ

SEQ ID NO: 4224 - protein, 441 aa, Homo sapiens
MVHIKKGELTQEEKELLEVIGKGTVQEAGTLLSSKNVRVNCLDENGMTPLMHAAYKGKLDMCKLLLRHGADVNCHQHEHGYTALMFAALSGNKDITWVMLEAGAETDVVNSVGRTAAQMAAFVGQHDCVTIINNFFPRERLDYYTKPQGLDKEPKLPPKLAGPLHKIITTTNLHPVKIVMLVNENPLLTEEAALNKCYRVMDLICEKCMKQRDMNEVLAMKMHYISCIFQKCINFLKDGENKLDTLIKSLLKGRASDGFPVYQEKIIRESIRKFPYCEATLLQQLVRSIAPVEIGSDPTAFSVLTQAITGQVGFVDVEFCTTCGEKGASKRCSVCKMVIYCDQTCQKTHWFTHKKICKNLKDIYEKQQLEAAKEKRQEENHGKLDVNSNCVNEEQPEAEVGISQKDSNPEDSGEGKKESLESEAELEGLQDAPAGPQVSEE

SEQ ID NO: 4225 - protein, 350 aa, Homo sapiens
MAGRLLGKALAAVSLSLALASVTIRSSRCRGIQAFRNSFSSSWFHLNTNVMSGSNGSKENSHNKARTSPYPGSKVERSQVPNEKVGWLVEWQDYKPVEYTAVSVLAGPRWADPQISESNFSPKFNEKDGHVERKSKNGLYEIENGRPRNPAGRTGLVGRGLLGRWGPNHAADPIITRWKRDSSGNKIMHPVSGKHILQFVAIKRKDCGEWAIPGGMVDPGEKISATLKREFGEEALNSLQKTSAEKREIEEKLHKLFSQDHLVIYKGYVDDPRNTDNAWMETEAVNYHDETGEIMDNLMLEAGDDAGKVKWVDINDKLKLYASHSQFIKLVAEKRDAHWSEDSEADCHAL

SEQ ID NO: 4226 - protein, 191 aa, Homo sapiens
MGKSCKVVVCGQASVGKTSILEQLLYGNHVVGSEMIETQEDIYVGSIETDRGVREQVRFYDTRGLRDGAELPRHCFSCTDGYVLVYSTDSRESFQRVELLKKEIDKSKDKKEVTIVVLGNKCDLQEQRRVDPDVAQHWAKSEKVKLWEVSVADRRSLLEPFVYLASKMTQPQSKSAFPLSRKNKGSGSLDG

SEQ ID NO: 4227 - protein, 963 aa, Homo sapiens
MGLPEPGPLRLLALLLLLLLLLLLQLQHLAAAAADPLLGGQGPAKDCEKDQFQCRNERCIPSVWRCDEDDDCLDHSDEDDCPKKTCADSDFTCDNGHCIHERWKCDGEEECPDGSDESEATCTKQVCPAEKLSCGPTSHKCVPASWRCDGEKDCEGGADEAGCATLCAPHEFQCGNRSCLAAVFVCDGDDDCGDGSDERGCADPACGPREFRCGGDGGGACIPERWVCDRQFDCEDRSDEAAELCGRPGPGATSAPAACATASQFACRSGECVHLGWRCDGDRDCKDKSDEADCPLGTCRGDEFQCGDGTCVLAIKHCNQEQDCPDGSDEAGCLQGLNECLHNNGGCSHICTDLKIGFECTCPAGFQLLDQKTCGDIDECKDPDACSQICVNYKGYFKCECYPGYEMDLLTKNCKAAAGKSPSLIFTNRHEVRRIDLVKRNYSRLIPMLKNVVALDVEVATNRIYWCDLSYRKIYSAYMDKASDPKEQEVLIDEQLHSPEGLAVDWVHKHIYWTDSGNKTISVATVDGGRRRTLFSRNLSEPRAIAVDPLRGFMYWSDWGDQAKIEKSGLNGVDRQTLVSDNIEWPNGITLDLLSQRLYWVDSKLHQLSSIDFSGGNRKTLISSTDFLSHPFGIAVFEDKVFWTDLENEAIFSANRLNGLEISILAENLNNPHDIVIFHELKQPRAPDACELSVQPNGGCEYLCLPAPQISSHSPKYTCACPDTMWLGPDMKRCYRAPQSTSTTTLASTMTRTVPATTRAPGTTVHRSTYQNHSTETPSLTAAVPSSVSVPRAPSISPSTLSPATSNHSQHYANEDSKMGSTVTAAVIGIIVPIVVIALLCMSGYLIWRNWKRKNTKSMNFDNPVYRKTTEEEDEDELHIGRTAQIGHVYPAAISSFDRPLWAEPCLGETREPEDPAPALKELFVLPGEPRSQLHQLPKNPLSELPVVKSKRVALSLEDDGLP

SEQ ID NO: 4228 - protein, 555 aa, Homo sapiens
MDSVVFEDVAVDFTLEEWALLDSAQRDLYRDVMLETFRNLASVDDGTQFKANGSVSLQDMYGQEKSKEQTIPNFTGNNSCAYTLEKNCEGYGTEDHHKNLRNHMVDRFCTHNEGNQYGEAIHQMPDLTLHKKVSAGEKPYECTKCRTVFTHLSSLKRHVKSHCGRKAPPGEECKQACICPSHLHSHGRTDTEEKPYKCQACGQTFQHPRYLSHHVKTHTAEKTYKCEQCRMAFNGFASFTRHVRTHTKDRPYKCQECGRAFIYPSTFQRHMTTHTGEKPYKCQHCGKAFTYPQAFQRHEKTHTGEKPYECKQCGKTFSWSETLRVHMRIHTGDKLYKCEHCGKAFTSSRSFQGHLRTHTGEKPYECKQCGKAFTWSSTFREHVRIHTQEQLYKCEQCGKAFTSSRSFRGHLRTHTGEKPYECKQCGKTFTWSSTFREHVRIHTQEQLHKCEHCGKAFTSSRAFQGHLRMHTGEKPYECKQCGKTFTWSSTLHNHVRMHTGEKPHKCKQCGMSFKWHSSFRNHLRMHTGQKSHECQSYSKAFSCQVILSKTSESTH

SEQ ID NO: 4229 - protein, 729 aa, Homo sapiens
MSTRTPLPTVNERDTENHTSHGDGRQEVTSRTSRSGARCRNSIASCADEQPHIGNYRLLKTIGKGNFAKVKLARHILTGREVAIKIIDKTQLNPTSLQKLFREVRIMKILNHPNIVKLFEVIETEKTLYLIMEYASGGEVFDYLVAHGRMKEKEARSKFRQIVSAVQYCHQKRIVHRDLKAENLLLDADMNIKIADFGFSNEFTVGGKLDTFCGSPPYAAPELFQGKKYDGPEVDVWSLGVILYTLVSGSLPFDGQNLKELRERVLRGKYRIPFYMSTDCENLLKRFLVLNPIKRGTLEQIMKDRWINAGHEEDELKPFVEPELDISDQKRIDIMVGMGYSQEEIQESLSKMKYDEITATYLLLGRKSSELDASDSSSSSNLSLAKVRPSSDLNNSTGQSPHHKVQRSVSSSQKQRRYSDHAGPAIPSVVAYPKRSQTSTADSDLKEDGISSRKSSGSAVGGKGIAPASPMLGNASNPNKADIPERKKSSTVPSSNTASGGMTRRNTYVCSERTTADRHSVIQNGKENSTIPDQRTPVASTHSISSAATPDRIRFPRGTASRSTFHGQPRERRTATYNGPPASPSLSHEATPLSQTRSRGSTNLFSKLTSKLTRSRNVSAEQKDENKEAKPRSLRFTWSMKTTSSMDPGDMMREIRKVLDANNCDYEQRERFLLFCVHGDGHAENLVQWEMEVCKLPRLSLNGVRFKRISGTSIAFKNIASKIANELKL

SEQ ID NO: 4230 - protein, 193 aa, Homo sapiens
MSDDDSRASTSSSSSSSSNQQTEKETNTPKKKESKVSMSKNSKLLSTSAKRIQKELADITLDPPPNCSAGPKGDNIYEWRSTILGPPGSVYEGGVFFLDITFTPEYPFKPPKVTFRTRIYHCNINSQGVICLDILKDNWSPALTISKVLLSICSLLTDCNPADPLVGSIATQYMTNRAEHDRMARQWTKRYAT

SEQ ID NO: 4231 - protein, 502 aa, Homo sapiens
MRCSPGGVWLALAASLLHVSLQGEFQRKLYKELVKNYNPLERPVANDSQPLTVYFSLSLLQIMDVDEKNQVLTTNIWLQMSWTDHYLQWNVSEYPGVKTVRFPDGQIWKPDILLYNSADERFDATFHTNVLVNSSGHCQYLPPGIFKSSCYIDVRWFPFDVQHCKLKFGSWSYGGWSLDLQMQEADISGYIPNGEWDLVGIPGKRSERFYECCKEPYPDVTFTVTMRRRTLYYGLNLLIPCVLISALALLVFLLPADSGEKISLGITVLLSLTVFMLLVAEIMPATSDSVPLIAQYFASTMIIVGLSVVVTVIVLQYHHHDPDGGKMPKWTRVILLNWCAWFLRMKRPGEDKVRPACQHKQRRCSLASVEMSAVAPPPASNGNLLYIGFRGLDGVHCVPTPDSGVVCGRMACSPTHDEHLLHGGQPPEGDPDLAKILEEVRYIANRFRCQDESEAVCSEWKFAACVVDRLCLMAFSVFTIICTIGILMSAPNFVEAVSKDFA

SEQ ID NO: 4232 - protein, 370 aa, Homo sapiens
MSHPSPQAKPSNPSNPRVFFDVDIGGERVGRIVLELFADIVPKTAENFRALCTGEKGIGHTTGKPLHFKGCPFHRIIKKFMIQGGDFSNQNGTGGESIYGEKFEDENFHYKHDREGLLSMANAGRNTNGSQFFITTVPTPHLDGKHVVFGQVIKGIGVARILENVEVKGEKPAKLCVIAECGELKEGDDGGIFPKDGSGDSHPDFPEDADIDLKDVDKILLITEDLKNIGNTFFKSQNWEMAIKKYAEVLRYVDSSKAVIETADRAKLQPIALSCVLNIGACKLKMSNWQGAIDSCLEALELDPSNTKALYRRAQGWQGLKEYDQALADLKKAQGIAPEDKAIQAELLKVKQKIKAQKDKEKAVYAKMFA

SEQ ID NO: 4233 - protein, 1076 aa, Homo sapiens
MAEFTSYKETASSRHLRFKLQSLSRRLDELEEATKNLQKAEDELLDLQDKVIQAEGSNSSMLAEIEVLRQRVLRIEGKDEEIKRAEDLCRLMKEKLEEEENLTRELKSEIERLQKRMAELEKLEEAFSRSKNDCTQLCLSLNEERNLTKKISSELEMLRVKVKELESSEDRLDKTEQSLASELEKLKSLTLSFVSERKYLNEKEKENEKLIKELTQKLEQNKKMNRDYTRNASNLERNDLRIEDGISSTLPSKESRRKGGLDYLKQVENETRNKSENEKNRNQEDNKVKDLNQEIEKLKTQIKHFESLEEELKKMKSKNNDLQDNYLSEQNKNKLLASQLEEIKLQIKKQKELENGEVEGEDAFLSSKGRHERTKFRGHGSEASVSKHTARELSPQHKRERLRNREFALNNENYSLSNRQVSSPSFTNRRAAKASHMGVSTDSGTQETKKTEDRFVPGSSQSEGKKSREQPSVLSRYPPAAQEHSKAWKGTSKPGTESGLKGKVEKTTRTFSDTTHGSVPSDPLGRADKASDTSSETVFGKRGHVLGNGSQVTQAANSGCSKAIGALASSRRSSSEGLSKGKKAANGLEADNSCPNSKAPVLSKYPYSCRSQENILQGFSTSHKEGVNQPAAVVMEDSSPHEALRCRVIKSSGREKPDSDDDLDIASLVTAKLVNTTITPEPEPKPQPNSREKAKTRGAPRTSLFENDKDAGMENESVKSVRASTNTMELPDTNGAGVKSQRPFSPREALRSRAIIKPVIVDKDVKKIMGGSGTETTLEKQKPVSKPGPNKVTSSITIYPSDSSSPRAAPGEALRERHTSTSNIQVGLAELTSVSNHVSSPFELSIHKHDITLQLAEAERMADGPLKDRPETVVSRSSIIIKPSDPVERNSHAPPAETIRWKSHSAPSEVGFSDARHVTVRNAWKSRRDLKSLEDPPTRIGKNVESTNSNAYTQRSSTDFSELEQPRSCLFEQGTRRVGPSSGDAPEPSSRRTQSSLTVSEVLTRRNRVGDTITVAAWNHSASMEEEGEDCTLSVYRQLHNSLDPSELPGKQGLPESGRVRAEERLRPTRPCAEEN

SEQ ID NO: 4234 - protein, 453 aa, Homo sapiens
MQARALLLAALAALALAREPPAAPCPARCDVSRCPSPRCPGGYVPDLCNCCLVCAASEGEPCGGPLDSPCGESLECVRGLCRCRWSHAVCGTDGHTYANVCALQAASRRALQLSGTPVRQLQKGACPLGLHQLSSPRYKFNFIADVVEKIAPAVVHIELFLRHPLFGRNVPLSSGSGFIMSEAGLIITNAHVVSSNSAAPGRQQLKVQLQNGDSYEATIKDIDKKSDIATIKIHPKKKLPVLLLGHSADLRPGEFVVAIGSPFALQNTVTTGIVSTAQREGRELGLRDSDMDYIQTDAIINYGNSGGPLVNLDGEVIGINTLKVTAGISFAIPSDRITRFLTEFQDKQIKDWKKRFIGIRMRTITPSLVDELKASNPDFPEVSSGIYVQEVAPNSPSQRGGIQDGDIIVKVNGRPLVDSSELQEAVLTESPLLLEVRRGNDDLLFSIAPEVVM

SEQ ID NO: 4235 - protein, 1439 aa, Homo sapiens
MASSETEIRWAEPGLGKGPQRRRWAWAEDKRDVDRSSSQSWEEERLFPNATSPELLEDFRLAQQHLPPLEWDPHPQPDGHQDSESGETSGEEAEAEDVDSPASSHEPLAWLPQQGRQLDMTEEEPDGTLGSLEVEEAGESSSRLGYEAGLSLEGHGNTSPMALGHGQARGWVASGEQASGDKLSEHSEVNPSVELSPARSWSSGTVSLDHPSDSLDSTWEGETDGPQPTALAETLPEGPSHHLLSPDGRTGGSVARATPMEFQDSSAPPAQSPQHATDRWRRETTRFFCPQPKEHIWKQTKTSPKPLPSRFIGSISPLNPQPRPTRQGRPLPRQGATLAGRSSSNAPKYGRGQLNYPLPDFSKVGPRVRFPKDESYRPPKSRSHNRKPQAPARPLIFKSPAEIVQEVLLSSGEAALAKDTPPAHPITRVPQEFQTPEQATELVHQLQEDYHRLLTKYAEAENTIDQLRLGAKVNLFSDPPQPNHSIHTGMVPQGTKVLSFTIPQPRSAEWWPGPAEDPQASAASGWPSARGDLSPSSLTSMPTLGWLPENRDISEDQSSAEQTQALASQASQFLAKVESFERLIQAGRLMPQDQVKGFQRLKAAHAALEEEYLKACREQHPAQPLAGSKGTPGRFDPRRELEAEIYRLGSCLEELKEHIDQTQQEPEPPGSDSALDSTPALPCLHQPTHLPAPSGQAPMPAIKTSCPEPATTTAAASTGPCPLHVNVEVSSGNSEVEDRPQDPLARLRHKELQMEQVYHGLMERYLSVKSLPEAMRMEEEEEGEEEEEEEGGGDSLEVDGVAATPGKAEATRVLPRQCPVQAEKSHGAPLEEATEKMVSMKPPGFQASLARDGHMSGLGKAEAAPPGPGVPPHPPGTKSAASHQSSMTSLEGSGISERLPQKPLHRGGGPHLEETWMASPETDSGFVGSETSRVSPLTQTPEHRLSHISTAGTLAQPFAASVPRDGASYPKARGSLIPRRATEPSTPRSQAQRYLSSPSGPLRQRAPNFSLERTLAAEMAVPGSEFEGHKRISEQPLPNKTISPPPAPAPAAAPLPCGPTETIPSFLLTRAGRDQAICELQEEVSRLRLRLEDSLHQPLQGSPTRPASAFDRPARTRGRPADSPATWGSHYGSKSTERLPGEPRGEEQIVPPGRQRARSSSVPREVLRLSLSSESELPSLPLFSEKSKTTKDSPQAARDGKRGVGSAGWPDRVTFRGQYTGHEYHVLSPKAVPKGNGTVSCPHCRPIRTQDAGGAVTGDPLGPPPADTLQCPLCGQVGSPPEADGPGSATSGAEKATTRRKASSTPSPKQRSKQAGSSPRPPPGLWYLATAPPAPAPPAFAYISSVPIMPYPPAAVYYAPAGPTSAQPAAKWPPTASPPPARRHRHSIQLDLGDLEELNKALSRAVQAAESVRSTTRQMRSSLSADLRQAHSLRGSCLF

SEQ ID NO: 4236 - protein, 126 aa, Homo sapiens
MAQEVSEYLSQNPRVAAWVEALRCDGETDKHWRHRRDFLLRNAGDLAPAGGAASASTDEAADAESGTRNRQLQQLISFSMAWANHVFLGCRYPQKVMDKILSMAEGIKVTDAPTYTTRDELVAKKG

SEQ ID NO: 4237 - protein, 1382 aa, Homo sapiens
MATGGRRGAAAAPLLVAVAALLLGAAGHLYPGEVCPGMDIRNNLTRLHELENCSVIEGHLQILLMFKTRPEDFRDLSFPKLIMITDYLLLFRVYGLESLKDLFPNLTVIRGSRLFFNYALVIFEMVHLKELGLYNLMNITRGSVRIEKNNELCYLATIDWSRILDSVEDNYIVLNKDDNEECGDICPGTAKGKTNCPATVINGQFVERCWTHSHCQKVCPTICKSHGCTAEGLCCHSECLGNCSQPDDPTKCVACRNFYLDGRCVETCPPPYYHFQDWRCVNFSFCQDLHHKCKNSRRQGCHQYVIHNNKCIPECPSGYTMNSSNLLCTPCLGPCPKVCHLLEGEKTIDSVTSAQELRGCTVINGSLIINIRGGNNLAAELEANLGLIEEISGYLKIRRSYALVSLSFFRKLRLIRGETLEIGNYSFYALDNQNLRQLWDWSKHNLTITQGKLFFHYNPKLCLSEIHKMEEVSGTKGRQERNDIALKTNGDQASCENELLKFSYIRTSFDKILLRWEPYWPPDFRDLLGFMLFYKEAPYQNVTEFDGQDACGSNSWTVVDIDPPLRSNDPKSQNHPGWLMRGLKPWTQYAIFVKTLVTFSDERRTYGAKSDIIYVQTDATNPSVPLDPISVSNSSSQIILKWKPPSDPNGNITHYLVFWERQAEDSELFELDYCLKGLKLPSRTWSPPFESEDSQKHNQSEYEDSAGECCSCPKTDSQILKELEESSFRKTFEDYLHNVVFVPRKTSSGTGAEDPRPSRKRRSLGDVGNVTVAVPTVAAFPNTSSTSVPTSPEEHRPFEKVVNKESLVISGLRHFTGYRIELQACNQDTPEERCSVAAYVSARTMPEAKADDIVGPVTHEIFENNVVHLMWQEPKEPNGLIVLYEVSYRRYGDEELHLCVSRKHFALERGCRLRGLSPGNYSVRIRATSLAGNGSWTEPTYFYVTDYLDVPSNIAKIIIGPLIFVFLFSVVIGSIYLFLRKRQPDGPLGPLYASSNPEYLSASDVFPCSVYVPDEWEVSREKITLLRELGQGSFGMVYEGNARDIIKGEAETRVAVKTVNESASLRERIEFLNEASVMKGFTCHHVVRLLGVVSKGQPTLVVMELMAHGDLKSYLRSLRPEAENNPGRPPPTLQEMIQMAAEIADGMAYLNAKKFVHRDLAARNCMVAHDFTVKIGDFGMTRDIYETDYYRKGGKGLLPVRWMAPESLKDGVFTTSSDMWSFGVVLWEITSLAEQPYQGLSNEQVLKFVMDGGYLDQPDNCPERVTDLMRMCWQFNPKMRPTFLEIVNLLKDDLHPSFPEVSFFHSEENKAPESEELEMEFEDMENVPLDRSSHCQREEAGGRDGGSSLGFKRSYEEHIPYTHMNGGKKNGRILTLPRSNPS

SEQ ID NO: 4238 - protein, 349 aa, Homo sapiens
MAHQTGIHATEELKEFFAKARAGSVRLIKVVIEDEQLVLGASQEPVGRWDQDYDRAVLPLLDAQQPCYLLYRLDSQNAQGFEWLFLAWSPDNSPVRLKMLYAATRATVKKEFGGGHIKDELFGTVKDDLSFAGYQKHLSSCAAPAPLTSAERELQQIRINEVKTEISVESKHQTLQGLAFPLQPEAQRALQQLKQKMVNYIQMKLDLERETIELVHTEPTDVAQLPSRVPRDAARYHFFLYKHTHEGDPLESVVFIYSMPGYKCSIKERMLYSSCKSRLLDSVEQDFHLEIAKKIEIGDGAELTAEFLYDEVHPKQHAFKQAFAKPKGPGGKRGHKRLIRGPGENGDDS

SEQ ID NO: 4239 - protein, 859 aa, Homo sapiens
MEPLSHRGLPRLSWIDTLYSNFSYGTDEYDGEGNEEQKGPPEGSETMPYIDESPTMSPQLSARSQGGGDGVSPTPPEGLAPGVEAGKGLEMRKLVLSGFLASEEIYINQLEALLLPMKPLKATATTSQPVLTIQQIETIFYKIQDIYEIHKEFYDNLCPKVQQWDSQVTMGHLFQKLASQLGVYKAFVDNYKVALETAEKCSQSNNQFQKISEELKVKGPKDSKDSHTSVTMEALLYKPIDRVTRSTLVLHDLLKHTPVDHPDYPLLQDALRISQNFLSSINEDIDPRRTAVTTPKGETRQLVKDGFLVEVSESSRKLRHVFLFTDVLLCAKLKKTSAGKHQQYDCKWYIPLADLVFPSPEESEASPQVHPFPDHELEDMKMKISALKSEIQKEKANKGQSRAIERLKKKMFENEFLLLLNSPTIPFRIHNRNGKSYLFLLSSDYERSEWREAIQKLQKKDLQAFVLSSVELQVLTGSCFKLRTVHNIPVTSNKDDDESPGLYGFLHVIVHSAKGFKQSANLYCTLEVDSFGYFVSKAKTRVFRDTAEPKWDEEFEIELEGSQSLRILCYEKCYDKTKVNKDNNEIVDKIMGKGQIQLDPQTVETKNWHTDVIEMNGIKVEFSMKFTSRDMSLKRTPSKKQTGVFGVKISVVTKRERSKVPYIVRQCVEEVEKRGIEEVGIYRISGVATDIQALKAVFDANNKDILLMLSDMDINAIAGTLKLYFRELPEPLLTDRLYPAFMEGIALSDPAAKENCMMHLLRSLPDPNLITFLFLLEHLKRVAEKEPINKMSLHNLATVFGPTLLRPSEVESKAHLTSAADIWSHDVMAQVQVLLYYLQHPPISFAELKRNTLYFSTDV

SEQ ID NO: 4240 - protein, 486 aa, Homo sapiens
MAAIYLSRGFFSREPICPFEEKTKVERMVEDYLASGYQDSVTFDDVAVDFTPEEWALLDTTEKYLYRDVMLENYMNLASVEWEIQPRTKRSSLQQGFLKNQIFSGIQMTRGYSGWKLCDCKNCGEVFREQFCLKTHMRVQNGGNTSEGNCYGKDTLSVHKEASTGQELSKFNPCGKVFTLTPGLAVHLEVLNARQPYKCKECGKGFKYFASLDNHMGIHTDEKLCEFQEYGRAVTASSHLKQCVAVHTGKKSKKTKKCGKSFTNFSQLYAPVKTHKGEKSFECKECGRSFRNSSCLNDHIQIHTGIKPHKCTYCGKAFTRSTQLTEHVRTHTGIKPYECKECGQAFAQYSGLSIHIRSHSGKKPYQCKECGKAFTTSTSLIQHTRIHTGEKPYECVECGKTFITSSRRSKHLKTHSGEKPFVCKICGKAFLYSSRLNVHLRTHTGEKPFVCKECGKAFAVSSRLSRHERIHTGEKPYECKDMSVTI

SEQ ID NO: 4241 - protein, 189 aa, Homo sapiens
MRLSLPLLLLLLGAWAIPGGLGDRAPLTATAPQLDDEEMYSAHMPAHLRCDACRAVAYQMWQNLAKAETKLHTSNSGGRRELSELVYTDVLDRSCSRNWQDYGVREVDQVKRLTGPGLSEGPEPSISVMVTGGPWPTRLSRTCLHYLGEFGEDQIYEAHQQGRGALEALLCGGPQGACSEKVSATREEL

SEQ ID NO: 4242 - protein, 1395 aa, Homo sapiens
MYPICTVVVDGLPSESSSSSYPGPVSVSEMSLLHALGPVQTWLGQELEKCGIDAMIYTRYVLSLLLHDSYDYDLQEQENDIFLGWEKGAYKKWGKSKKKCSDLTLEEMKKQAAVQCLRSASDESSGIETLVEELCSRLKDLQSKQEEKIHKKLEGSPSPEAELSPPAKDQVEMYYEAFPPLSEKPVCLQEIMTVWNKSKVCSYSSSSSSSTAPPASTDTSSPKDCNSESEVTKERSSEVPTTVHEKTQSKSKNEKENKFSNGTIEEKPALYKKQIRHKPEGKIRPRSWSSGSSEAGSSSSGNQGELKASMKYVKVRHKAREIRNKKGRNGQSRLSLKHGEKAERNIHTGSSSSSSSGSVKQLCKRGKRPLKEIGRKDPGSTEGKDLYMENRKDTEYKEEPLWYTEPIAEYFVPLSRKSKLETTYRNRQDTSDLTSEAVEELSESVHGLCISNNNLHKTYLAAGTFIDGHFVEMPAVINEDIDLTGTSLCSLPEDNKYLDDIHLSELTHFYEVDIDQSMLDPGASETMQGESRILNMIRQKSKENTDFEAECCIVLDGMELQGERAIWTDSTSSVGAEGLFLQDLGNLAQFWECCSSSSGDADGESFGGDSPVRLSPILDSTVLNSHLLAGNQELFSDINEGSGINSCFSVFEVQCSNSVLPFSFETLNLGNENTDSSANMLGKTQSRLLIWTKNSAFEENEHCSNLSTRTCSPWSHSEETRSDNETLNIQFEESTQFNAEDINYVVPRVSSNYVDEELLDFLQDETCQQNSRTLGEIPTLVFKKTSKLESVCGIQLEQKTENKNFETTQVCNESPHGDGYSSGVIKDIWTKMADTNSVATVEIERTDAELFSADVNNYCCCLDAEAELETLQEPDKAVRRSEYHLWEGQKESLEKRAFASSELSNVDGGDYTTPSKPWDVAQDKENTFILGGVYGELKTFNSDGEWAVVPPSHTKGSLLQCAASDVVTIAGTDVFMTPGNSFAPGHRQLWKPFVSFEQNDQPKSGENGLNKGFSFIFHEDLLGACGNFQVEDPGLEYSFSSFDLSNPFSQVLHVECSFEPEGIASFSPSFKPKSILCSDSDSEVFHPRICGVDRTQYRAIRISPRTHFRPISASELSPGGGSESEFESEKDEANIPIPSQVDIFEDPQADLKPLEEDAEKEGHYYGKSELESGKFLPRLKKSGMEKSAQTSLDSQEESTGILSVGKQNQCLECSMNESLEIDLESSEANCKIMAQCEEEINNFCGCKAGCQFPAYEDNPVSSGQLEEFPVLNTDIQGMNRSQEKQTWWEKALYSPLFPASECEECYTNAKGESGLEEYPDAKETPSNEERLLDFNRVSSVYEARCTGERDSGAKSDGFRGKMCSSASSTSEETGSEGGGEWVGPSEEELFSRTHL

SEQ ID NO: 4243 - protein, 177 aa, Homo sapiens
MPAWGALFLLWATAEATKDCPSPCTCRALETMGLWVDCRGHGLTALPALPARTRHLLLANNSLQSVPPGAFDHLPQLQTLDVTQNPWHCDCSLTYLRLWLEDRTPEALLQVRCASPSLAAHGPLGRLTGYQLGSCGWQLQASWVRPGVLWDVALVAVAALGLALLAGLLCATTEALD

SEQ ID NO: 4244 - protein, 263 aa, Homo sapiens
MAFLWLLSCWALLGTTFGCGVPAIHPVLSGLSRIVNGEDAVPGSWPWQVSLQDKTGFHFCGGSLISEDWVVTAAHCGVRTSDVVVAGEFDQGSDEENIQVLKIAKVFKNPKFSILTVNNDITLLKLATPARFSQTVSAVCLPSADDDFPAGTLCATTGWGKTKYNANKTPDKLQQAALPLLSNAECKKSWGRRITDVMICAGASGVSSCMGDSGGPLVCQKDGAWTLVGIVSWGSRTCSTTTPAVYARVAKLIPWVQKILAAN

SEQ ID NO: 4245 - protein, 202 aa, Homo sapiens
MAAPWRRWPTGLLAVLRPLLTCRPLQGTTLQRDVLLFEHDRGRFFTILGLFCAGQGVFWASMAVAAVSRPPVPVQPLDAEVPNRGPFDLRSALWRYGLAVGCGAIGALVLGAGLLFSLRSVRSVVLRAGGQQVTLTTHAPFGLGAHFTVPLKQVSCMAHRGEVPAMLPLKVKGRRFYFLLDKTGHFPNTKLFDNTVGAYRSL

SEQ ID NO: 4246 - protein, 297 aa, Homo sapiens
MAELTALESLIEMGFPRGRAEKALALTGNQGIEAAMDWLMEHEDDPDVDEPLETPLGHILGREPTSSEQGGLEGSGSAAGEGKPALSEEERQEQTKRMLELVAQKQREREEREEREALERERQRRRQGQELSAARQRLQEDEMRRAAEERRREKAEELAARQRVREKIERDKAERAKKYGGSVGSQPPPVAPEPGPVPSSPSQEPPTKREYDQCRIQVRLPDGTSLTQTFRAREQLAAVRLYVELHRGEELGGGQDPVQLLSGFPRRAFSEADMERPLQELGLVPSAVLIVAKKCPS

SEQ ID NO: 4247 - protein, 400 aa, Homo sapiens
MAANYSSTSTRREHVKVKTSSQPGFLERLSETSGGMFVGLMAFLLSFYLIFTNEGRALKTATSLAEGLSLVVSPDSIHSVAPENEGRLVHIIGALRTSKLLSDPNYGVHLPAVKLRRHVEMYQWVETEESREYTEDGQVKKETRYSYNTEWRSEIINSKNFDREIGHKNPSAMAVESFMATAPFVQIGRFFLSSGLIDKVDNFKSLSLSKLEDPHVDIIRRGDFFYHSENPKYPEVGDLRVSFSYAGLSGDDPDLGPAHVVTVIARQRGDQLVPFSTKSGDTLLLLHHGDFSAEEVFHRELRSNSMKTWGLRAAGWMAMFMGLNLMTRILYTLVDWFPVFRDLVNIGLKAFAFCVATSLTLLTVAAGWLFYRPLWALLIAGLALVPILVARTRVPAKKLE

SEQ ID NO: 4248 - protein, 213 aa, Homo sapiens
MDPALAAQMSEAVAEKMLQYRRDTAGWKICREGNGVSVSWRPSVEFPGNLYRGEGIVYGTLEEVWDCVKPAVGGLRVKWDENVTGFEIIQSITDTLCVSRTSTPSAAMKLISPRDFVDLVLVKRYEDGTISSNATHVEHPLCPPKPGFVRGFNHPCGCFCEPLPGEPTKTNLVTFFHTDLSGYLPQNVVDSFFPRSMTRFYANLQKAVKQFHE

SEQ ID NO: 4249 - protein, 534 aa, Homo sapiens
MPHLMERMVGSGLLWLALVSCILTQASAVQRGYGNPIEASSYGLDLDCGAPGTPEAHVCFDPCQNYTLLDEPFRSTENSAGSQGCDKNMSGWYRFVGEGGVRMSETCVQVHRCQTDAPMWLNGTHPALGDGITNHTACAHWSGNCCFWKTEVLVKACPGGYHVYRLEGTPWCNLRYCTDPSTVEDKCEKACRPEEECLALNSTWGCFCRQDLNSSDVHSLQPQLDCGPREIKVKVDKCLLGGLGLGEEVIAYLRDPNCSSILQTEERNWVSVTSPVQASACRNILERNQTHAIYKNTLSLVNDFIIRDTILNINFQCAYPLDMKVSLQAALQPIVSSLNVSVDGNGEFIVRMALFQDQNYTNPYEGDAVELSVESVLYVGAILEQGDTSRFNLVLRNCYATPTEDKADLVKYFIIRNSCSNQRDSTIHVEENGQSSESRFSVQMFMFAGHYDLVFLHCEIHLCDSLNEQCQPSCSRSQVRSEVPAIDLARVLDLGPITRRGAQSPGVMNGTPSTAGFLVAWPMVLLTVLLAWLF

SEQ ID NO: 4250 - protein, 664 aa, Homo sapiens
MAAVGPPQQQVRMAHQQVWAALEVALRVPCLYIIDAIFNSYPDSSQSRFCIVLQIFLRLFGVFASSIVLILSQRSLFKFYTYSSAFLLAATSVLVNYYASLHIDFYGAYNTSAFGIELLPRKGPSLWMALIVLQLTFGIGYVTLLQIHSIYSQLIILDLLVPVIGLITELPLHIRETLLFTSSLILTLNTVFVLAVKLKWFYYSTRYVYLLVRHMYRIYGLQLLMEDTWKRIRFPDILRVFWLTRVTAQATVLMYILRMANETDSFFISWDDFWDLICNLIISGCDSTLTVLGMSAVISSVAHYLGLGILAFIGSTEEDDRRLGFVAPVLFFILALQTGLSGLRPEERLIRLSRNMCLLLTAVLHFIHGMTDPVLMSLSASHVSSFRRHFPVLFVSACLFILPVLLSYVLWHHYALNTWLFAVTAFCVELCLKVIVSLTVYTLFMIDGYYNVLWEKLDDYVYYVRSTGSIIEFIFGVVMFGNGAYTMMFESGSKIRAFMMCLHAYFNIYLQAKNGWKTFMNRRTAVKKINSLPEIKGSRLQEINDVCAICYHEFTTSARITPCNHYFHALCLRKWLYIQDTCPMCHQKVYIEDDIKDNSNVSNNNGFIPPNETPEEAVREAAAESDRELNEDDSTDCDDDVQRERNGVIQHTGAAAEEFNDDTD

SEQ ID NO: 4251 - protein, 881 aa, Homo sapiens
MAADKGPAAGPRSRAAMAQWRKKKGLRKRRGAASQARGSDSEDGEFEIQAEDDARARKLGPGRPLPTFPTSECTSDVEPDTREMVRAQNKKKKKSGGFQSMGLSYPVFKGIMKKGYKVPTPIQRKTIPVILDGKDVVAMARTGSGKTACFLLPMFERLKTHSAQTGARALILSPTRELALQTLKFTKELGKFTGLKTALILGGDRMEDQFAALHENPDIIIATPGRLVHVAVEMSLKLQSVEYVVFDEADRLFEMGFAEQLQEIIARLPGGHQTVLFSATLPKLLVEFARAGLTEPVLIRLDVDTKLNEQLKTSFFLVREDTKAAVLLHLLHNVVRPQDQTVVFVATKHHAEYLTELLTTQRVSCAHIYSALDPTARKINLAKFTLGKCSTLIVTDLAARGLDIPLLDNVINYSFPAKGKLFLHRVGRVARAGRSGTAYSLVAPDEIPYLLDLHLFLGRSLTLARPLKEPSGVAGVDGMLGRVPQSVVDEEDSGLQSTLEASLELRGLARVADNAQQQYVRSRPAPSPESIKRAKEMDLVGLGLHPLFSSRFEEEELQRLRLVDSIKNYRSRATIFEINASSRDLCSQVMRAKRQKDRKAIARFQQGQQGRQEQQEGPVGPAPSRPALQEKQPEKEEEEEAGESVEDIFSEVVGRKRQRSGPNRGAKRRREEARQRDQEFYIPYRPKDFDSERGLSISGEGGAFEQQAAGAVLDLMGDEAQNLTRGRQQLKWDRKKKRFVGQSGQEDKKKIKTESGRYISSSYKRDLYQKWKQKQKIDDRDSDEEGASDRRGPERRGGKRDRGQGASRPHAPGTPAGRVRPELKTKQQILKQRRRAQKLHFLQRGGLKQLSARNRRRVQELQQGAFGRGARSKKGKMRKRM

SEQ ID NO: 4252 - protein, 617 aa, Homo sapiens
MAEAKTHWLGAALSLIPLIFLISGAEAASFQRNQLLQKEPDLRLENVQKFPSPEMIRALEYIENLRQQAHKEESSPDYNPYQGVSVPLQQKENGDESHLPERDSLSEEDWMRIILEALRQAENEPQSAPKENKPYALNSEKNFPMDMSDDYETQQWPERKLKHMQFPPMYEENSRDNPFKRTNEIVEEQYTPQSLATLESVFQELGKLTGPNNQKRERMDEEQKLYTDDEDDIYKANNIAYEDVVGGEDWNPVEEKIESQTQEEVRDSKENIEKNEQINDEMKRSGQLGIQEEDLRKESKDQLSDDVSKVIAYLKRLVNAAGSGRLQNGQNGERATRLFEKPLDSQSIYQLIEISRNLQIPPEDLIEMLKTGEKPNGSVEPERELDLPVDLDDISEADLDHPDLFQNRMLSKSGYPKTPGRAGTEALPDGLSVEDILNLLGMESAANQKTSYFPNPYNQEKVLPRLPYGAGRSRSNQLPKAAWIPHVENRQMAYENLNDKDQELGEYLARMLVKYPEIINSNQVKRVPGQGSSEDDLQEEEQIEQAIKEHLNQGSSQETDKLAPVSKRFPVGPPKNDDTPNRQYWDEDLLMKVLEYLNQEKAEKGREHIAKRAMENM

SEQ ID NO: 4253 - protein, 238 aa, Homo sapiens
MAEISRIQYEMEYTEGISQRMRVPEKLKVAPPNADLEQGFQEGVPNASVIMQVPERIVVAGNNEDVSFSRPADLDLIQSTPFKPLALKTPPRVLTLSERPLDFLDLERPPTTPQNEEIRAVGRLKRERSMSENAVRQNGQLVRNDSLPVLRGGSAAATSNPHHDNVRYGISNIDTTIEGTSDDLTVVDAASLRRQIIKLNRRLQLLEEENKERAKREMVMYSITVAFWLLNSWLWFRR

SEQ ID NO: 4254 - protein, 2341 aa, Homo sapiens
MGSQTLQILRQGVWAALSGGWYYDPHQATFVNALHLYLWLFLLGLPFTLYMALPSTMIIVAVYCPVIAAVFIVLKMVNYRLHRALDAGEVVDRTANEFTDQRTKAEQGNCSTRRKDSNGPSDPGGGIEMSEFIREATPPVGCSSRNSYAGLDPSNQIGSGSSRLGTAATIKGDTDTAKTSDDISLSLGQSSSLCKEGSEEQDLAADRKLFRLVSNDSFISIQPSLSSCGQDLPRDFSDKVNLPSHNHHHHVDQSLSSACDTEVASLVPLHSHSYRKDHRPRGVPRTSSSAVAFPDTSLNDFPLYQQRRGLDPVSELESSKPLSGSKESLVENSGLSGEFQLAGDLKINTSQPPTKSGKSKPLKAEKSMDSLRSLSTRSSGSTESYCSGTDRDTNSTVSSYKSEQTSSTHIESILSEHEESPKAGTKSGRKKECCAGPEEKNSCASDKRTSSEKIAMEASTNSGVHEAKDPTPSDEMHNQRGLSTSASEEANKNPHANEFTSQGDRPPGNTAENKEEKSDKSAVSVDSKVRKDVGGKQKEGDVRPKSSSVIHRTASAHKSGRRRTGKKRASSFDSSRHRDYVCFRGVSGTKPHSAIFCHDEDSSDQSDLSRASSVQSAHQFSSDSSSSTTSHSCQSPEGRYSALKTKHTHKERGTDSEHTHKAHLVPEGTSKKRATRRTSSTNSAKTRARVLSLDSGTVACLNDSNRLMAPESIKPLTTSKSDLEAKEGEVLDELSLLGRASQLETVTRSRNSLPNQVAFPEGEEQDAVSGAAQASEEAVSFRRERSTFRRQAVRRRHNAGSNPTPPTLLIGSPLSLQDGQQGQQSTAQVKVQSRPPSQAAVLSASASLLVRNGSVHLEASHDNASAVGGSSLHDELGKFSSTLYETGGCDMSLVNFEPAARRASNICDTDSHVSSSTSVRFYPHDVLSLPQIRLNRLLTIDTDLLEQQDIDLSPDLAATYGPTEEAAQKVKHYYRFWILPQLWIGINFDRLTLLALFDRNREILENVLAVILAILVAFLGSILLIQGFFRDIWVFQFCLVIASCQYSLLKSVQPDSSSPRHGHNRIIAYSRPVYFCICCGLIWLLDYGSRNLTATKFKLYGITFTNPLVFISARDLVIVFTLCFPIVFFIGLLPQVNTFVMYLCEQLDIHIFGGNATTSLLAALYSFICSIVAVALLYGLCYGALKDSWDGQHIPVLFSIFCGLLVAVSYHLSRQSSDPSVLFSLVQSKIFPKTEEKNPEDPLSEVKDPLPEKLRNSVSERLQSDLVVCIVIGVLYFAIHVSTVFTVLQPALKYVLYTLVGFVGFVTHYVLPQVRKQLPWHCFSHPLLKTLEYNQYEVRNAATMMWFEKLHVWLLFVEKNIIYPLIVLNELSSSAETIASPKKLNTELGALMITVAGLKLLRSSFSSPTYQYVTVIFTVLFFKFDYEAFSETMLLDLFFMSILFNKLWELLYKLQFVYTYIAPWQITWGSAFHAFAQPFAVPHSAMLFIQAAVSAFFSTPLNPFLGSAIFITSYVRPVKFWERDYNTKRVDHSNTRLASQLDRNPGSDDNNLNSIFYEHLTRSLQHSLCGDLLLGRWGNYSTGDCFILASDYLNALVHLIEIGNGLVTFQLRGLEFRGTYCQQREVEAITEGVEEDEGFCCCEPGHIPHMLSFNAAFSQRWLAWEVIVTKYILEGYSITDNSAASMLQVFDLRKVLTTYYVKGIIYYVTTSSKLEEWLANETMQEGLRLCADRNYVDVDPTFNPNIDEDYDHRLAGISRESFCVIYLNWIEYCSSRRAKPVDVDKDSSLVTLCYGLCVLGRRALGTASHHMSSNLESFLYGLHALFKGDFRISSIRDEWIFADMELLRKVVVPGIRMSIKLHQDHFTSPDEYDDPTVLYEAIVSHEKNLVIAHEGDPAWRSAVLANSPSLLALRHVMDDGTNEYKIIMLNRRYLSFRVIKVNKECVRGLWAGQQQELVFLRNRNPERGSIQNAKQALRNMINSSCDQPIGYPIFVSPLTTSYSDSHEQLKDILGGPISLGNIRNFIVSTWHRLRKGCGAGCNSGGNIEDSDTGGGTSCTGNNATTANNPHSNVTQGSIGNPGQGSGTGLHPPVTSYPPTLGTSHSSHSVQSGLVRQSPARASVASQSSYCYSSRHSSLRMSTTGFVPCRRSSTSQISLRNLPSSIQSRLSMVNQMEPSGQSGLACVQHGLPSSSSSSQSIPACKHHTLVGFLATEGGQSSATDAQPGNTLSPANNSHSRKAEVIYRVQIVDPSQILEGINLSKRKELQWPDEGIRLKAGRNSWKDWSPQEGMEGHVIHRWVPCSRDPGTRSHIDKAVLLVQIDDKYVTVIETGVLELGAEV

SEQ ID NO: 4255 - protein, 1176 aa, Homo sapiens
MKGARWRRVPWVSLSCLCLCLLPHVVPGMTTPSLKTDGGRRTATSPPPTTSQTIISTIPSTAMHTRSTAAPIPILPERGVSLFPYGAGAGDLEFVRRTVDFTSPLFKPATGFPLGSSLRDSLYFTDNGQIIFPESDYQIFSYPNPLPTGFTGRDPVALVAPFWDDADFSTGRGTTFYQEYETFYGEHSLLVQQAESWIRKMTNNGGYKARWALKVTWVNAHAYPAQWTLGSNTYQAILSTDGSRSYALFLYQSGGMQWDVAQRSGNPVLMGFSSGDGYFENSPLMSQPVWERYRPDRFLNSNSGLQGLQFYRLHREERPNYRLECLQWLKSQPRWPSWGWNQVSCPCSWQQGRRDLRFQPVSIGRWGLGSRQLCSFTSWRGGVCCSYGPWGEFREGWHVQRPWQLAQELEPQSWCCRWNDKPYLCALYQQRRPHVGCATYRPPQPAWMFGDPHITTLDGVSYTFNGLGDFLLVGAQDGNSSFLLQGRTAQTGSAQATNFIAFAAQYRSSSLGPVTVQWLLEPHDAIRVLLDNQTVTFQPDHEDGGGQETFNATGVLLSRNGSEVSASFDGWATVSVIALSNILHASASLPPEYQNRTEGLLGVWNNNPEDDFRMPNGSTIPPGSPEEMLFHFGMTWQINGTGLLGKRNDQLPSNFTPVFYSQLQKNSSWAEHLISNCDGDSSCIYDTLALRNASIGLHTREVSKNYEQANATLNQYPPSINGGRVIEAYKGQTTLIQYTSNAEDANFTLRDSCTDLELFENGTLLWTPKSLEPFTLEILARSAKIGLASALQPRTVVCHCNAESQCLYNQTSRVGNSSLEVAGCKCDGGTFGRYCEGSEDACEEPCFPSVHCVPGKGCEACPPNLTGDGRHCAALGSSFLCQNQSCPVNYCYNQGHCYISQTLGCQPMCTCPPAFTDSRCFLAGNNFSPTVNLELPLRVIQLLLSEEENASMAEVNASVAYRLGTLDMRAFLRNSQVERIDSAAPASGSPIQHWMVISEFQYRPRGPVIDFLNNQLLAAVVEAFLYHVPRRSEEPRNDVVFQPISGEDVRDVTALNVSTLKAYFRCDGYKGYDLVYSPQSGFTCVSPCSRGYCDHGGQCQHLPSGPRCSCVSFSIYTAWGEHCEHLSMKLDAFFGIFFGALGGLLLLGVGTFVVLRFWGCSGARFSYFLNSAEALP

SEQ ID NO: 4256 - protein, 1215 aa, Homo sapiens
MASQVLVYPPYVYQTQSSAFCSVKKLKVEPSSCVFQERNYPRTYVNGRNFGNSHPPTKGSAFQTKIPFNRPRGHNFSLQTSAVVLKNTAGATKVIAAQAQQAHVQAPQIGAWRNRLHFLEGPQRCGLKRKSEELDNHSSAMQIVDELSILPAMLQTNMGNPVTVVTATTGSKQNCTTGEGDYQLVQHEVLCSMKNTYEVLDFLGRGTFGQVVKCWKRGTNEIVAIKILKNHPSYARQGQIEVSILARLSTENADEYNFVRAYECFQHRNHTCLVFEMLEQNLYDFLKQNKFSPLPLKVIRPILQQVATALKKLKSLGLIHADLKPENIMLVDPVRQPYRVKVIDFGSASHVSKTVCSTYLQSRYYRAPEIILGLPFCEAIDMWSLGCVIAELFLGWPLYPGALEYDQIRYISQTQGLPGEQLLNVGTKSTRFFCKETDMSHSGWRLKTLEEHEAETGMKSKEARKYIFNSLDDVAHVNTVMDLEGSDLLAEKADRREFVSLLKKMLLIDADLRITPAETLNHPFVNMKHLLDFPHSNHVKSCFHIMDICKSHLNSCDTNNHNKTSLLRPVASSSTATLTANFTKIGTLRSQALTTSAHSVVHHGIPLQAGTAQFGCGDAFQQTLIICPPAIQGIPATHGKPTSYSIRVDNTVPLVTQAPAVQPLQIRPGVLSQTWSGRTQQMLVPAWQQVTPLAPATTTLTSESVAGSHRLGDWGKMISCSNHYNSVMPQPLLTNQITLSAPQPVSVGIAHVVWPQPATTKKNKQCQNRGILVKLMEWEPGREEINAFSWSNSLQNTNIPHSAFISPKIINGKDVEEVSCIETQDNQNSEGEARNCCETSIRQDSDSSVSDKQRQTIIIADSPSPAVSVITISSDTDEEETSQRHSLRECKGSLDCEACQSTLNIDRMCSLSSPDSTLSTSSSGQSSPSPCKRPNSMSDEEQESSCDTVDGSPTSDSSGHDSPFAESTFVEDTHENTELVSSADTETKPAVCSVVVPPVELENGLNADEHMANTDSICQPLIKGRSAPGRLNQPSAVGTRQQKLTSAFQQQHLNFSQVQHFGSGHQEWNGNFGHRRQQAYIPTSVTSNPFTLSHGSPNHTAVHAHLAGNTHLGGQPTLLPYPSSATLSSAAPVAHLLASPCTSRPMLQHPTYNISHPSGIVHQVPVGLNPRLLPSPTIHQTQYKPIFPPHSYIAASPAYTGFPLSPTKLSQYPYM

SEQ ID NO: 4257 - protein, 126 aa, Homo sapiens
MADEIAKAQVARPGGDTIFGKIIRKEIPAKIIFEDDRCLAFHDISPQAPTHFLVIPKKHISQISVAEDDDESLLGHLMIVGKKCAADLGLNKGYRMVVNEGSDGGQSVYHVHLHVLGGRQMHWPPG

SEQ ID NO: 4258 - protein, 948 aa, Homo sapiens
MVSRCSCLGVQCLLLSLLLLAAWEVGSGQLHYSVYEEARHGTFVGRIAQDLGLELAELVQRLFRVASKRHGDLLEVNLQNGILFVNSRIDREELCGRSVECSIHLEVIVDRPLQVFHVDVEVKDINDNPPRFSVTEQKLSIPESRLLDSRFPLEGASDADVGENALLTYKLSPNEYFVLDIINKKDKDKFPVLVLRKLLDREENPQLKLLLTATDGGKPEFTGSVSLLILVLDANDNAPIFDRPVYEVKMYENQVNQTLVIRLNASDSDEGINKEMMYSFSSLVPPTIRRKFWINERTGEIKVNDAIDFEDSNTYEIHVDVTDKGNPPMVGHCTVLVELLDENDNSPEVIVTSLSLPVKEDAQVGTVIALISVSDHDSGANGQVTCSLTPHVPFKLVSTYKNYYSLVLDSALDRERVSAYELVVTARDGGSPPLWATASVSVEVADVNDNAPAFAQSEYTVFVKENNPPGCHIFTVSAWDADAQENALVSYSLVERRLGERSLSSYVSVHAESGKVYALQPLDHEELELLQFQVSARDGGVPPLGSNLTLQVFVLDENDNAPALLASPAGSAGGAVSELVLRSVVAGHVVAKVRAVDADSGYNAWLSYELQSAAVGARIPFRVGLYTGEISTTRALDETDSPRQRLLVLVKDHGEPSLTATATVLVSLVEGSQAPKASSRASVGVAPEVALVDVNVYLIIAICAVSSLLVLTLLLYTALRCSAAPTEGACGPVKPTLVCSSAVGSWSYSQQRRQRVCSGEGLPKADLMAFSPSLPPCPMVDVDGEDQSIGGDHSRKPRQPNPDWRYSASLRAGMHSSVHLEEAGILRAGPGGPDQQWPTVSSATPEPEAGEVSPPVGAGVNSNSWTFKYGPGNPKQSGPGELPDKFIIPGSPAIISIRQEPTNSQIDKSDFITFGKKEETKKKKKKKKGNKTQEKKEKGNSTTDNSDQ

SEQ ID NO: 4259 - protein, 375 aa, Homo sapiens
MERASCLLLLLLPLVHVSATTPEPCELDDEDFRCVCNFSEPQPDWSEAFQCVSAVEVEIHAGGLNLEPFLKRVDADADPRQYADTVKALRVRRLTVGAAQVPAQLLVGALRVLAYSRLKELTLEDLKITGTMPPLPLEATGLALSSLRLRNVSWATGRSWLAELQQWLKPGLKVLSIAQAHSPAFSCEQVRAFPALTSLDLSDNPGLGERGLMAALCPHKFPAIQNLALRNTGMETPTGVCAALAAAGVQPHSLDLSHNSLRATVNPSAPRCMWSSALNSLNLSFAGLEQVPKGLPAKLRVLDLSCNRLNRAPQPDELPEVDNLTLDGNPFLVPGTALPHEGSMNSGVVPACARSTLSVGVSGTLVLLQGARGFA

SEQ ID NO: 4260 - protein, 295 aa, Homo sapiens
MDFGLALLLAGLLGLLLGQSLQVKPLQVEPPEPVVAVALGASRQLTCRLACADRGASVQWRGLDTSLGAVQSDTGRSVLTVRNASLSAAGTRVCVGSCGGRTFQHTVQLLVYAFPDQLTVSPAALVPGDPEVACTAHKVTPVDPNALSFSLLVGGQELEGAQALGPEVQEEEEEPQGDEDVLFRVTERWRLPPLGTPVPPALYCQATMRLPGLELSHRQAIPASKPAGDQLPAALWTSSAVLGLLLLALPTYHLWKRCRHLAEDDTHPPASLRLLPQVSAWAGLRGTGQVGISPS

SEQ ID NO: 4261 - protein, 202 aa, Homo sapiens
MCYGKCARCIGHSLVGLALLCIAANILLYFPNGETKYASENHLSRFVWFFSGIVGGGLLMLLPAFVFIGLEQDDCCGCCGHENCGKRCAMLSSVLAALIGIAGSGYCVIVAALGLAEGPLCLDSLGQWNYTFASTEGQYLLDTSTWSECTEPKHIVEWNVSLFSILLALGGIEFILCLIQVINGVLGGICGFCCSHQQQYDC

SEQ ID NO: 4262 - protein, 192 aa, Homo sapiens
MQAIKCVVVGDGAVGKTCLLISYTTNAFPGEYIPTVFDNYSANVMVDGKPVNLGLWDTAGQEDYDRLRPLSYPQTDVFLICFSLVSPASFENVRAKWYPEVRHHCPHTPILLVGTKLDLRDDKDTIERLRDKKLAPITYPQGLAMAREIGSVKYLECSALTQRGLKTVFDEAIRAVLCPPPVKKPGKKCTVF

SEQ ID NO: 4263 - protein, 501 aa, Homo sapiens
MTPGALLMLLGALGAPLAPGVRGSEAEGRLREKLFSGYDSSVRPAREVGDRVRVSVGLILAQLISLNEKDEEMSTKVYLDLEWTDYRLSWDPAEHDGIDSLRITAESVWLPDVVLLNNNDGNFDVALDISVVVSSDGSVRWQPPGIYRSSCSIQVTYFPFDWQNCTMVFSSYSYDSSEVSLQTGLGPDGQGHQEIHIHEGTFIENGQWEIIHKPSRLIQPPGDPRGGREGQRQEVIFYLIIRRKPLFYLVNVIAPCILITLLAIFVFYLPPDAGEKMGLSIFALLTLTVFLLLLADKVPETSLSVPIIIKYLMFTMVLVTFSVILSVVVLNLHHRSPHTHQMPLWVRQIFIHKLPLYLRLKRPKPERDLMPEPPHCSSPGSGWGRGTDEYFIRKPPSDFLFPKPNRFQPELSAPDLRRFIDGPNRAVALLPELREVVSSISYIARQLQEQEDHDALKEDWQFVAMVVDRLFLWTFIIFTSVGTLVIFLDATYHLPPPDPFP

SEQ ID NO: 4264 - protein, 1050 aa, Homo sapiens
MALYDEDLLKNPFYLALQKCRPDLCSKVAQIHGIVLVPCKGSLSSSIQSTCQFESYILIPVEEHFQTLNGKDVFIQGNRIKLGAGFACLLSVPILFEETFYNEKEESFSILCIAHPLEKRESSEEPLAPSDPFSLKTIEDVREFLGRHSERFDRNIASFHRTFRECERKSLRHHIDSANALYTKCLQQLLRDSHLKMLAKQEAQMNLMKQAVEIYVHHEIYNLIFKYVGTMEASEDAAFNKITRSLQDLQQKDIGVKPEFSFNIPRAKRELAQLNKCTSPQQKLVCLRKVVQLITQSPSQRVNLETMCADDLLSVLLYLLVKTEIPNWMANLSYIKNFRFSSLAKDELGYCLTSFEAAIEYIRQGSLSAKPPESEGFGDRLFLKQRMSLLSQMTSSPTDCLFKHIASGNQKEVERLLSQEDHDKDTVQKMCHPLCFCDDCEKLVSGRLNDPSVVTPFSRDDRGHTPLHVAAVCGQASLIDLLVSKGAMVNATDYHGATPLHLACQKGYQSVTLLLLHYKASAEVQDNNGNTPLHLACTYGHEDCVKALVYYDVESCRLDIGNEKGDTPLHIAARWGYQGVIETLLQNGASTEIQNRLKETPLKCALNSKILSVMEAYHLSFERRQKSSEAPVQSPQRSVDSISQESSTSSFSSMSASSRQEETKKDYREVEKLLRAVADGDLEMVRYLLEWTEEDLEDAEDTVSAADPEFCHPLCQCPKCAPAQKRLAKVPASGLGVNVTSQDGSSPLHVAALHGRADLIPLLLKHGANAGARNADQAVPLHLACQQGHFQVVKCLLDSNAKPNKKDLSGNTPLIYACSGGHHELVALLLQHGASINASNNKGNTALHEAVIEKHVFVVELLLLHGASVQVLNKRQRTAVDCAEQNSKIMELLQVVPSCVASLDDVAETDRKEYVTVKIRKKWNSKLYDLPDEPFTRQFYFVHSAGQFKGKTSREIMARDRSVPNLTEGSLHEPGRQSVTLRQNNLPAQSGSHAAEKGNSDWPERPGLTQTGPGHRRMLRRHTVEDAVVSQGPEAAGPLSTPQEVSASRS

SEQ ID NO: 4265 - protein, 175 aa, Homo sapiens
MLPPMALPSVSWMLLSCLMLLSQVQGEEPQRELPSARIRCPKGSKAYGSHCYALFLSPKSWTDADLACQKRPSGNLVSVLSGAEGSFVSSLVKSIGNSYSYVWIGLHDPTQGTEPNGEGWEWSSSDVMNYFAWERNPSTISSPGHCASLSRSTAFLRWKDYNCNVRLPYVCKFTD

SEQ ID NO: 4266 - protein, 378 aa, Homo sapiens
MKTGHFEIVTMLLATMILVDIFQVKAEVLDMADNAFDDEYLKCTDRMEIKYVPQLLKEEKASHQQLDTVWENAKAKWAARKTQIFLPMNFKDNHGIALMAYISEAQEQTPFYHLFSEAVKMAGQSREDYIYGFQFKAFHFYLTRALQLLRKPCEASSKTVVYRTSQGTSFTFGGLNQARFGHFTLAYSAKPQAANDQLTVLSIYTCLGVDIENFLDKESERITLIPLNEVFQVSQEGAGNNLILQSINKTCSHYECAFLGGLKTENCIENLEYFQPIYVYNPGEKNQKLEDHSEKNWKLEDHGEKNQKLEDHGVKILEPTQIPEDKSQGNINNPTPGPVPVPGPKSHPSASSGKLLLPQFGMVIILISVSAINLFVAL

SEQ ID NO: 4267 - protein, 184 aa, Homo sapiens
MDLQAAGAQAQGAAEPSRGPPLPSARGAPPSPEAGFATADHSSQERETEKAMDRLARGTQSIPNDSPARGEGTHSEEEGFAMDEEDSDGELNTWELSEGTNCPPKEQPGDLFNEDWDSELKADQGNPYDADDIQESISQELKPWVCCAPQGDMIYDPSWHHPPPLIPYYSKMVFETGQFDDAED

SEQ ID NO: 4268 - protein, 2335 aa, Homo sapiens
MAGVFPYRGPGNPVPGPLAPLPDYMSEEKLQEKARKWQQLQAKRYAEKRKFGFVDAQKEDMPPEHVRKIIRDHGDMTNRKFRHDKRVYLGALKYMPHAVLKLLENMPMPWEQIRDVPVLYHITGAISFVNEIPWVIEPVYISQWGSMWIMMRREKRDRRHFKRMRFPPFDDEEPPLDYADNILDVEPLEAIQLELDPEEDAPVLDWFYDHQPLRDSRKYVNGSTYQRWQFTLPMMSTLYRLANQLLTDLVDDNYFYLFDLKAFFTSKALNMAIPGGPKFEPLVRDINLQDEDWNEFNDINKIIIRQPIRTEYKIAFPYLYNNLPHHVHLTWYHTPNVVFIKTEDPDLPAFYFDPLINPISHRHSVKSQEPLPDDDEEFELPEFVEPFLKDTPLYTDNTANGIALLWAPRPFNLRSGRTRRALDIPLVKNWYREHCPAGQPVKVRVSYQKLLKYYVLNALKHRPPKAQKKRYLFRSFKATKFFQSTKLDWVEVGLQVCRQGYNMLNLLIHRKNLNYLHLDYNFNLKPVKTLTTKERKKSRFGNAFHLCREVLRLTKLVVDSHVQYRLGNVDAFQLADGLQYIFAHVGQLTGMYRYKYKLMRQIRMCKDLKHLIYYRFNTGPVGKGPGCGFWAAGWRVWLFFMRGITPLLERWLGNLLARQFEGRHSKGVAKTVTKQRVESHFDLELRAAVMHDILDMMPEGIKQNKARTILQHLSEAWRCWKANIPWKVPGLPTPIENMILRYVKAKADWWTNTAHYNRERIRRGATVDKTVCKKNLGRLTRLYLKAEQERQHNYLKDGPYITAEEAVAVYTTTVHWLESRRFSPIPFPPLSYKHDTKLLILALERLKEAYSVKSRLNQSQREELGLIEQAYDNPHEALSRIKRHLLTQRAFKEVGIEFMDLYSHLVPVYDVEPLEKITDAYLDQYLWYEADKRRLFPPWIKPADTEPPPLLVYKWCQGINNLQDVWETSEGECNVMLESRFEKMYEKIDLTLLNRLLRLIVDHNIADYMTAKNNVVINYKDMNHTNSYGIIRGLQFASFIVQYYGLVMDLLVLGLHRASEMAGPPQMPNDFLSFQDIATEAAHPIRLFCRYIDRIHIFFRFTADEARDLIQRYLTEHPDPNNENIVGYNNKKCWPRDARMRLMKHDVNLGRAVFWDIKNRLPRSVTTVQWENSFVSVYSKDNPNLLFNMCGFECRILPKCRTSYEEFTHKDGVWNLQNEVTKERTAQCFLRVDDESMQRFHNRVRQILMASGSTTFTKIVNKWNTALIGLMTYFREAVVNTQELLDLLVKCENKIQTRIKIGLNSKMPSRFPPVVFYTPKELGGLGMLSMGHVLIPQSDLRWSKQTDVGITHFRSGMSHEEDQLIPNLYRYIQPWESEFIDSQRVWAEYALKRQEAIAQNRRLTLEDLEDSWDRGIPRINTLFQKDRHTLAYDKGWRVRTDFKQYQVLKQNPFWWTHQRHDGKLWNLNNYRTDMIQALGGVEGILEHTLFKGTYFPTWEGLFWEKASGFEESMKWKKLTNAQRSGLNQIPNRRFTLWWSPTINRANVYVGFQVQLDLTGIFMHGKIPTLKISLIQIFRAHLWQKIHESIVMDLCQVFDQELDALEIETVQKETIHPRKSYKMNSSCADILLFASYKWNVSRPSLLADSKDVMDSTTTQKYWIDIQLRWGDYDSHDIERYARAKFLDYTTDNMSIYPSPTGVLIAIDLAYNLHSAYGNWFPGSKPLIQQAMAKIMKANPALYVLRERIRKGLQLYSSEPTEPYLSSQNYGELFSNQIIWFVDDTNVYRVTIHKTFEGNLTTKPINGAIFIFNPRTGQLFLKIIHTSVWAGQKRLGQLAKWKTAEEVAALIRSLPVEEQPKQIIVTRKGMLDPLEVHLLDFPNIVIKGSELQLPFQACLKVEKFGDLILKATEPQMVLFNLYDDWLKTISSYTAFSRLILILRALHVNNDRAKVILKPDKTTITEPHHIWPTLTDEEWIKVEVQLKDLILADYGKKNNVNVASLTQSEIRDIILGMEISAPSQQRQQIAEIEKQTKEQSQLTATQTRTVNKHGDEIITSTTSNYETQTFSSKTEWRVRAISAANLHLRTNHIYVSSDDIKETGYTYILPKNVLKKFICISDLRAQIAGYLYGVSPPDNPQVKEIRCIVMVPQWGTHQTVHLPGQLPQHEYLKEMEPLGWIHTQPNESPQLSPQDVTTHAKIMADNPSWDGEKTIIITCSFTPGSCTLTAYKLTPSGYEWGRQNTDKGNNPKGYLPSHYERVQMLLSDRFLGFFMVPAQSSWNYNFMGVRHDPNMKYELQLANPKEFYHEVHRPSHFLNFALLQEGEVYSADREDLYA

SEQ ID NO: 4269 - protein, 140 aa, Homo sapiens
MAENREPRGAVEAELDPVEYTLRKRLPSRLPRRPNDIYVNMKTDFKAQLARCQKLLDGGARGQNACSEIYIHGLGLAINRAINIALQLQAGSFGSLQVAANTSTVELVDELEPETDTREPLTRIRNNSAIHIRVFRVTPK

SEQ ID NO: 4270 - protein, 140 aa, Homo sapiens
MFFTISRKNMSQKLSLLLLVFGLIWGLMLLHYTFQQPRHQSSVKLREQILDLSKRYVKALAEENKNTVDVENGASMAGYADLKRTIAVLLDDILQRLVKLENKVDYIVVNGSAANTTNGTSGNLVPVTTNKRTNVSGSIR

SEQ ID NO: 4271 - protein, 804 aa, Homo sapiens
MDLPVDEWKSYLLQKWASLPTSVQVTISTAETLRDIFLHSSSLLQPEDELFLKRLSKGYLVGKDSDAPLFYREEGNKKFQEKDYTGAAVLYSKGVSHSRPNTEDMSLCHANRSAALFHLGQYETCLKDINRAQTHGYPERLQPKIMLRKAECLVALGRLQEASQTISDLERNFTATPALADVLPQTLQRNLHRLKMKMQEKDSLTESFPAALAKTLEDAALREENEQLSNASSSIGLCVDPLKGRCLVATKDILPGELLVQEDAFVSVLNPGELPPPHHGLDSKWDTRVTNGDLYCHRCLKHTLATVPCDGCSYAKYCSQECLQQAWELYHRTECPLGGLLLTLGVFCHIALRLTLLVGFEDVRKIITKLCDKISNKDICLPESNNQVKTLNYGLGESEKNGNIVETPIPGCDINGKYENNYNAVFNLLPHTENHSPEHKFLCALCVSALCRQLEAASLQAIPTERIVNSSQLKAAVTPELCPDVTIWGVAMLRHMLQLQCNAQAMTTIQHTGPKGSIVTDSRQVRLATGIFPVISLLNHSCSPNTSVSFISTVATIRASQRIRKGQEILHCYGPHKSRMGVAERQQKLRSQYFFDCACPACQTEAHRMAAGPRWEAFCCNSCGAPMQGDDVLRCGSRSCAESAVSRDHLVSRLQDLQQQVRVAQKLLRDGELERAVQRLSGCQRDAESFLWAEHAVVGEIADGLARACAALGDWQKSATHLQRSLYVVEVRHGPSSVEMGHELFKLAQIFFNGFAVPEALSTIQKAEEVLSLHCGPWDDEIQELQKMKSCLLDLPPTPVGPAL

SEQ ID NO: 4272 - protein, 318 aa, Homo sapiens
MLSESSSFLKGVMLGSIFCALITMLGHIRIGHGNRMHHHEHHHLQAPNKEDILKISEDERMELSKSFRVYCIILVKPKDVSLWAAVKETWTKHCDKAEFFSSENVKVFESINMDTNDMWLMMRKAYKYAFDKYRDQYNWFFLARPTTFAIIENLKYFLLKKDPSQPFYLGHTIKSGDLEYVGMEGGIVLSVESMKRLNSLLNIPEKCPEQGGMIWKISEDKQLAVCLKYAGVFAENAEDADGKDVFNTKSVGLSIKEAMTYHPNQVVEGCCSDMAVTFNGLTPNQMHVMMYGVYRLRAFGHIFNDALVFLPPNGSDND

SEQ ID NO: 4273 - protein, 579 aa, Homo sapiens
MSAAIAALAASYGSGSGSESDSDSESSRCPLPAADSLMHLTKSPSSKPSLAVAVDSAPEVAVKEDLETGVHLDPAVKEVQYNPTYETMFAPEFGPENPFRTQQMAAPRNMLSGYAEPAHINDFMFEQQRRTFATYGYALDPSLDNHQVSAKYIGSVEEAEKNQGLTVFETGQKKTEKRKKFKENDASNIDGFLGPWAKYVDEKDVAKPSEEEQKELDEITAKRQKKGKQEEEKPGEEKTILHVKEMYDYQGRSYLHIPQDVGVNLRSTMPPEKCYLPKKQIHVWSGHTKGVSAVRLFPLSGHLLLSCSMDCKIKLWEVYGERRCLRTFIGHSKAVRDICFNTAGTQFLSAAYDRYLKLWDTETGQCISRFTNRKVPYCVKFNPDEDKQNLFVAGMSDKKIVQWDIRSGEIVQEYDRHLGAVNTIVFVDENRRFVSTSDDKSLRVWEWDIPVDFKYIAEPSMHSMPAVTLSPNGKWLACQSMDNQILIFGAQNRFRLNKKKIFKGHMVAGYACQVDFSPDMSYVISGDGNGKLNIWDWKTTKLYSRFKAHDKVCIGAVWHPHETSKVITCGWDGLIKLWD

SEQ ID NO: 4274 - protein, 633 aa, Homo sapiens
MANQVNGNAVQLKEEEEPMDTSSVTHTEHYKTLIEAGLPQKVAERLDEIFQTGLVAYVDLDERAIDALREFNEEGALSVLQQFKESDLSHVQNKSAFLCGVMKTYRQREKQGSKVQESTKGPDEAKIKALLERTGYTLDVTTGQRKYGGPPPDSVYSGVQPGIGTEVFVGKIPRDLYEDELVPLFEKAGPIWDLRLMMDPLSGQNRGYAFITFCGKEAAQEAVKLCDSYEIRPGKHLGVCISVANNRLFVGSIPKNKTKENILEEFSKVTEGLVDVILYHQPDDKKKNRGFCFLEYEDHKSAAQARRRLMSGKVKVWGNVVTVEWADPVEEPDPEVMAKVKVLFVRNLATTVTEEILEKSFSEFGKLERVKKLKDYAFVHFEDRGAAVKAMDEMNGKEIEGEEIEIVLAKPPDKKRKERQAARQASRSTAYEDYYYHPPPRMPPPIRGRGRGGGRGGYGYPPDYYGYEDYYDDYYGYDYHDYRGGYEDPYYGYDDGYAVRGRGGGRGGRGAPPPPRGRGAPPPRGRAGYSQRGAPLGPPRGSRGGRGGPAQQQRGRGSRGSRGNRGGNVGGKRKADGYNQPDSKRRQTNNQQNWGSQPIAQQPLQQGGDYSGNYGYNNDNQEFYQDTYGQQWK

SEQ ID NO: 4275 - protein, 1466 aa, Homo sapiens
MMSFVQKGSWLLLALLHPTIILAQQEAVEGGCSHLGQSYADRDVWKPEPCQICVCDSGSVLCDDIICDDQELDCPNPEIPFGECCAVCPQPPTAPTRPPNGQGPQGPKGDPGPPGIPGRNGDPGIPGQPGSPGSPGPPGICESCPTGPQNYSPQYDSYDVKSGVAVGGLAGYPGPAGPPGPPGPPGTSGHPGSPGSPGYQGPPGEPGQAGPSGPPGPPGAIGPSGPAGKDGESGRPGRPGERGLPGPPGIKGPAGIPGFPGMKGHRGFDGRNGEKGETGAPGLKGENGLPGENGAPGPMGPRGAPGERGRPGLPGAAGARGNDGARGSDGQPGPPGPPGTAGFPGSPGAKGEVGPAGSPGSNGAPGQRGEPGPQGHAGAQGPPGPPGINGSPGGKGEMGPAGIPGAPGLMGARGPPGPAGANGAPGLRGGAGEPGKNGAKGEPGPRGERGEAGIPGVPGAKGEDGKDGSPGEPGANGLPGAAGERGAPGFRGPAGPNGIPGEKGPAGERGAPGPAGPRGAAGEPGRDGVPGGPGMRGMPGSPGGPGSDGKPGPPGSQGESGRPGPPGPSGPRGQPGVMGFPGPKGNDGAPGKNGERGGPGGPGPQGPPGKNGETGPQGPPGPTGPGGDKGDTGPPGPQGLQGLPGTGGPPGENGKPGEPGPKGDAGAPGAPGGKGDAGAPGERGPPGLAGAPGLRGGAGPPGPEGGKGAAGPPGPPGAAGTPGLQGMPGERGGLGSPGPKGDKGEPGGPGADGVPGKDGPRGPTGPIGPPGPAGQPGDKGEGGAPGLPGIAGPRGSPGERGETGPPGPAGFPGAPGQNGEPGGKGERGAPGEKGEGGPPGVAGPPGGSGPAGPPGPQGVKGERGSPGGPGAAGFPGARGLPGPPGSNGNPGPPGPSGSPGKDGPPGPAGNTGAPGSPGVSGPKGDAGQPGEKGSPGAQGPPGAPGPLGIAGITGARGLAGPPGMPGPRGSPGPQGVKGESGKPGANGLSGERGPPGPQGLPGLAGTAGEPGRDGNPGSDGLPGRDGSPGGKGDRGENGSPGAPGAPGHPGPPGPVGPAGKSGDRGESGPAGPAGAPGPAGSRGAPGPQGPRGDKGETGERGAAGIKGHRGFPGNPGAPGSPGPAGQQGAIGSPGPAGPRGPVGPSGPPGKDGTSGHPGPIGPPGPRGNRGERGSEGSPGHPGQPGPPGPPGAPGPCCGGVGAAAIAGIGGEKAGGFAPYYGDEPMDFKINTDEIMTSLKSVNGQIESLISPDGSRKNPARNCRDLKFCHPELKSGEYWVDPNQGCKLDAIKVFCNMETGETCISANPLNVPRKHWWTDSSAEKKHVWFGESMDGGFQFSYGNPELPEDVLDVHLAFLRLLSSRASQNITYHCKNSIAYMDQASGNVKKALKLMGSNEGEFKAEGNSKFTYTVLEDGCTKHTGEWSKTVFEYRTRKAVRLPIVDIAPYDIGGPDQEFGVDVGPVCFL

SEQ ID NO: 4276 - protein, 462 aa, Homo sapiens
MGTQALQGFLFLLFLPLLQPRGASAGSLHSPGLSECFQVNGADYRGHQNRTGPRGAGRPCLFWDQTQQHSYSSASDPHGRWGLGAHNFCRNPDGDVQPWCYVAETEEGIYWRYCDIPSCHMPGYLGCFVDSGAPPALSGPSGTSTKLTVQVCLRFCRMKGYQLAGVEAGYACFCGSESDLARGRLAPATDCDQICFGHPGQLCGGDGRLGVYEVSVGSCQGNWTAPQGVIYSPDFPDEYGPDRNCSWALGPPGAALELTFRLFELADPRDRLELRDAASGSLLRAFDGARPPPSGPLRLGTAALLLTFRSDARGHAQGFALTYRGLQDAAEDPEAPEGSAQTPAAPLDGANVSCSPRPGAPPAAIGARVFSTVTAVSVLLLLLLGLLRPLRRRSCLLAPGKGPPALGASRGPRRSWAVWYQQPRGVALPCSPGDPQAEGSAAGYRPLSASSQSSLRSLISAL

SEQ ID NO: 4277 - protein, 451 aa, Homo sapiens
MEGERRASQAPSSGLPAGGANGESPGGGAPFPGSSGSSALLQAEVLDLDEDEDDLEVFSKDASLMDMNSFSPMMPTSPLSMINQIKFEDEPDLKDLFITVDEPESHVTTIETFITYRIITKTSRGEFDSSEFEVRRRYQDFLWLKGKLEEAHPTLIIPPLPEKFIVKGMVERFNDDFIETRRKALHKFLNRIADHPTLTFNEDFKIFLTAQAWELSSHKKQGPGLLSRMGQTVRAVASSMRGVKNRPEEFMEMNNFIELFSQKINLIDKISQRIYKEEREYFDEMKEYGPIHILWSASEEDLVDTLKDVASCIDRCCKATEKRMSGLSEALLPVVHEYVLYSEMLMGVMKRRDQIQAELDSKVEVLTYKKADTDLLPEEIGKLEDKVECANNALKADWERWKQNMQNDIKLAFTDMAEENIHYYEQCLATWESFLTSQTNLHLEEASEDKP

SEQ ID NO: 4278 - protein, 553 aa, Homo sapiens
MPVQLTTALRVVGTSLFALAVLGGILAAYVTGYQFIHTEKHYLSFGLYGAILGLHLLIQSLFAFLEHRRMRRAGQALKLPSPRRGSVALCIAAYQEDPDYLRKCLRSAQRISFPDLKVVMVVDGNRQEDAYMLDIFHEVLGGTEQAGFFVWRSNFHEAGEGETEASLQEGMDRVRDVVRASTFSCIMQKWGGKREVMYTAFKALGDSVDYIQVCDSDTVLDPACTIEMLRVLEEDPQVGGVGGDVQILNKYDSWISFLSSVRYWMAFNVERACQSYFGCVQCISGPLGMYRNSLLQQFLEDWYHQKFLGSKCSFGDDRHLTNRVLSLGYRTKYTARSKCLTETPTKYLRWLNQQTRWSKSYFREWLYNSLWFHKHHLWMTYESVVTGFFPFFLIATVIQLFYRGRIWNILLFLLTVQLVGIIKATYACFLRGNAEMIFMSLYSLLYMSSLLPAKIFAIATINKSGWGTSGRKTIVVNFIGLIPVSIWVAVLLGGLAYTAYCQDLFSETELAFLVSGAILYGCYWVALLMLYLAIIARRCGKKPEQYSLAFAEV

SEQ ID NO: 4279 - protein, 281 aa, Homo sapiens
MAGTWLLLLLALGCPALPTGVGGTPFPSLAPPIMLLVDGKQQMVVVCLVLDVAPPGLDSPIWFSAGNGSALDAFTYGPSPATDGTWTNLAHLSLPSEELASWEPLVCHTGPGAEGHSRSTQPMHLSGEASTARTCPQEPLRGTPGGALWLGVLRLLLFKLLLFDLLLTCSCLCDPAGPLPSPATTTRLRALGSHRLHPATETGGREATSSPRPQPRDRRWGDTPPGRKPGSPVWGEGSYLSSYPTCPAQAWCSRSALRAPSSSLGAFFAGDLPPPLQAGAA

SEQ ID NO: 4280 - protein, 689 aa, Homo sapiens
MKPPAACAGDMADAASPCSVVNDLRWDLSAQQIEERTRELIEQTKRVYDQVGTQEFEDVSYESTLKALADVEVTYTVQRNILDFPQHVSPSKDIRTASTEADKKLSEFDVEMSMREDVYQRIVWLQEKVQKDSLRPEAARYLERLIKLGRRNGLHLPRETQENIKRIKKKLSLLCIDFNKNLNEDTTFLPFTLQELGGLPEDFLNSLEKMEDGKLKVTLKYPHYFPLLKKCHVPETRRKVEEAFNCRCKEENCAILKELVTLRAQKSRLLGFHTHADYVLEMNMAKTSQTVATFLDELAQKLKPLGEQERAVILELKRAECERRGLPFDGRIRAWDMRYYMNQVEETRYCVDQNLLKEYFPVQVVTHGLLGIYQELLGLAFHHEEGASAWHEDVRLYTARDAASGEVVGKFYLDLYPREGKYGHAACFGLQPGCLRQDGSRQIAIAAMVANFTKPTADAPSLLQHDEVETYFHEFGHVMHQLCSQAEFAMFSGTHVERDFVEAPSQMLENWVWEQEPLLRMSRHYRTGSAVPRELLEKLIESRQANTGLFNLRQIVLAKVDQALHTQTDADPAEEYARLCQEILGVPATPGTNMPATFGHLAGGYDAQYYGYLWSEVYSMDMFHTRFKQEGVLNSKVGMDYRSCILRPGGSEDASAMLRRFLGRDPKQDAFLLSKGLQVGGCEPEPQVC

SEQ ID NO: 4281 - protein, 296 aa, Homo sapiens
MRGQRSLLLGPARLCLRLLLLLGYRRRCPPLLRGLVQRWRYGKVCLRSLLYNSFGGSDTAVDAAFEPVYWLVDNVIRWFGVGRNDIATVSICKKCIYPKPARTHHCSICNRCVLKMDHHCPWLNNCVGHYNHRYFFSFCFFMTLGCVYCSYGSWDLFREAYAAIETYHQTPPPTFSFRERMTHKSLVYLWFLCSSVALALGALTVWHAVLISRGETSIERHINKKERRRLQAKGRVFRNPYNYGCLDNWKVFLGVDTGRHWLTRVLLPSSHLPHGNGMSWEPPPWVTAHSASVMAV

SEQ ID NO: 4282 - protein, 1136 aa, Homo sapiens
MADQIPLYPVRSAAAAAANRKRAAYYSAAGPRPGADRHSRYQLEDESAHLDEMPLMMSEEGFENEESDYHTLPRARIMQRKRGLEWFVCDGWKFLCTSCCGWLINICRRKKELKARTVWLGCPEKCEEKHPRNSIKNQKYNVFTFIPGVLYEQFKFFLNLYFLVISCSQFVPALKIGYLYTYWAPLGFVLAVTMTREAIDEFRRFQRDKEVNSQLYSKLTVRGKVQVKSSDIQVGDLIIVEKNQRIPSDMVFLRTSEKAGSCFIRTDQLDGETDWKLKVAVSCTQQLPALGDLFSISAYVYAQKPQMDIHSFEGTFTREDSDPPIHESLSIENTLWASTIVASGTVIGVVIYTGKETRSVMNTSNPKNKVGLLDLELNRLTKALFLALVALSIVMVTLQGFVGPWYRNLFRFLLLFSYIIPISLRVNLDMGKAVYGWMMMKDENIPGTVVRTSTIPEELGRLVYLLTDKTGTLTQNEMIFKRLHLGTVSYGADTMDEIQSHVRDSYSQMQSQAGGNNTGSTPLRKAQSSAPKVRKSVSSRIHEAVKAIVLCHNVTPVYESRAGVTEETEFAEADQDFSDENRTYQASSPDEVALVQWTESVGLTLVSRDLTSMQLKTPSGQVLSFCILQLFPFTSESKRMGVIVRDESTAEITFYMKGADVAMSPIVQYNDWLEEECGNMAREGLRTLVVAKKALTEEQYQDFESRYTQAKLSMHDRSLKVAAVVESLEREMELLCLTGVEDQLQADVRPTLEMLRNAGIKIWMLTGDKLETATCIAKSSHLVSRTQDIHIFRQVTSRGEAHLELNAFRRKHDCALVISGDSLEVCLKYYEHEFVELACQCPAVVCCRCSPTQKARIVTLLQQHTGRRTCAIGDGGNDVSMIQAADCGIGIEGKEGKQASLAADFSITQFRHIGRLLMVHGRNSYKRSAALGQFVMHRGLIISTMQAVFSSVFYFASVPLYQGFLMVGYATIYTMFPVFSLVLDQDVKPEMAMLYPELYKDLTKGRSLSFKTFLIWVLISIYQGGILMYGALVLFESEFVHVVAISFTALILTELLMVALTVRTWHWLMVVAEFLSLGCYVSSLAFLNEYFDVAFITTVTFLWKVSAITVVSCLPLYVLKYLRRKLSPPSYCKLAS

SEQ ID NO: 4283 - protein, 332 aa, Homo sapiens
MLLETQDALYVALELVIAALSVAGNVLVCAAVGTANTLQTPTNYFLVSLAAADVAVGLFAIPFAITISLGFCTDFYGCLFLACFVLVLTQSSIFSLLAVAVDRYLAICVPLRYKSLVTGTRARGVIAVLWVLAFGIGLTPFLGWNSKDSATNNCTEPWDGTTNESCCLVKCLFENVVPMSYMVYFNFFGCVLPPLLIMLVIYIKIFLVACRQLQRTELMDHSRTTLQREIHAAKSLAMIVGIFALCWLPVHAVNCVTLFQPAQGKNKPKWAMNMAILLSHANSVVNPIVYAYRNRDFRYTFHKIISRYLLCQADVKSGNGQAGVQPALGVGL

SEQ ID NO: 4284 - protein, 1608 aa, Homo sapiens
MVQKKKFCPRLLDYLVIVGARHPSSDSVAQTPELLRRYPLEDHTEFPLPPDVVFFCQPEGCLSVRQRRMSLRDDTSFVFTLTDKDTGVTRYGICVNFYRSFQKRISKEKGEGGAGSRGKEGTHATCASEEGGTESSESGSSLQPLSADSTPDVNQSPRGKRRAKAGSRSRNSTLTSLCVLSHYPFFSTFRECLYTLKRLVDCCSERLLGKKLGIPRGVQRDTMWRIFTGSLLVEEKSSALLHDLREIEAWIYRLLRSPVPVSGQKRVDIEVLPQELQPALTFALPDPSRFTLVDFPLHLPLELLGVDACLQVLTCILLEHKVVLQSRDYNALSMSVMAFVAMIYPLEYMFPVIPLLPTCMASAEQLLLAPTPYIIGVPASFFLYKLDFKMPDDVWLVDLDSNRVIAPTNAEVLPILPEPESLELKKHLKQALASMSLNTQPILNLEKFHEGQEIPLLLGRPSNDLQSTPSTEFNPLIYGNDVDSVDVATRVAMVRFFNSANVLQGFQMHTRTLRLFPRPVVAFQAGSFLASRPRQTPFAEKLARTQAVEYFGEWILNPTNYAFQRIHNNMFDPALIGDKPKWYAHQLQPIHYRVYDSNSQLAEALSVPPERDSDSEPTDDSGSDSMDYDDSSSSYSSLGDFVSEMMKCDINGDTPNVDPLTHAALGDASEVEIDELQNQKEAEEPGPDSENSQENPPLRSSSSTTASSSPSTVIHGANSEPADSTEMDDKAAVGVSKPLPSVPPSIGKSNVDRRQAEIGEGSVRRRIYDNPYFEPQYGFPPEEDEDEQGESYTPRFSQHVSGNRAQKLLRPNSLRLASDSDAESDSRASSPNSTVSNTSTEGFGGIMSFASSLYRNHSTSFSLSNLTLPTKGAREKATPFPSLKVFGLNTLMEIVTEAGPGSGEGNRRALVDQKSSVIKHSPTVKREPPSPQGRSSNSSENQQFLKEVVHSVLDGQGVGWLNMKKVRRLLESEQLRVFVLSKLNRMVQSEDDARQDIIPDVEISRKVYKGMLDLLKCTVLSLEQSYAHAGLGGMASIFGLLEIAQTHYYSKEPDKRKRSPTESVNTPVGKDPGLAGRGDPKAMAQLRVPQLGPRAPSATGKGPKELDTRSLKEENFIASIGPEVIKPVFDLGETEEKKSQISADSGVSLTSSSQRTDQDSVIGVSPAVMIRSSSQDSEVSTVVSNSSGETLGADSDLSSNAGDGPGGEGSVHLASSRGTLSDSEIETNSATSTIFGKAHSLKPSIKEKLAGSPIRTSEDVSQRVYLYEGLLGKERSTLWDQMQFWEDAFLDAVMLEREGMGMDQGPQEMIDRYLSLGEHDRKRLEDDEDRLLATLLHNLISYMLLMKVNKNDIRKKVRRLMGKSHIGLVYSQQINEVLDQLANLNGRDLSIWSSGSRHMKKQTFVVHAGTDTNGDIFFMEVCDDCVVLRSNIGTVYERWWYEKLINMTYCPKTKVLCLWRRNGSETQLNKFYTKKCRELYYCVKDSMERAAARQQSIKPGPELGGEFPVQDLKTGEGGLLQVTLEGINLKFMHNQVFIELNHIKKCNTVRGVFVLEEFVPEIKEVVSHKYKTPMAHEICYSVLCLFSYVAAVHSSEEDLRTPPRPVSS

SEQ ID NO: 4285 - protein, 252 aa, Homo sapiens
MALVLILQLLTLFPPASYHPKPWLGAQPATVVTPGVNVTLRCRAPQPAWRFGLFKPGEIAPLLFRDVSSELAEFFLEEVTPAQGGSYRCCYRRPDWGPGVWSQPSDVLELLVTEELPRPSLVALPGPVVGPGANVSLRCAGRLRNMSFVLYREGVAAPLQYRHSAQPWADFTLLGARAPGTYSCYYHTPSAPYVLSQRSEVLVISWEDSGSSDYTRGNLVRLGLAGLVLISLGALVTFDWRSQNRAPAGIRP

SEQ ID NO: 4286 - protein, 179 aa, Homo sapiens
MQRQNFRPPTPPYPGPGGGGWGSGSSFRGTPGGGGPRPPSPRDGYGSPHHTPPYGPRSRPYGSSHSPRHGGSFPGGRFGSPSPGGYPGSYSRSPAGSQQQFGYSPGQQQTHPQGSPRTSTPFGSGRVREKRMSNELENYFKPSMLEDPWAGLEPVSVVDISQQYSNTQTFTGKKGRYFC

SEQ ID NO: 4287 - protein, 656 aa, Homo sapiens
MSELSDEASEPELLNRSLSMWHGLGTQVSGEELDVPLDLHTAASIGQYEVVKECVQRRELDLNKKNGGGWTPLMYASYIGHDTIVHLLLEAGVSVNVPTPEGQTPLMLASSCGNESIAYFLLQQGAELEMKDIQGWTALFHCTSAGHQHMVRFLLDSGANANVREPICGFTPLMEAAAAGHEIIVQYFLNHGVKVDARDHSGATARMLAKQYGHMKIVALMDTYSPSLPKSLYRSPEKYEDLSSSDESCPAPQRQRPCRKKGVSIHEGPRALARITGIGLGGRAPRPRYEQAPPRGYVTFNSSGENPLEEEGLCCRDVTSPINERDVESSSSSSSREEHAFCANLGPVQSSSSSEGLARAQGLSSEASVESNEDSDHACKSSARKQAKSYMKTKNPDSQWPPRAATDREGFLAESSPQTQRAPYSGPQDLAALLEQIGCLKYLQVFEEQDVDLRIFLTLTESDLKEIGITLFGPKRKMTSAIARWHSSARPPGDALELAYADRLEAEMQELAIQLHKRCEEVEATRGQVCQEQELRAVVESCLLEQDRAREDLQARLRETWALARDAALVLDQLRACQAELSSRVRQDQPPGAATLGLAVPPADSKGWQASLQAMSLPELSGALEDRVREMGQALCLVTQSLEKLQVLNGKKWRET

SEQ ID NO: 4288 - protein, 2511 aa, Homo sapiens
MEEVVIAGMSGKLPESENLQEFWDNLIGGVDMVTDDDRRWKAGLYGLPRRSGKLKDLSRFDASFFGVHPKQAHTMDPQLRLLLEVTYEAIVDGGINPDSLRGTHTGVWVGVSGSETSEALSRDPETLVGYSMVGCQRAMMANRLSFFFDFRGPSIALDTACSSSLMALQNAYQAIHSGQCPAAIVGGINVLLKPNTSVQFLRLGMLSPEGTCKAFDTAGNGYCRSEGVVAVLLTKKSLARRVYATILNAGTNTDGFKEQGVTFPSGDIQEQLIRSLYQSAGVAPESFEYIEAHGTGTKVGDPQELNGITRALCATRQEPLLIGSTKSNMGHPEPASGLAALAKVLLSLEHGLWAPNLHFHSPNPEIPALLDGRLQVVDQPLPVRGGNVGINSFGFGGSNVHIILRPNTQPPPAPAPHATLPRLLRASGRTPEAVQKLLEQGLRHSQDLAFLSMLNDIAAVPATAMPFRGYAVLGGERGGPEVQQVPAGERPLWFICSGMGTQWRGMGLSLMRLDRFRDSILRSDEAVKPFGLKVSQLLLSTDESTFDDIVHSFVSLTAIQIGLIDLLSCMGLRPDGIVGHSLGEVACGYADGCLSQEEAVLAAYWRGQCIKEAHLPPGAMAAVGLSWEECKQRCPPGVVPACHNSKDTVTISGPQAPVFEFVEQLRKEGVFAKEVRTGGMAFHSYFMEAIAPPLLQELKKVIREPKPRSARWLSTSIPEAQWHSSLARTSSAEYNVNNLVSPVLFQEALWHVPEHAVVLEIAPHALLQAVLKRGLKPSCTIIPLMKKDHRDNLEFFLAGIGRLHLSGIDANPNALFPPVEFPAPRGTPLISPLIKWDHSLAWDVPAAEDFPNGSGSPSAAIYNIDTSSESPDHYLVDHTLDGRVLFPATGYLSIVWKTLARALGLGVEQLPVVFEDVVLHQATILPKTGTVSLEVRLLEASRAFEVSENGNLVVSGKVYQWDDPDPRLFDHPESPTPNPTEPLFLAQAEVYKELRLRGYDYGPHFQGILEASLEGDSGRLLWKDNWVSFMDTMLQMSILGSAKHGLYLPTRVTAIHIDPATHRQKLYTLQDKAQVADVVVSRWLRVTVAGGVHISGLHTESAPRRQQEQQVPILEKFCFTPHTEEGCLSERAALQEELQLCKGLVQALQTKVTQQGLKMVVPGLDGAQIPRDPSQQELPRLLSAACRLQLNGNLQLELAQVLAQERPKLPEDPLLSGLLDSPALKACLDTAVENMPSLKMKVVEVLAGHGHLYSRIPGLLSPHPLLQLSYTATDRHPQALEAAQAELQQHDVAQGQWDPADPAPSALGSADLLVCNCAVAALGDPASALSNMVAALREGGFLLLHTLLRGHPLGDIVAFLTSTEPQYGQGILSQDAWESLFSRVSLRLVGLKKSFYGSTLFLCRRPTPQDSPIFLPVDDTSFRWVESLKGILADEDSSRPVWLKAINCATSGVVGLVNCLRREPGGNRLRCVLLSNLSSTSHVPEVDPGSAELQKVLQGDLVMNVYRDGAWGAFRHFLLEEDKPEEPTAHAFVSTLTRGDLSSIRWVCSSLRHAQPTCPGAQLCTVYYASLNFRDIMLATGKLSPDAIPGKWTSQDSLLGMEFSGRDASGKRVMGLVPAKGLATSVLLSPDFLWDVPSNWTLEEAASVPVVYSTAYYALVVRGRVRPGETLLIHSGSGGVGQAAIAIALSLGCRVFTTVGSAEKRAYLQARFPQLDSTSFANSRDTSFEQHVLWHTGGKGVDLVLNSLAEEKLQASVRCLATHGRFLEIGKFDLSQNHPLGMAIFLKNVTFHGVLLDAFFNESSADWREVWALVQAGIRDGVVRPLKCTVFHGAQVEDAFRYMAQGKHIGKVVVQVLAEEPEAVLKGAKPKLMSAISKTFCPAHKSYIIAGGLGGFGLELAQWLIQRGVQKLVLTSRSGIRTGYQAKQVRRWRRQGVQVQVSTSNISSLEGARGLIAEAAQLGPVGGVFNLAVVLRDGLLENQTPEFFQDVCKPKYSGTLNLDRVTREACPELDYFVVFSSVSCGRGNAGQSNYGFANSAMERICEKRRHEGLPGLAVQWGAIGDVGILVETMSTNDTIVSGTLPQRMASCLEVLDLFLNQPHMVLSSFVLAEKAAAYRDRDSQRDLVEAVAHILGIRDLAAVNLDSSLADLGLDSLMSVEVRQTLERELNLVLSVREVRQLTLRKLQELSSKADEASELACPTPKEDGLAQQQTQLNLRSLLVNPEGPTLMRLNSVQSSERPLFLVHPIEGSTTVFHSLASRLSIPTYGLQCTRAAPLDSIHSLAAYYIDCIRQVQPEGPYRVAGYSYGACVAFEMCSQLQAQQSPAPTHNSLFLFDGSPTYVLAYTQSYRAKLTPGCEAEAETEAICFFVQQFTDMEHNRVLEALLPLKGLEERVAAAVDLIIKSHQGLDRQELSFAARSFYYKLRAAEQYTPKAKYHGNVMLLRAKTGGAYGEDLGADYNLSQVCDGKVSVHVIEGDHRTLLEGSGLESIISIIHSSLAEPRVSVREG

SEQ ID NO: 4289 - protein, 154 aa, Homo sapiens
MVEKKTSVRSQDPGQRRVLDRAARQRRINRQLEALENDNFQDDPHAGLPQLGKRLPQFDDDADTGKKKKKTRGDHFKLRFRKNFQALLEEQNLSVAEGPNYLTACAGPPSRPQRPFCAVCGFPSPYTCVSCGARYCTVRCLGTHQETRCLKWTV

SEQ ID NO: 4290 - protein, 1481 aa, Homo sapiens
MSKTLKKKKHWLSKVQECAVSWAGPPGDFGAEIRGGAERGEFPYLGRLREEPGGGTCCVVSGKAPSPGDVLLEVNGTPVSGLTNRDTLAVIRHFREPIRLKTVKPGKVINKDLRHYLSLQFQKGSIDHKLQQVIRDNLYLRTIPCTTRAPRDGEVPGVDYNFISVEQFKALEESGALLESGTYDGNFYGTPKPPAEPSPFQPDPVDQVLFDNEFDAESQRKRTTSVSKMERMDSSLPEEEEDEDKEAINGSGNAENRERHSESSDWMKTVPSYNQTNSSMDFRNYMMRDETLEPLPKNWEMAYTDTGMIYFIDHNTKTTTWLDPRLCKKAKAPEDCEDGELPYGWEKIEDPQYGTYYVDHLNQKTQFENPVEEAKRKKQLGQVEIGSSKPDMEKSHFTRDPSQLKGVLVRASLKKSTMGFGFTIIGGDRPDEFLQVKNVLKDGPAAQDGKIAPGDVIVDINGNCVLGHTHADVVQMFQLVPVNQYVNLTLCRGYPLPDDSEDPVVDIVAATPVINGQSLTKGETCMNPQDFKPGAMVLEQNGKSGHTLTGDGLNGPSDASEQRVSMASSGSSQPELVTIPLIKGPKGFGFAIADSPTGQKVKMILDSQWCQGLQKGDIIKEIYHQNVQNLTHLQVVEVLKQFPVGADVPLLILRGGPPSPTKTAKMKTDKKENAGSLEAINEPIPQPMPFPPSIIRSGSPKLDPSEVYLKSKTLYEDKPPNTKDLDVFLRKQESGFGFRVLGGDGPDQSIYIGAIIPLGAAEKDGRLRAADELMCIDGIPVKGKSHKQVLDLMTTAARNGHVLLTVRRKIFYGEKQPEDDSSQAFISTQNGSPRLNRAEVPARPAPQEPYDVVLQRKENEGFGFVILTSKNKPPPGVIPHKIGRVIEGSPADRCGKLKVGDHISAVNGQSIVELSHDNIVQLIKDAGVTVTLTVIAEEEHHGPPSGTNSARQSPALQHRPMGQSQANHIPGDRSALEGEIGKDVSTSYRHSWSDHKHLAQPDTAVISVVGSRHNQNLGCYPVELERGPRGFGFSLRGGKEYNMGLFILRLAEDGPAIKDGRIHVGDQIVEINGEPTQGITHTRAIELIQAGGNKVLLLLRPGTGLIPDHGDWDINNPSSSNVIYDEQSPLPPSSHFASIFEESHVPVIEESLRVQICEKAEELKDIVPEKKSTLNENQPEIKHQSLLQKNVSKRDPPSSHGHSNKKNLLKVENGVTRRGRSVSPKKPASQHSEEHLDKIPSPLKNNPKRRPRDQSLSPSKGENKSCQVSTRAGSGQDQCRKSRGRSASPKKQQKIEGSKAPSNAEAKLLEGKSRRIAGYTGSNAEQIPDGKEKSDVIRKDAKQNQLEKSRTRSPEKKIKRMVEKSLPSKMTNKTTSKEVSENEKGKKVTTGETSSSNDKIGENVQLSEKRLKQEPEEKVVSNKTEDHKGKELEAADKNKETGRFKPESSSPVKKTLITPGPWKVPSGNKVTGTIGMAEKRQ

SEQ ID NO: 4291 - protein, 647 aa, Homo sapiens
MPGKMVVILGASNILWIMFAASQAFKIETTPESRYLAQIGDSVSLTCSTTGCESPFFSWRTQIDSPLNGKVTNEGTTSTLTMNPVSFGNEHSYLCTATCESRKLEKGIQVEIYSFPKDPEIHLSGPLEAGKPITVKCSVADVYPFDRLEIDLLKGDHLMKSQEFLEDADRKSLETKSLEVTFTPVIEDIGKVLVCRAKLHIDEMDSVPTVRQAVKELQVYISPKNTVISVNPSTKLQEGGSVTMTCSSEGLPAPEIFWSKKLDNGNLQHLSGNATLTLIAMRMEDSGIYVCEGVNLIGKNRKEVELIVQAFPRDPEIEMSGGLVNGSSVTVSCKVPSVYPLDRLEIELLKGETILENIEFLEDTDMKSLENKSLEMTFIPTIEDTGKALVCQAKLHIDDMEFEPKQRQSTQTLYVNVAPRDTTVLVSPSSILEEGSSVNMTCLSQGFPAPKILWSRQLPNGELQPLSENATLTLISTKMEDSGVYLCEGINQAGRSRKEVELIIQVTPKDIKLTAFPSESVKEGDTVIISCTCGNVPETWIILKKKAETGDTVLKSIDGAYTIRKAQLKDAGVYECESKNKVGSQLRSLTLDVQGRENNKDYFSPELLVLYFASSLIIPAIGMIIYFARKANMKGSYSLVEAQKSKV

SEQ ID NO: 4292 - protein, 497 aa, Homo sapiens
MASPAPPEHAEEGCPAPAAEEQAPPSPPPPQASPAERQQQEEEAQEAGAAEGAGLQVEEAAGRAAAAVTWLLGEPVLWLGCRADELLSWKRPLRSLLGFVAANLLFWFLALTPWRVYHLISVMILGRVIMQIIKDMVLSRTRGAQLWRSLSESWEVINSKPDERPRLSHCIAESWMNFSIFLQEMSLFKQQSPGKFCLLVCSVCTFFTILGSYIPGVILSYLLLLCAFLCPLFKCNDIGQKIYSKIKSVLLKLDFGIGEYINQKKRERSEADKEKSHKDDSELDFSALCPKISLTVAAKELSVSDTDVSEVSWTDNGTFNLSEGYTPQTDTSDDLDRPSEEVFSRDLSDFPSLENGMGTNDEDELSLGLPTELKRKKEQLDSGHRPSKETQSAAGLTLPLNSDQTFHLMSNLAGDVITAAVTAAIKDQLEGVQQALSQAAPIPEEDTDTEEGDDFELLDQSELDQIESELGLTQDQEAEAQQNKKSSGFLSNLLGGH

SEQ ID NO: 4293 - protein, 449 aa, Homo sapiens
MAERAALEELVKLQGERVRGLKQQKASAELIEEEVAKLLKLKAQLGPDESKQKFVLKTPKETLMGKYGEDSKLIYDLKDQGGELLSLRYDLTVPFARYLAMNKLTNIKRYHIAKDFDIAGNFDPMIPDAECLKIMCEILSSLQIGDFLVKVNDRRILDGMFAICGVSDSKFRTICSSVDKLDKVSWEEVKNEMVGEKGLAPEVADRIGDYVQQHGGVSLVEQLLQDPKLSQNKQALEGLGDLKLLFEYLTLFGIDDKISFDLSLARGLDYYTGVIYEAVLLQTPAQAGEEPLGVGSVAAGGRYDGLVGMFDPKGRKVPCVGLSIGVERIFSIVEQRLEALEEKIRTTETQVLVASAQKKLLEERLKLVSELWDAGIKAELLYKKNPKLLNQLQYCEEAGIPLVAIIGEQELKDGVIKLRSVTSREEVDVRREDLVEEIKRRTGQPLCIC

SEQ ID NO: 4294 - protein, 906 aa, Homo sapiens
MTAVHAGNINFKWDPKSLEIRTLAVERLLEPLVTQVTTLVNTNSKGPSNKKRGRSKKAHVLAASVEQATENFLEKGDKIAKESQFLKEELVAAVEDVRKQGDLMKAAAGEFADDPCSSVKRGNMVRAARALLSAVTRLLILADMADVYKLLVQLKVVEDGILKLRNAGNEQDLGIQYKALKPEVDKLNIMAAKRQQELKDVGHRDQMAAARGILQKNVPILYTASQACLQHPDVAAYKANRDLIYKQLQQAVTGISNAAQATASDDASQHQGGGGGELAYALNNFDKQIIVDPLSFSEERFRPSLEERLESIISGAALMADSSCTRDDRRERIVAECNAVRQALQDLLSEYMGNAGRKERSDALNSAIDKMTKKTRDLRRQLRKAVMDHVSDSFLETNVPLLVLIEAAKNGNEKEVKEYAQVFREHANKLIEVANLACSISNNEEGVKLVRMSASQLEALCPQVINAALALAAKPQSKLAQENMDLFKEQWEKQVRVLTDAVDDITSIDDFLAVSENHILEDVNKCVIALQEKDVDGLDRTAGAIRGRAARVIHVVTSEMDNYEPGVYTEKVLEATKLLSNTVMPRFTEQVEAAVEALSSDPAQPMDENEFIDASRLVYDGIRDIRKAVLMIRTPEELDDSDFETEDFDVRSRTSVQTEDDQLIAGQSARAIMAQLPQEQKAKIAEQVASFQEEKSKLDAEVSKWDDSGNDIIVLAKQMCMIMMEMTDFTRGKGPLKNTSDVISAAKKIAEAGSRMDKLGRTIADHCPDSACKQDLLAYLQRIALYCHQLNICSKVKAEVQNLGGELVVSGVDSAMSLIQAAKNLMNAVVQTVKASYVASTKYQKSQGMASLNLPAVSWKMKAPEKKPLVKREKQDETQTKIKRASQKKHVNPVQALSEFKAMDSI

SEQ ID NO: 4295 - protein, 321 aa, Homo sapiens
MKHIPVLEDGPWKTVCVKELNGLKKLKRKGKEPARRANGYKTFRLDLEAPEPRAVATNGLRDRTHRLQPVPVPVPVPVPVAPAVPPRGGTDTAGERGGSRAPEVSDARKRCFALGAVGPGLPTPPPPPPPAPQSQAPGGPEAQPFREPGLRPRILLCAPPARPAPSAPPAPPAPPESTVRPAPPTRPGESSYSSISHVIYNNHQDSSASPRKRPGEATAASSEIKALQQTRRLLANARERTRVHTISAAFEALRKQVPCYSYGQKLSKLAILRIACNYILSLARLADLDYSADHSNLSFSECVQRCTRTLQAEGRAKKRKE

SEQ ID NO: 4296 - protein, 314 aa, Homo sapiens
MPGFTCCVPGCYNNSHRDKALHFYTFPKDAELRRLWLKNVSRAGVSGCFSTFQPTTGHRLCSVHFQGGRKTYTVRVPTIFPLRGVNERKVARRPAGAAAARRRQQQQQQQQQQQQQQQQQQQQQQQQQQQQQSSPSASTAQTAQLQPNLVSASAAVLLTLQATVDSSQAPGSVQPAPITPTGEDVKPIDLTVQVEFAAAEGAAAAAAASELQAATAGLEAAECPMGPQLVVVGEEGFPDTGSDHSYSLSSGTTEEELLRKLNEQRDILALMEVKMKEMKGSIRHLRLTEAKLREELREKDRLLAMAVIRKKHGM

SEQ ID NO: 4297 - protein, 229 aa, Homo sapiens
MQIFVKTLTGKTITLEVEPSDTIENVKAKIQDKEGIPPDQQRLIFAGKQLEDGRTLSDYNIQKESTLHLVLRLRGGMQIFVKTLTGKTITLEVEPSDTIENVKAKIQDKEGIPPDQQRLIFAGKQLEDGRTLSDYNIQKESTLHLVLRLRGGMQIFVKTLTGKTITLEVEPSDTIENVKAKIQDKEGIPPDQQRLIFAGKQLEDGRTLSDYNIQKESTLHLVLRLRGGC

SEQ ID NO: 4298 - protein, 345 aa, Homo sapiens
MKQLKRKRKSNFSVQETQTLLKEITKRKEVIFSKQLNTTINVMKRMAWEEIAQCVNAVGEGEQRTGTEVKRRYLDWRALMKRKRMKANIKLVGSGFPLPSSDLDDSLTEEIDEKIGFRNDANFDWQNVADFRDAGGSLTEVKVEEEERDPQSPEFEIEEEEEMLSSVIPDSRRENELPDFPHIDEFFTLNSTPSRSAYDEPHLLVNIEKQKLELEKRRLDIEAERLQVEKERLQIEKERLRHLDMEHERLQLEKERLQIEREKLRLQIVNSEKPSLENELGQGEKSMLQPQDIETEKLKLERERLQLEKDRLQFLKFESEKLQIEKERLQVEKDRLRIQKEGHLQ

SEQ ID NO: 4299 - protein, 265 aa, Homo sapiens
MNMSVLTLQEYEFEKQFNENEAIQWMQENWKKSFLFSALYAAFIFGGRHLMNKRAKFELRKPLVLWSLTLAVFSIFGALRTGAYMVYILMTKGLKQSVCDQGFYNGPVSKFWAYAFVLSKAPELGDTIFIILRKQKLIFLHWYHHITVLLYSWYSYKDMVAGGGWFMTMNYGVHAVMYSYYALRAAGFRVSRKFAMFITLSQITQMLMGCVVNYLVFCWMQHDQCHSHFQNIFWSSLMYLSYLVLFCHFFFEAYIGKMRKTTKAE

SEQ ID NO: 4300 - protein, 159 aa, Homo sapiens
MKAWGTVVVTLATLMVVTVDAKIYERCELAARLERAGLNGYKGYGVGDWLCMAHYESGFDTAFVDHNPDGSSEYGIFQLNSAWWCDNGITPTKNLCHMDCHDLLNRHILDDIRCAKQIVSSQNGLSAWTSWRLHCSGHDLSEWLKGCDMHVKIDPKIHP

SEQ ID NO: 4301 - protein, 178 aa, Homo sapiens
MELLQVTILFLLPSICSSNSTGVLEAANNSLVVTTTKPSITTPNTESLQKNVVTPTTGTTPKGTITNELLKMSLMSTATFLTSKDEGLKATTTDVRKNDSIISNVTVTSVTLPNAVSTLQSSKPKTETQSSIKTTEIPGTPENGNDQPQSDKESVKLLTVKTISHESGEHSAQGKTKN

SEQ ID NO: 4302 - protein, 571 aa, Homo sapiens
MERAVRVESGVLVGVVCLLLACPATATGPEVAQPEVDTTLGRVRGRQVGVKGTDRLVNVFLGIPFAQPPLGPDRFSAPHPAQPWEGVRDASTAPPMCLQDVESMNSSRFVLNGKQQIFSVSEDCLVLNVYSPAEVPAGSGRPVMVWVHGGALITGAATSYDGSALAAYGDVVVVTVQYRLGVLGFFSTGDEHAPGNQGFLDVVAALRWVQENIAPFGGDLNCVTVFGGSAGGSIISGLVLSPVAAGLFHRAITQSGVITTPGIIDSHPWPLAQKIANTLACSSSSPAEMVQCLQQKEGEELVLSKKLKNTIYPLTVDGTVFPKSPKELLKEKPFHSVPFLMGVNNHEFSWLIPRGWGLLDTMEQMSREDMLAISTPVLTSLDVPPEMMPTVIDEYLGSNSDAQAKCQAFQEFMGDVFINVPTVSFSRYLRDSGSPVFFYEFQHRPSSFAKIKPAWVKADHGAEGAFVFGGPFLMDESSRLAFPEATEEEKQLSLTMMAQWTHFARTGDPNSKALPPWPQFNQAEQYLEINPVPRAGQKFREAWMQFWSETLPSKIQQWHQKQKNRKAQEDL

SEQ ID NO: 4303 - protein, 66 aa, Homo sapiens
MARSLLLPLQILLLSLALETAGEEVSTPCTWAVIRWATGELRGSRPRSHSATPATPHRPMLMTSCS

SEQ ID NO: 4304 - protein, 212 aa, Homo sapiens
MAARRGALIVLEGVDRAGKSTQSRKLVEALCAAGHRAELLRFPERSTEIGKLLSSYLQKKSDVEDHSVHLLFSANRWEQVPLIKEKLSQGVTLVVDRYAFSGVAFTGAKENFSLDWCKQPDVGLPKPDLVLFLQLQLADAAKRGAFGHERYENGAFQERALRCFHQLMKDTTLNWKMVDASKSIEAVHEDIRVLSEDAIRTATEKPLGELWK

SEQ ID NO: 4305 - protein, 690 aa, Homo sapiens
MEKILQMAEGIDIGEMPSYDLVLSKPSKGQKRHLSTCDGQNPPKKQAGSKFHARPRFEPVHFVASSSKDERQEDPYGPQTKEVNEQTHFASMPRDIYQDYTQDSFSIQDGNSQYCDSSGFILTKDQPVTANMYFDSGNPAPSTTSQQANSQSTPEPSPSQTFPESVVAEKQYFIEKLTATIWKNLSNPEMTSGSDKINYTYMLTRCIQACKTNPEYIYAPLKEIPPADIPKNKKLLTDGYACEVRCQNIYLTTGYAGSKNGSRDRATELAVKLLQKRIEVRVVRRKFKHTFGEDLVVCQIGMSSYEFPPALKPPEDLVVLGKDASGQPIFNASAKHWTNFVITENANDAIGILNNSASFNKMSIEYKYEMMPNRTWRCRVFLQDHCLAEGYGTKKTSKHAAADEALKILQKTQPTYPSVKSSQCHTGSSPRGSGKKKDIKDLVVYENSSNPVCTLNDTAQFNRMTVEYVYERMTGLRWKCKVILESEVIAEAVGVKKTVKYEAAGEAVKTLKKTQPTVINNLKKGAVEDVISRNEIQGRSAEEAYKQQIKEDNIGNQLLRKMGWTGGGLGKSGEGIREPISVKEQHKREGLGLDVERVNKIAKRDIEQIIRNYARSESHTDLTFSRELTNDERKQIHQIAQKYGLKSKSHGVGHDRYLVVGRKRRKEDLLDQLKQEGQVGHYELVMPQAN

SEQ ID NO: 4306 - protein, 529 aa, Homo sapiens
MSVKWTSVILLIQLSFCFSSGNCGKVLVWAAEYSHWMNIKTILDELIQRGHEVTVLASSASILFDPNNSSALKIEIYPTSLTKTELENFIMQQIKRWSDLPKDTFWLYFSQVQEIMSIFGDITRKFCKDVVSNKKFMKKVQESRFDVIFADAIFPCSELLAELFNIPFVYSLSFSPGYTFEKHSGGFIFPPSYVPVVMSELTDQMTFMERVKNMIYVLYFDFWFEIFDMKKWDQFYSEVLGRPTTLSETMGKADVWLIRNSWNFQFPYPLLPNVDFVGGLHCKPAKPLPKEMEDFVQSSGENGVVVFSLGSMVSNMTEERANVIASALAQIPQKVLWRFDGNKPDTLGLNTRLYKWIPQNDLLGHPKTRAFITHGGANGIYEAIYHGIPMVGIPLFADQPDNIAHMKARGAAVRVDFNTMSSTDLLNALKRVINDPSYKENVMKLSRIQHDQPVKPLDRAVFWIEFVMRHKGAKHLRVAAHDLTWFQYHSLDVIGFLLVCVATVIFIVTKCCLFCFWKFARKAKKGKND

SEQ ID NO: 4307 - protein, 182 aa, Homo sapiens
MKSFLLVVNALALTLPFLAVEVQNQKQPACHENDERPFYQKTAPYVPMYYVPNSYPYYGTNLYQRRPAIAINNPYVPRTYYANPAVVRPHAQIPQRQYLPNSHPPTVVRRPNLHPSFIAIPPKKIQDKIIIPTINTIATVEPTPAPATEPTVDSVVTPEAFSESIITSTPETTTVAVTPPTA

SEQ ID NO: 4308 - protein, 192 aa, Homo sapiens
MAPKPGAEWSTALSHLVLGVVSLHAAVSTAEASRGAAAGFLLQVLAATTTLAPGLSTHEDCLAGAWVATVIGLPLLAFDFHWVNGDRSSANLLLGGGMVLAVAGGHLGPEGRSVAGQAMLLVVAVTILIVAVFTANTYGMWGGAMLGVAGLLSRLEEDRLLLLPKEDVCRWALAVGSWAYCRALHTQRLQWE

SEQ ID NO: 4309 - protein, 533 aa, Homo sapiens
MAVESQGGRPLVLGLLLCVLGPVVSHAGKILLIPVDGSHWLSMLGAIQQLQQRGHEIVVLAPDASLYIRDGAFYTLKTYPVPFQREDVKESFVSLGHNVFENDSFLQRVIKTYKKIKKDSAMLLSGCSHLLHNKELMASLAESSFDVMLTDPFLPCSPIVAQYLSLPTVFFLHALPCSLEFEATQCPNPFSYVPRPLSSHSDHMTFLQRVKNMLIAFSQNFLCDVVYSPYATLASEFLQREVTVQDLLSSASVWLFRSDFVKDYPRPIMPNMVFVGGINCLHQNPLSQEFEAYINASGEHGIVVFSLGSMVSEIPEKKAMAIADALGKIPQTVLWRYTGTRPSNLANNTILVKWLPQNDLLGHPMTRAFITHAGSHGVYESICNGVPMVMMPLFGDQMDNAKRMETKGAGVTLNVLEMTSEDLENALKAVINDKSYKENIMRLSSLHKDRPVEPLDLAVFWVEFVMRHKGAPHLRPAAHDLTWYQYHSLDVIGFLLAVVLTVAFITFKCCAYGYRKCLGKKGRVKKAHKSKTH

SEQ ID NO: 4310 - protein, 157 aa, Homo sapiens
MSAPFEERSGVVPCGTPWGQWYQTLEEVFIEVQVPPGTRAQDIQCGLQSRHVALSVGGREILKGKLFDSTIADEGTWTLEDRKMVRIVLTKTKRDAANCWTSLLESEYAADPWVQDQMQRKLTLERFQKENPGFDFSGAEISGNYTKGGPDFSNLEK

SEQ ID NO: 4311 - protein, 153 aa, Homo sapiens
MNVGTAHSEVNPNTRVMNSRGIWLSYVLAIGLLHIVLLSIPFVSVPVVWTLTNLIHNMGMYIFLHTVKGTPFETPDQGKARLLTHWEQMDYGVQFTASRKFLTITPIVLYFLTSFYTKYDQIHFVLNTVSLMSVLIPKLPQLHGVRIFGINKY

SEQ ID NO: 4312 - protein, 514 aa, Homo sapiens
MKWRLQEGRGEAVYQIGVEDNGLLVGLAEEEMRASLKTLHRMAEKVGADITVLREREVDYDSDMPRKITEVLVRKVPDNQQFLDLRVAVLGNVDSGKSTLLGVLTQGELDNGRGRARLNLFRHLHEIQSGRTSSISFEILGFNSKGEVVNYSDSRTAEEICESSSKMITFIDLAGHHKYLHTTIFGLTSYCPDCALLLVSANTGIAGTTREHLGLALALKVPFFIVVSKIDLCAKTTVERTVRQLERVLKQPGCHKVPMLVTSEDDAVTAAQQFAQSPNVTPIFTLSSVSGESLDLLKVFLNILPPLTNSKEQEELMQQLTEFQVDEIYTVPEVGTVVGGTLSSGICREGDQLVVGPTDDGCFLELRVCSIQRNRSACRVLRAGQAATLALGDFDRALLRKGMVMVSPEMNPTICSVFEAEIVLLFHATTFRRGFQVTVHVGNVRQTAVVEKIHAKDKLRTGEKAVVRFRFLKHPEYLKVGAKLLFREGVTKGIGHVTDVQAITAGEAQANMGF

SEQ ID NO: 4313 - protein, 1242 aa, Homo sapiens
MASPPESDGFSDVRKVGYLRKPKSMHKRFFVLRAASEAGGPARLEYYENEKKWRHKSSAPKRSIPLESCFNINKRADSKNKHLVALYTRDEHFAIAADSEAEQDSWYQALLQLHNRAKGHHDGAAALGAGGGGGSCSGSSGLGEAGEDLSYGDVPPGPAFKEVWQVILKPKGLGQTKNLIGIYRLCLTSKTISFVKLNSEAAAVVLQLMNIRRCGHSENFFFIEVGRSAVTGPGEFWMQVDDSVVAQNMHETILEAMRAMSDEFRPRSKSQSSSNCSNPISVPLRRHHLNNPPPSQVGLTRRSRTESITATSPASMVGGKPGSFRVRASSDGEGTMSRPASVDGSPVSPSTNRTHAHRHRGSARLHPPLNHSRSIPMPASRCSPSATSPVSLSSSSTSGHGSTSDCLFPRRSSASVSGSPSDGGFISSDEYGSSPCDFRSSFRSVTPDSLGHTPPARGEEELSNYICMGGKGPSTLTAPNGHYILSRGGNGHRCTPGTGLGTSPALAGDEAASAADLDNRFRKRTHSAGTSPTITHQKTPSQSSVASIEEYTEMMPAYPPGGGSGGRLPGHRHSAFVPTRSYPEEGLEMHPLERRGGHHRPDSSTLHTDDGYMPMSPGVAPVPSGRKGSGDYMPMSPKSVSAPQQIINPIRRHPQRVDPNGYMMMSPSGGCSPDIGGGPSSSSSSSNAVPSGTSYGKLWTNGVGGHHSHVLPHPKPPVESSGGKLLPCTGDYMNMSPVGDSNTSSPSDCYYGPEDPQHKPVLSYYSLPRSFKHTQRPGEPEEGARHQHLRLSTSSGRLLYAATADDSSSSTSSDSLGGGYCGARLEPSLPHPHHQVLQPHLPRKVDTAAQTNSRLARPTRLSLGDPKASTLPRAREQQQQQQPLLHPPEPKSPGEYVNIEFGSDQSGYLSGPVAFHSSPSVRCPSQLQPAPREEETGTEEYMKMDLGPGRRAAWQESTGVEMGRLGPAPPGAASICRPTRAVPSSRGDYMTMQMSCPRQSYVDTSPAAPVSYADMRTGIAAEEVSLPRATMAAASSSSAASASPTGPQGAAELAAHSSLLGGPQGPGGMSAFTRVNLSPNRNQSAKVIRADPQGCRRRHSSETFSSTPSATRVGNTVPFGAGAAVGGGGGSSSSSEDVKRHSSASFENVWLRPGELGGAPKEPAKLCGAAGGLENGLNYIDLDLVKDFKQCPQECTPEPQPPPPPPPHQPLGSGESSSTRRSSEDLSAYASISFQKQPEDRQ

SEQ ID NO: 4314 - protein, 291 aa, Homo sapiens
MAEISRIQYEMEYTEGISQRMRVPEKLKVAPPNADLEQGFQEGVPNASVIMQVPERIVVAGNNEDVSFSRPADLDLIQSTPFKPLALKTPPRVLTLSERPLDFLDLERPPTTPQNEEIRAVGRLKRERSMSENAVRQNGQLVRNDSLVTPSPQQARVCPPHMLPEDGANLSSARGILSLIQSSTRRAYQQILDVLDENRRPVLRGGSAAATSNPHHDNVRYGISNIDTTIEGTSDDLTVVDAASLRRQIIKLNRRLQLLEEENKERAKREMVMYSITVAFWLLNSWLWFRR

SEQ ID NO: 4315 - protein, 341 aa, Homo sapiens
MPKRKVTFQGVGDEEDEDEIIVPKKKLVDPVAGSGGPGSRFKGKHSLDSDEEEDDDDGGSSKYDILASEDVEGQEAATLPSEGGVRITPFNLQEEMEEGHFDADGNYFLNRDAQIRDSWLDNIDWVKIRERPPGQRQASDSEEEDSLGQTSMSAQALLEGLLELLLPRETVAGALRRLGARGGGKGRKGPGQPSSPQRLDRLSGLADQMVARGNLGVYQETRERLAMRLKGLGCQTLGPHNPTPPPSLDMFAEELAEEELETPTPTQRGEAESRGDGLVDVMWEYKWENTGDAELYGPFTSAQMQTWVSEGYFPDGVYCRKLDPPGGQFYNSKRIDFDLYT

SEQ ID NO: 4316 - protein, 367 aa, Homo sapiens
MASELCKTISVARLEKHKNLFLNYRNLHHFPLELLKDEGLQYLERLYMKRNSLTSLPENLAQKLPNLVELYLHSNNIVVVPEAIGSLVKLQCLDLSDNALEIVCPEIGRLRALRHLRLANNQLQFLPPEVGDLKELQTLDISTNRLLTLPERLHMCLSLQYLTVDRNRLWYVPRHLCQLPSLNELSMAGNRLAFLPLDLGRSRELQYVYVDNNIHLKGLPSYLYNKVIGCSGCGAPIQVSEVKLLSFSSGQRTVFLPAEVKAIGTEHDHVLPLQELAMRGLYHTYHSLLKDLNFLSPISLPRSLLELLHCPLGHCHRCSEPMFTIVYPKLFPLRETPMAGLHQWKTTVSFVAYCCSTQCLQTFDLLS

SEQ ID NO: 4317 - protein, 206 aa, Homo sapiens
MLPPAIHFYLLPLACILMKSCLAFKNDATEILYSHVVKPVPAHPSSNSTLNQARNGGRHFSNTGLDRNTRVQVGCRELRSTKYISDGQCTSISPLKELVCAGECLPLPVLPNWIGGGYGTKYWSRRSSQEWRCVNDKTRTQRIQLQCQDGSTRTYKITVVTACKCKRYTRQHNESSHNFESMSPAKPVQHHRERKRASKSSKHSMS

SEQ ID NO: 4318 - protein, 697 aa, Homo sapiens
MGFQPPAALLLRLFLLQGILRLLWGDLAFIPPFIRMSGPAVSASLVGDTEGVTVSLAVLQDEAGILPIPTCGVLNNETEDWSVTVIPGAKVLEVTVRWKRGLDWCSSNETDSFSESPCILQTLLVSASHNSSCSAHLLIQVEIYANSSLTHNASENVTVIPNQVYQPLGPCPCNLTAGACDVRCCCDQECSSNLTTLFRRSCFTGVFGGDVNPPFDQLCSAGTTTRGVPDWFPFLCVQSPLANTPFLGYFYHGAVSPKQDSSFEVYVDTDAKDFADFGYKQGDPIMTVKKAYFTIPQVSLAGQCMQNAPVAFLHNFDVKCVTNLELYQERDGIINAKIKNVALGGIVTPKVIYEEATDLDKFITNTETPLNNGSTPRIVNVEEHYIFKWNNNTISEINVKIFRAEINAHQKGIMTQRFVVKFLSYNSGNEEELSGNPGYQLGKPVRALNINRMNNVTTLHLWQSAGRGLCTSATFKPILFGENVLSGCLLEVGINENCTQLRENAVERLDSLIQATHVAMRGNSDYADLSDGWLEIIRVDAPDPGADPLASSVNGMCLDIPAHLSIRILISDAGAVEGITQQEILGVETRFSSVNWQYQCGLTCEHKADLLPISASVQFIKIPAQLPHPLTRFQINYTEYDCNRNEVCWPQLLYPWTQYYQGELHSQCVAKGLLLLLFLTLALFLSNPWTRICKAYS

SEQ ID NO: 4319 - protein, 1007 aa, Homo sapiens
MGSGGDSLLGGRGSLPLLLLLIMGGMAQDSPPQILVHPQDQLFQGPGPARMSCQASGQPPPTIRWLLNGQPLSMVPPDPHHLLPDGTLLLLQPPARGHAHDGQALSTDLGVYTCEASNRLGTAVSRGARLSVAVLREDFQIQPRDMVAVVGEQFTLECGPPWGHPEPTVSWWKDGKPLALQPGRHTVSGGSLLMARAEKSDEGTYMCVATNSAGHRESRAARVSIQEPQDYTEPVELLAVRIQLENVTLLNPDPAEGPKPRPAVWLSWKVSGPAAPAQSYTALFRTQTAPGGQGAPWAEELLAGWQSAELGGLHWGQDYEFKVRPSSGRARGPDSNVLLLRLPEKVPSAPPQEVTLKPGNGTVFVSWVPPPAENHNGIIRGYQVWSLGNTSLPPANWTVVGEQTQLEIATHMPGSYCVQVAAVTGAGAGEPSRPVCLLLEQAMERATQEPSEHGPWTLEQLRATLKRPEVIATCGVALWLLLLGTAVCIHRRRRARVHLGPGLYRYTSEDAILKHRMDHSDSQWLADTWRSTSGSRDLSSSSSLSSRLGADARDPLDCRRSLLSWDSRSPGVPLLPDTSTFYGSLIAELPSSTPARPSPQVPAVRRLPPQLAQLSSPCSSSDSLCSRRGLSSPRLSLAPAEAWKAKKKQELQHANSSPLLRGSHSLELRACELGNRGSKNLSQSPGAVPQALVAWRALGPKLLSSSNELVTRHLPPAPLFPHETPPTQSQQTQPPVAPQAPSSILLPAAPIPILSPCSPPSPQASSLSGPSPASSRLSSSSLSSLGEDQDSVLTPEEVALCLELSEGEETPRNSVSPMPRAPSPPTTYGYISVPTASEFTDMGRTGGGVGPKGGVLLCPPRPCLTPTPSEGSLANGWGSASEDNAASARASLVSSSDGSFLADAHFARALAVAVDSFGFGLEPREADCVFIDASSPPSPRDEIFLTPNLSLPLWEWRPDWLEDMEVSHTQRLGRGMPPWPPDSQISSQRSQLHCRMPKAGASPVDYS

SEQ ID NO: 4320 - protein, 1320 aa, Homo sapiens
MFGLDQFEPQVNSRNAGQGERNFNETGLSMNTHFKAPAFHTGGPPGPVDPAMSALGEPPILGMNMEPYGFHARGHSELHAGGLQAQPVHGFFGGQQPHHGHPGSHHPHQHHPHFGGNFGGPDPGASCLHGGRLLGYGGAAGGLGSQPPFAEGYEHMAESQGPESFGPQRPGNLPDFHSSGASSHAVPAPCLPLDQSPNRAASFHGLPSSSGSDSHSLEPRRVTNQGAVDSLEYNYPGEAPSGHFDMFSPSDSEGQLPHYAAGRQVPGGAFPGASAMPRAAGMVGLSKMHAQPPQQQPQQQQQPQQQQQQHGVFFERFSGARKMPVGLEPSVGSRHPLMQPPQQAPPPPQQQPPQQPPQQQPPPPPGLLVRQNSCPPALPRPQQGEAGTPSGGLQDGGPMLPSQHAQFEYPIHRLENRSMHPYSEPVFSMQHPPPQQAPNQRLQHFDAPPYMNVAKRPRFDFPGSAGVDRCASWNGSMHNGALDNHLSPSAYPGLPGEFTPPVPDSFPSGPPLQHPAPDHQSLQQQQQQQQQQQQQQQQQQQQQQQQQQQQRQNAALMIKQMASRNQQQRLRQPNLAQLGHPGDVGQGGLVHGGPVGGLAQPNFEREGGSTGAGRLGTFEQQAPHLAQESAWFSGPHPPPGDLLPRRMGGSGLPADCGPHDPSLAPPPPPGGSGVLFRGPLQEPMRMPGEGHVPALPSPGLQFGGSLGGLGQLQSPGAGVGLPSAASERRPPPPDFATSALGGQPGFPFGAAGRQSTPHSGPGVNSPPSAGGGGGSSGGGGGGGAYPPQPDFQPSQRTSASKLGALSLGSFNKPSSKDNLFGQSCLAALSTACQNMIASLGAPNLNVTFNKKNPPEGKRKLSQNETDGAAVAGNPGSDYFPGGTAPGAPGPGGPSGTSSSGSKASGPPNPPAQGDGTSLSPNYTLESTSGNDGKPVSGGGGRGRGRRKRDSGHVSPGTFFDKYSAAPDSGGAPGVSPGQQQASGAAVGGSSAGETRGAPTPHEKALTSPSWGKGAELLLGDQPDLIGSLDGGAKSDSSSPNVGEFASDEVSTSYANEDEVSSSSDNPQALVKASRSPLVTGSPKLPPRGVGAGEHGPKAPPPALGLGIMSNSTSTPDSYGGGGGPGHPGTPGLEQVRTPTSSSGAPPPDEIHPLEILQAQIQLQRQQFSISEDQPLGLKGGKKGECAVGASGAQNGDSELGSCCSEAVKSAMSTIDLDSLMAEHSAAWYMPADKALVDSADDDKTLAPWEKAKPQNPNSKEAHDLPANKASASQPGSHLQCLSVHCTDDVGDAKARASVPTWRSLHSDISNRFGTFVAALT

SEQ ID NO: 4321 - protein, 856 aa, Homo sapiens
MKSARAKTPRKPTVKKGSQTNLKDPVGVYCRVRPLGFPDQECCIEVINNTTVQLHTPEGYRLNRNGDYKETQYSFKQVFGTHTTQKELFDVVANPLVNDLIHGKNGLLFTYGVTGSGKTHTMTGSPGEGGLLPRCLDMIFNSIGSFQAKRYVFKSNDRNSMDIQCEVDALLERQKREAMPNPKTSSSKRQVDPEFADMITVQEFCKAEEVDEDSVYGVFVSYIEIYNNYIYDLLEEVPFDPIKPKPPQSKLLREDKNHNMYVAGCTEVEVKSTEEAFEVFWRGQKKRRIANTHLNRESSRSHSVFNIKLVQAPLDADGDNVLQEKEQITISQLSLVDLAGSERTNRTRAEGNRLREAGNINQSLMTLRTCMDVLRENQMYGTNKMVPYRDSKLTHLFKNYFDGEGKVRMIVCVNPKAEDYEENLQVMRFAEVTQEVEVARPVDKAICGLTPGRRYRNQPRGPVGNEPLVTDVVLQSFPPLPSCEILDINDEQTLPRLIEALEKRHNLRQMMIDEFNKQSNAFKALLQEFDNAVLSKENHMQGKLNEKEKMISGQKLEIERLEKKNKTLEYKIEILEKTTTIYEEDKRNLQQELETQNQKLQRQFSDKRRLEARLQGMVTETTMKWEKECERRVAAKQLEMQNKLWVKDEKLKQLKAIVTEPKTEKPERPSRERDREKVTQRSVSPSPVPLLFQPDQNAPPIRLRHRRSRSAGDRWVDHKPASNMQTETVMQPHVPHAITVSVANEKALAKCEKYMLTHQELASDGEIETKLIKGDIYKTRGGGQSVQFTDIETLKQESPNGSRKRRSSTVAPAQPDGAESEWTDVETRCSVAVEMRAGSQLGPGYQHHAQPKRKKP

SEQ ID NO: 4322 - protein, 805 aa, Homo sapiens
MDEDGLELQQEPNSFFDATGADGTHMDGDQIVVEVQETVFVSDVVDSDITVHNFVPDDPDSVVIQDVIEDVVIEDVQCPDIMEEADVSETVIIPEQVLDSDVTEEVSLAHCTVPDDVLASDITSASMSMPEHVLTGDSIHVSDVGHVGHVGHVEHVVHDSVVEAEIVTDPLTTDVVSEEVLVADCASEAVIDANGIPVDQQDDDKGNCEDYLMISLDDAGKIEHDGSSGMTMDTESEIDPCKVDGTCPEVIKVYIFKADPGEDDLGGTVDIVESEPENDHGVELLDQNSSIRVPREKMVYMTVNDSQPEDEDLNVAEIADEVYMEVIVGEEDAAAAAAAAAVHEQQMDDNEIKTFMPIAWAAAYGNNSDGIENRNGTASALLHIDESAGLGRLAKQKPKKRRRPDSRQYQTAIIIGPDGHPLTVYPCMICGKKFKSRGFLKRHMKNHPEHLAKKKYRCTDCDYTTNKKISLHNHLESHKLTSKAEKAIECDECGKHFSHAGALFTHKMVHKEKGANKMHKCKFCEYETAEQGLLNRHLLAVHSKNFPHICVECGKGFRHPSELKKHMRIHTGEKPYQCQYCEYRSADSSNLKTHVKTKHSKEMPFKCDICLLTFSDTKEVQQHALIHQESKTHQCLHCDHKSSNSSDLKRHIISVHTKDYPHKCDMCDKGFHRPSELKKHVAAHKGKKMHQCRHCDFKIADPFVLSRHILSVHTKDLPFRCKRCRKGFRQQSELKKHMKTHSGRKVYQCEYCEYSTTDASGFKRHVISIHTKDYPHRCEYCKKGFRRPSEKNQHIMRHHKEVGLP

SEQ ID NO: 4323 - protein, 1905 aa, Homo sapiens
METLNGPAGGGAPDAKLQPPGQHHRHHHLHPVAERRRLHRAPSPARPFLKDLHARPAAPGPAVPSSGRAPAPAAPRSPNLAGKAPPSPGSLAAPGRLSRRSGGVPGAKDKPPPGAGARAAGGAKAALGSRRAARVAPAEPLSRAGKPPGAEPPSAAAKGRKAKRGSRAPPARTVGPPTPAARIPAVTLAVTSVAGSPARCSRISHTDSSSDLSDCPSEPLSDEQRLLPAASSDAESGTGSSDREPPRGAPTPSPAARGAPPGSPEPPALLAAPLAAGACPGGRSIPSGVSGGFAGPGVAEDVRGRSPPERPVPGTPKEPSLGEQSRLVPAAEEEELLREMEELRSENDYLKDELDELRAEMEEMRDSYLEEDVYQLQELRRELDRANKNCRILQYRLRKAEQKSLKVAETGQVDGELIRSLEQDLKVAKDVSVRLHHELKTVEEKRAKAEDENETLRQQMIEVEISKQALQNELERLKESSLKRRSTREMYKEKKTFNQDDSADLRCQLQFAKEEAFLMRKKMAKLGREKDELEQELQKYKSLYGDVDSPLPTGEAGGPPSTREAELKLRLKLVEEEANILGRKIVELEVENRGLKAEMEDMRGQQEREGPGRDHAPSIPTSPFGDSLESSTELRRHLQFVEEEAELLRRSISEIEDHNRQLTHELSKFKFEPPREPGWLGEGASPGAGGGAPLQEELKSARLQISELSGKVLKLQHENHALLSNIQRCDLAAHLGLRAPSPRDSDAESDAGKKESDGEESRLPQPKREGPVGGESDSEEMFEKTSGFGSGKPSEASEPCPTELLKAREDSEYLVTLKHEAQRLERTVERLITDTDSFLHDAGLRGGAPLPGPGLQGEEEQGEGDQQEPQLLGTINAKMKAFKKELQAFLEQVNRIGDGLSPLPHLTESSSFLSTVTSVSRDSPIGNLGKELGPDLQSRLKEQLEWQLGPARGDERESLRLRAARELHRRADGDTGSHGLGGQTCFSLEMEEEHLYALRWKELEMHSLALQNTLHERTWSDEKNLMQQELRSLKQNIFLFYVKLRWLLKHWRQGKQMEEEGEEFTEGEHPETLSRLGELGVQGGHQADGPDHDSDRGCGFPVGEHSPHSRVQIGDHSLRLQTADRGQPHKQVVENQQLFSAFKALLEDFRAELREDERARLRLQQQYASDKAAWDVEWAVLKCRLEQLEEKTENKLGELGSSAESKGALKKEREVHQKLLADSHSLVMDLRWQIHHSEKNWNREKVELLDRLDRDRQEWERQKKEFLWRIEQLQKENSPRRGGSFLCDQKDGNVRPFPHQGSLRMPRPVAMWPCADADSIPFEDRPLSKLKESDRCSASENLYLDALSLDDEPEEPPAHRPEREFRNRLPEEEENHKGNLQRAVSVSSMSEFQRLMDISPFLPEKGLPSTSSKEDVTPPLSPDDLKYIEEFNKSWDYTPNRGHNGGGPDLWADRTEVGRAGHEDSTEPFPDSSWYLTTSVTMTTDTMTSPEHCQKQPLRSHVLTEQSGLRVLHSPPAVRRVDSITAAGGEGPFPTSRARGSPGDTKGGPPEPMLSRWPCTSPRHSRDYVEGARRPLDSPLCTSLGFASPLHSLEMSKNLSDDMKEVAFSVRNAICSGPGELQVKDMACQTNGSRTMGTQTVQTISVGLQTEALRGSGVTSSPHKCLTPKAGGGATPVSSPSRSLRSRQVAPAIEKVQAKFERTCCSPKYGSPKLQRKPLPKADQPNNRTSPGMAQKGYSESAWARSTTTRESPVHTTINDGLSSLFNIIDHSPVVQDPFQKGLRAGSRSRSAEPRPELGPGQETGTNSRGRSPSPIGVGSEMCREEGGEGTPVKQDLSAPPGYTLTENVARILNKKLLEHALKEERRQAAHGPPGLHSDSHSLGDTAEPGPMENQTVLLTAPWGL

SEQ ID NO: 4324 - protein, 260 aa, Homo sapiens
MELTQPAEDLIQTQQTPASELGDPEDPGEEAADGSDTVVLSLFPCTPEPVNPEPDASVSSPQAGSSLKHSTTLTNRQRGNEVSALPATLDSLSIHQLAAQGELDQLKEHLRKGDNLVNKPDERGFTPLIWASAFGEIETVRFLLEWGADPHILAKERESALSLASTGGYTDIVGLLLERDVDINIYDWNGGTPLLYAVRGNHVKCVEALLARGADLTTEADSGYTPMDLAVALGYRKVQQVIENHILKLFQSNLVPADPE

SEQ ID NO: 4325 - protein, 536 aa, Homo sapiens
MDKVGKMWNNFKYRCQNLFGHEGGSRSENVDMNSNRCLSVKEKNISIGDSTPQQQSSPLRENIALQLGLSPSKNSSRRNQNCATEIPQIVEISIEKDNDSCVTPGTRLARRDSYSRHAPWGGKKKHSCSTKTQSSLDADKKFGRTRSGLQRRERRYGVSSVHDMDSVSSRTVGSRSLRQRLQDTVGLCFPMRTYSKQSKPLFSNKRKIHLSELMLEKCPFPAGSDLAQKWHLIKQHTAPVSPHSTFFDTFDPSLVSTEDEEDRLRERRRLSIEEGVDPPPNAQIHTFEATAQVNPLYKLGPKLAPGMTEISGDSSAIPQANCDSEEDTTTLCLQSRRQKQRQISGDSHTHVSRQGAWKVHTQIDYIHCLVPDLLQITGNPCYWGVMDRYEAEALLEGKPEGTFLLRDSAQEDYLFSVSFRRYNRSLHARIEQWNHNFSFDAHDPCVFHSSTVTGLLEHYKDPSSCMFFEPLLTISLNRTFPFSLQYICRAVICRCTTYDGIDGLPLPSMLQDFLKEYHYKQKVRVRWLEREPVKAK

SEQ ID NO: 4326 - protein, 1899 aa, Homo sapiens
MRSRLPPALAALGAALLLSSIEAEGMECLTRAEADIVLLVDGSWSIGRANFRTVRSFISRIVEVFDIGPKRVQIALAQYSGDPRTEWQLNAHRDKKSLLQAVANLPYKGGNTLTGMALNFIRQQNFRTQAGMRPRARKIGVLITDGKSQDDVEAPSKKLKDEGVELFAIGIKNADEVELKMIATDPDDTHAYNVADFESLSRIVDDLTINLCNSVKGPGDLEAPSNLVISERTHRSFRVSWTPPSDSVDRYKVEYYPVSGGKRQEFYVSRMETSTVLKDLKPETEYVVNVYSVVEDEYSEPLKGTEKTLPVPVVSLNIYDVGPTTMHVQWQPVGGATGYILSYKPVKDTEPTRPKEVRLGPTVNDMQLTDLVPNTEYAVTVQAVLHDLTSEPVTVREVTLPLPRPQDLKLRDVTHSTMNVFWEPVPGKVRKYIVRYKTPEEDVKEVEVDRSETSTSLKDLFSQTLYTVSVSAVHDEGESPPVTAQETTRPVPAPTNLKITEVTSEGFRGTWDHGASDVSLYRITWAPFGSSDKMETILNGDENTLVFENLNPNTIYEVSITAIYPDESESDDLIGSERTLPILTTQAPKSGPRNLQVYNATSNSLTVKWDPASGRVQKYRITYQPSTGEGNEQTTTIGGRQNSVVLQKLKPDTPYTITVSSLYPDGEGGRMTGRGKTKPLNTVRNLRVYDPSTSTLNVRWDHAEGNPRQYKLFYAPAAGGPEELVPIPGNTNYAILRNLQPDTSYTVTVVPVYTEGDGGRTSDTGRTLMRGLARNVQVYNPTPNSLDVRWDPAPGPVLQYRVVYSPVDGTRPSESIVVPGNTRMVHLERLIPDTLYSVNLVALYSDGEGNPSPAQGRTLPRSGPRNLRVFGETTNSLSVAWDHADGPVQQYRIIYSPTVGDPIDEYTTVPGRRNNVILQPLQPDTPYKITVIAVYEDGDGGHLTGNGRTVGLLPPQNIHISDEWYTRFRVSWDPSPSPVLGYKIVYKPVGSNEPMEAFVGEMTSYTLHNLNPSTTYDVNVYAQYDSGLSVPLTDQGTTLYLNVTDLKTYQIGWDTFCVKWSPHRAATSYRLKLSPADGTRGQEITVRGSETSHCFTGLSPDTDYGVTVFVQTPNLEGPGVSVKEHTTVKPTEAPTEPPTPPPPPTIPPARDVCKGAKADIVFLTDASWSIGDDNFNKVVKFIFNTVGGFDEISPAGIQVSFVQYSDEVKSEFKLNTYNDKALALGALQNIRYRGGNTRTGKALTFIKEKVLTWESGMRKNVPKVLVVVTDGRSQDEVKKAALVIQQSGFSVFVVGVADVDYNELANIASKPSERHVFIVDDFESFEKIEDNLITFVCETATSSCPLIYLDGYTSPGFKMLEAYNLTEKNFASVQGVSLESGSFPSYSAYRIQKNAFVNQPTADLHPNGLPPSYTIILLFRLLPETPSDPFAIWQITDRDYKPQVGVIADPSSKTLSFFNKDTRGEVQTVTFDTEEVKTLFYGSFHKVHIVVTSKSVKIYIDCYEIIEKDIKEAGNITTDGYEILGKLLKGERKSAAFQIQSFDIVCSPVWTSRDRCCDIPSRRDEGKCPAFPNSCTCTQDSVGPPGPPGPAGGPGAKGPRGERGISGAIGPPGPRGDIGPPGPQGPPGPQGPNGLSIPGEQGRQGMKGDAGEPGLPGRTGTPGLPGPPGPMGPPGDRGFTGKDGAMGPRGPPGPPGSPGSPGVTGPSGKPGKPGDHGRPGPSGLKGEKGDRGDIASQNMMRAVARQVCEQLISGQMNRFNQMLNQIPNDYQSSRNQPGPPGPPGPPGSAGARGEPGPGGRPGFPGTPGMQGPPGERGLPGEKGERGTGSSGPRGLPGPPGPQGESRTGPPGSTGSRGPPGPPGRPGNSGIRGPPGPPGYCDSSQCASIPYNGQGYPGSG

SEQ ID NO: 4327 - protein, 755 aa, Homo sapiens
MAAVAAEAAATAASPGEGGAGEAEPEMEPIPGSEAGTDPLPVTATEASVPDGETDGQQSAPQADEPPLPPPPPPPGELARSPEAVGPELEAEEKLSVRVAESAAAAPQGGPELPPSPASPPEQPPAPEEREEPPLPQPVAPALVPPAGGDSTVSQLIPGSEVRVTLDHIIEDALVVSFRFGEKLFSGVLMDLSKRFGPHGIPVTVFPKREYKDKPEAMPLQSNTFQEGTEVKCEANGAVPDDPSPVPHPELSLAESLWTSKPPPLFHEGAPYPPPLFIRDTYNQSIPQPPPRKIKRPKRKMYREEPTSIMNAIKLRPRQVLCDKCKNSVVAEKKEIRKGSSATDSSKYEDKKRRNESVTTVNKKLKTDHKVDGKNQNESQKRNAVVKVSNIAHSRGRVVKVSAQANTSKAQLSTKKVLQSKNMDHAKAREVLKIAKEKAQKKQNETSTSKNAHSKVHFTRRYQNPSSGSLPPRVRLKPQRYRNEENDSSLKTGLEKMRSGKMAPKPQSRCTSTRSAGEAPSENQSPSKGPEEASSEVQDTNEVHVPGDQDEPQTLGKKGSKNNISVYMTLNQKKSDSSSASVCSIDSTDDLKSSNSECSSSESFDFPPGSMHAPSTSSTSSSSKEEKKLSNSLKMKVFSKNVSKCVTPDGRTICVGDIVWAKIYGFPWWPARILTITVSRKDNGLLVRQEARISWFGSPTTSFLALSQLSPFLENFQSRFNKKRKGLYRKAITEAAKAAKQLTPEVRALLTQFET

SEQ ID NO: 4328 - protein, 755 aa, Homo sapiens
MVSHGSSPSLLEALSSDFLACKICLEQLRAPKTLPCLHTYCQDCLAQLADGGRVRCPECRETVPVPPEGVASFKTNFFVNGLLDLVKARACGDLRAGKPACALCPLVGGTSTGGPATARCLDCADDLCQACADGHRCTRQTHTHRVVDLVGYRAGWYDEEARERQAAQCPQHPGEALRFLCQPCSQLLCRECRLDPHLDHPCLPLAEAVRARRPGLEGLLAGVDNNLVELEAARRVEKEALARLREQAARVGTQVEEAAEGVLRALLAQKQEVLGQLRAHVEAAEEAARERLAELEGREQVARAAAAFARRVLSLGREAEILSLEGAIAQRLRQLQGCPWAPGPAPCLLPQLELHPGLLDKNCHLLRLSFEEQQPQKDGGKDGAGTQGGEESQSRREDEPKTERQGGVQPQAGDGAQTPKEEKAQTTREEGAQTLEEDRAQTPHEDGGPQPHRGGRPNKKKKFKGRLKSISREPSPALGPNLDGSGLLPRPIFYCSFPTRMPGDKRSPRITGLCPFGPREILVADEQNRALKRFSLNGDYKGTVPVPEGCSPCSVAALQSAVAFSASARLYLINPNGEVQWRRALSLSQASHAVAALPSGDRVAVSVAGHVEVYNMEGSLATRFIPGGKASRGLRALVFLTTSPQGHFVGSDWQQNSVVICDGLGQVVGEYKGPGLHGCQPGSVSVDKKGYIFLTLREVNKVVILDPKGSLLGDFLTAYHGLEKPRVTTMVDGRYLVVSLSNGTIHIFRVRSPDS

SEQ ID NO: 4329 - protein, 392 aa, Homo sapiens
MQSPAVLVTSRRLQNAHTGLDLTVPQHQEVRGKMMSGHVEYQILVVTRLAAFKSAKHRPEDVVQFLVSKKYSEIEEFYQKLSSRYAAASLPPLPRKVLFVGESDIRERRAVFNEILRCVSKDAELAGSPELLEFLGTRSPGAAGLTSRDSSVLDGTDSQTGNDEEAFDFFEEQDQVAEEGPPVQSLKGEDAEESLEEEEALDPLGIMRSKKPKKHPKVAVKAKPSPRLTIFDEEVDPDEGLFGPGRKLSPQDPSEDVSSVDPLKLFDDPDLGGAIPLGDSLLLPAACESGGPTPSLSHRDASKELFRVEEDLDQILNLGAEPKPKPQLKPKPPVAAKPVIPRKPAVPPKAGPAEAVAGQQKPQEQIQAMDEMDILQYIQDHDTPAQAAPSLF

SEQ ID NO: 4330 - protein, 687 aa, Homo sapiens
MLENYENLASVGHHLFQPSVIYWLEQEEELRAGRRAVLQEWRLKTKGPALRQDRSWFRASNETQTARSHNGGQLCDRTQCGEAFSEHSGLSTHVRTQNTGDSCVSNHYERDFFIPCQKTLFKIGEQFSVLGQCGKAFSSTPNVVSQQACTRDRSLDYSSCGEVFLNQSYLQARAGSHNGEETWKWKPCGKALTHSMGCATPVEMHAVRNPHVCRECGKAFRYTAYLTGRVQVHPGEKPCELEECGKASPVSSSLTQHVRIHAAEKPCECKECGKAFTGLSGLSKHVQTDPGQKPYECKDCGKACGGFYLLNEHGKTHTREKPFACVVCGKYFRNSSCLNNHVRIHTGIKPYTCSYCGKAFTVRCGLTRHVRTHTGEKPYTCKDCGKAFCTSSGLTEHVRTHTGEKPYECKDCGKSFTVSSSLTEHARIHTGEKPYECKQCGKAFTGRSGLTKHMRTHTGEKPYECKDCGKAYNRVYLLNEHVKTHTEEKPFICTVCRKSFRNSSCLNKHIQIHTGIKPYECKDCGKTFTVSSSLTEHIRTHTGEKPYECKVCGKAFTTSSHLIVHIRTHTGEKPYICKECGKAFASSSHLIEHRRTHTGEKPYICNECGKAFRASSHLHKHGRIHTGQKPYKCKECGKAYNRFYLLKEHLKTYTEEQVFVCKDCGKSFKNSSCLNHHTQIHTDEKPF

SEQ ID NO: 4331 - protein, 745 aa, Homo sapiens
MVGPGPTAAAAVEERQRKLQEYLAAKGKLKSQNTKPYLKSKNNCQNQPPSKSTIRPKNDVTNHVVLPVKPKRSISIKLQPRPPNTAGSQKPKLEPPKLLGKRLTSECVSSNPYSKPSSKSFQQCEAGSSTTGELSRKPVGSLNIEQLKTTKQQLTDQGNGKCIDFMNNIHVENESLDNFLKETNKENLLDILTEPERKPDPKLYTRSKPKTDSYNQTKNSLVPKQALGKSSVNSAVLKDRVNKQFVGETQSRTFPVKSQQLSRGADLARPGVKPSRTVPSHFIRTLSKVQSSKKPVVKNIKDIKVNRSQYERPNETKIRSYPVTEQRVKHTKPRTYPSLLQGEYNNRHPNIKQDQKSSQVCIPQTSCVLQKSKAISQRPNLTVGRFNSAIPSTPSIRPNGTSGNKHNNNGFQQKAQTLDSKLKKAVPQNHFLNKTAPKTQADVTTVNGTQTNPNIKKKATAEDRRKQLEEWQKSKGKTYKRPPMELKTKRKVIKEMNISFWKSIEKEEEEKKAQLELSSKINNTLTECLNLIEGGVPSNEILNILSSIPEAEKFAKFWICKAKLLASKGTFDVIGLYEEAIKNGATPIQELRKVVLNILQDSNRTTEGITSDSLVAETSITSVEELAKKMESVKSCLSPKEREQVTATPRIAKAEQHNYPGIKLQIGPIPRINGMPEVQDMKFITPVRRSSRIERAVSRYPEMLQEHDLVVASLDELLEVEETKCFIFRRNEALPVTLGFQTPES

SEQ ID NO: 4332 - protein, 528 aa, Homo sapiens
MSMKWTSALLLIQLSCYFSSGSCGKVLVWPTEFSHWMNIKTILDELVQRGHEVTVLASSASISFDPNSPSTLKFEVYPVSLTKTEFEDIIKQLVKRWAELPKDTFWSYFSQVQEIMWTFNDILRKFCKDIVSNKKLMKKLQESRFDVVLADAVFPFGELLAELLKIPFVYSLRFSPGYAIEKHSGGLLFPPSYVPVVMSELSDQMTFIERVKNMIYVLYFEFWFQIFDMKKWDQFYSEVLGRPTTLSETMAKADIWLIRNYWDFQFPHPLLPNVEFVGGLHCKPAKPLPKEMEEFVQSSGENGVVVFSLGSMVSNTSEERANVIASALAKIPQKVLWRFDGNKPDTLGLNTRLYKWIPQNDLLGHPKTRAFITHGGANGIYEAIYHGIPMVGVPLFADQPDNIAHMKAKGAAVSLDFHTMSSTDLLNALKTVINDPLYKENAMKLSRIHHDQPVKPLDRAVFWIEFVMRHKGAKHLRVAAHDLTWFQYHSLDVTGFLLACVATVIFIITKCLFCVWKFVRTGKKGKRD

SEQ ID NO: 4333 - protein, 232 aa, Homo sapiens
MDSPEVTFTLAYLVFAVCFVFTPNEFHAAGLTVQNLLSGWLGSEDAAFVPFHLRRTAATLLCHSLLPLGYYVGMCLAASEKRLHALSQAPEAWRLFLLLAVTLPSIACILIYYWSRDRWACHPLARTLALYALPQSGWQAVASSVNTEFRRIDKFATGAPGARVIVTDTWVMKVTTYRVHVAQQQDVHLTVTESRQHELSPDSNLPVQLLTIRVASTNPAVQAFDIWSWRPA

SEQ ID NO: 4334 - protein, 236 aa, Homo sapiens
MAPDPWFSTYDSTCQIAQEIAEKIQQRNQYERKGEKAPKLTVTIRALLQNLKEKIALLKDLLLRAVSTHQITQLEGDRRQNLLDDLVTRERLLLASFKNEGAEPDLIRSSLMSEEAKRGAPNPWLFEEPEETRGLGFDEIRQQQQKIIQEQDAGLDALSSIISRQKQMGQEIGNELDEQNEIIDDLANLVENTDEKLRNETRRVNMVDRKSASCGMIMVILLLLVAIVVVAVWPTN

SEQ ID NO: 4335 - protein, 340 aa, Homo sapiens
MSELEQLRQEAEQLRNQIRDARKACGDSTLTQITAGLDPVGRIQMRTRRTLRGHLAKIYAMHWGTDSRLLVSASQDGKLIIWDSYTTNKVHAIPLRSSWVMTCAYAPSGNFVACGGLDNICSIYSLKTREGNVRVSRELPGHTGYLSCCRFLDDNQIITSSGDTTCALWDIETGQQTVGFAGHSGDVMSLSLAPDGRTFVSGACDASIKLWDVRDSMCRQTFIGHESDINAVAFFPNGYAFTTGSDDATCRLFDLRADQELLMYSHDNIICGITSVAFSRSGRLLLAGYDDFNCNIWDAMKGDRAGVLAGHDNRVSCLGVTDDGMAVATGSWDSFLKIWN

SEQ ID NO: 4336 - protein, 835 aa, Homo sapiens
MWLLALCLVGLAGAQRGGGGPGGGAPGGPGLGLGSLGEERFPVVNTAYGRVRGVRRELNNEILGPVVQFLGVPYATPPLGARRFQPPEAPASWPGVRNATTLPPACPQNLHGALPAIMLPVWFTDNLEAAATYVQNQSEDCLYLNLYVPTEDGPLTKKRDEATLNPPDTDIRDPGKKPVMLFLHGGSYMEGTGNMFDGSVLAAYGNVIVATLNYRLGVLGFLSTGDQAAKGNYGLLDQIQALRWLSENIAHFGGDPERITIFGSGAGASCVNLLILSHHSEGLFQKAIAQSGTAISSWSVNYQPLKYTRLLAAKVGCDREDSAEAVECLRRKPSRELVDQDVQPARYHIAFGPVVDGDVVPDDPEILMQQGEFLNYDMLIGVNQGEGLKFVEDSAESEDGVSASAFDFTVSNFVDNLYGYPEGKDVLRETIKFMYTDWADRDNGEMRRKTLLALFTDHQWVAPAVATAKLHADYQSPVYFYTFYHHCQAEGRPEWADAAHGDELPYVFGVPMVGATDLFPCNFSKNDVMLSAVVMTYWTNFAKTGDPNQPVPQDTKFIHTKPNRFEEVVWSKFNSKEKQYLHIGLKPRVRDNYRANKVAFWLELVPHLHNLHTELFTTTTRLPPYATRWPPRPPAGAPGTRRPPPPATLPPEPEPEPGPRAYDRFPGDSRDYSTELSVTVAVGASLLFLNILAFAALYYKRDRRQELRCRRLSPPGGSGSGVPGGGPLLPAAGRELPPEEELVSLQLKRGGGVGADPAEALRPACPPDYTLALRRAPDDVPLLAPGALTLLPSGLGPPPPPPPPSLHPFGPFPPPPPTATSHNNTLPHPHSTTRV

SEQ ID NO: 4337 - protein, 430 aa, Homo sapiens
MTTSPILQLLLRLSLCGLLLQRAETGSKGQTAGELYQRWERYRRECQETLAAAEPPSVAAGFVLRQCGSDGQWGLWRDHTQCENPEKNEAFLDQRLILERLQVMYTVGYSLSLATLLLALLILSLFRRLHCTRNYIHINLFTSFMLRAAAILSRDRLLPRPGPYLGDQALALWNQALAACRTAQIVTQYCVGANYTWLLVEGVYLHSLLVLVGGSEEGHFRYYLLLGWGAPALFVIPWVIVRYLYENTQCWERNEVKAIWWIIRTPILMTILINFLIFIRILGILLSKLRTRQMRCRDYRLRLARSTLTLVPLLGVHEVVFAPVTEEQARGALRFAKLGFEIFLSSFQGFLVSVLYCFINKEVQSEIRRGWHHCRLRRSLGEEQRQLPERAFRALPSGSGPGEVPTSRGLSSGTLPGPGNEASRELESYC

SEQ ID NO: 4338 - protein, 847 aa, Homo sapiens
MFKCWSVVLVLGFIFLESEGRPTKEGGYGLKSYQPLMRLRHKQEKNQESSRVKGFMIQDGPFGSCENKYCGLGRHCVTSRETGQAECACMDLCKRHYKPVCGSDGEFYENHCEVHRAACLKKQKITIVHNEDCFFKGDKCKTTEYSKMKNMLLDLQNQKYIMQENENPNGDDISRKKLLVDQMFKYFDADSNGLVDINELTQVIKQEELGKDLFDCTLYVLLKYDDFNADKHLALEEFYRAFQVIQLSLPEDQKLSITAATVGQSAVLSCAIQGTLRPPIIWKRNNIILNNLDLEDINDFGDDGSLYITKVTTTHVGNYTCYADGYEQVYQTHIFQVNVPPVIRVYPESQAREPGVTASLRCHAEGIPKPQLGWLKNGIDITPKLSKQLTLQANGSEVHISNVRYEDTGAYTCIAKNEAGVDEDISSLFVEDSARKTLANILWREEGLGIGNMFYVFYEDGIKVIQPIECEFQRHIKPSEKLLGFQDEVCPKAEGDEVQRCVWASAVNVKDKFIYVAQPTLDRVLIVDVQSQKVVQAVSTDPVPVKLHYDKSHDQVWVLSWGTLEKTSPTLQVITLASGNVPHHTIHTQPVGKQFDRVDDFFIPTTTLIITHMRFGFILHKDEAALQKIDLETMSYIKTINLKDYKCVPQSLAYTHLGGYYFIGCKPDSTGAVSPQVMVDGVTDSVIGFNSDVTGTPYVSPDGHYLVSINDVKGLVRVQYITIRGEIQEAFDIYTNLHISDLAFQPSFTEAHQYNIYGSSSTQTDVLFVELSSGKVKMIKSLKEPLKAEEWPWNRKNRQIQDSGLFGQYLMTPSKDSLFILDGRLNKLNCEITEVEKGNTVIWVGDA

SEQ ID NO: 4339 - protein, 595 aa, Homo sapiens
MDPVAFKDVAVNFTQEEWALLDISQRKLYREVMLETFRNLTSLGKRWKDQNIEYEHQNPRRNFRSLIEEKVNEIKDDSHCGETFTPVPDDRLNFQEKKASPEVKSCESFVCGEVGLGNSSFNMNIRGDIGHKAYEYQEYGPKPCKCQQPKKAFRYRPSFRTQERDHTGEKPNACKVCGKTFISHSSVRRHMVMHSGDGPYKCKFCGKAFHCLRLYLIHERIHTGEKPCECKQCGKSFSYSATHRIHKRTHTGEKPYEYQECGKAFHSPRSYRRHERIHMGEKAYQCKECGKAFTCPRYVRIHERTHSRKNLYECKQCGKALSSLTSFQTHVRLHSGERPYECKICGKDFCSVNSFQRHEKIHSGEKPYKCKQCGKAFPHSSSLRYHERTHTGEKPYECKQCGKAFRSASHLRVHGRTHTGEKPYECKECGKAFRYVNNLQSHERTQTHIRIHSGERRYKCKICGKGFYCPKSFQRHEKTHTGEKLYECKQRSVVPSVVPVPFDIMKGLTLERSPINASNVGKPSELCQSFECMVGLTLKRNPMSVSNDGKPSDLPHTFEYVVGHTMERSPMHVRNVGNPSDLPRTFEFMKGHKHT

SEQ ID NO: 4340 - protein, 278 aa, Homo sapiens
MLMKRLAARCFAGLLILSPLTVISDSRPADSGKAIEDGNLEEMEEEVRLKKRKRRRNVDKDPAKEDVEKAKKRRGRPPAEKLSPNPPKLTKQMNAIIDTVINYKDSSGRQLSEVFIQLPSRKELPEYYELIRKPVDFKKIKERIRNHKYRSLGDLEKDVMLLCHNAQTFNLEGSQIYEDSIVLQSVFKSARQKIAKEEESEDESNEEEEEEDEEESESEAKSVKVKIKLNKKDDKGRDKGKGKKRPNRGKAKPVVSDFDSDEEQDEREQSEGSGTDDE

SEQ ID NO: 4341 - protein, 382 aa, Homo sapiens
MGPTSVPLVKAHRSSVSDYVNYDIIVRHYNYTGKLNISADKENSIKLTSVVFILICCFIILENIFVLLTIWKTKKFHRPMYYFIGNLALSDLLAGVAYTANLLLSGATTYKLTPAQWFLREGSMFVALSASVFSLLAIAIERYITMLKMKLHNGSNNFRLFLLISACWVISLILGGLPIMGWNCISALSSCSTVLPLYHKHYILFCTTVFTLLLLSIVILYCRIYSLVRTRSRRLTFRKNISKASRSSEKSLALLKTVIIVLSVFIACWAPLFILLLLDVGCKVKTCDILFRAEYFLVLAVLNSGTNPIIYTLTNKEMRRAFIRIMSCCKCPSGDSAGKFKRPIIAGMEFSRSKSDNSSHPQKDEGDNPETIMSSGNVNSSS

SEQ ID NO: 4342 - protein, 345 aa, Homo sapiens
MQRLVAWDPACLPLPPPPPAFKSMEVANFYYEADCLAAAYGGKAAPAAPPAARPGPRPPAGELGSIGDHERAIDFSPYLEPLGAPQAPAPATATDTFEAAPPAPAPAPASSGQHHDFLSDLFSDDYGGKNCKKPAEYGYVSLGRLGAAKGALHPGCFAPLHPPPPPPPPPAELKAEPGFEPADCKRKEEAGAPGGGAGMAAGFPYALRAYLGYQAVPSGSSGSLSTSSSSSPPGTPSPADAKAPPTACYAGAAPAPSQVKSKAKKTVDKHSDEYKIRRERNNIAVRKSRDKAKMRNLETQHKVLELTAENERLQKKVEQLSRELSTLRNLFKQLPEPLLASSGHC

SEQ ID NO: 4343 - protein, 770 aa, Homo sapiens
MDFSKFLADDFDVKEWINAAFRAGSKEAASGKADGHAATLVMKLQLFIQEVNHAVEETSHQALQNMPKVLRDVEALKQEASFLKEQMILVKEDIKKFEQDTSQSMQVLVEIDQVKSRMQLAAESLQEADKWSTLSADIEETFKTQDIAVISAKLTGMQNSLMMLVDTPDYSEKCVHLEALKNRLEALASPQIVAAFTSQAVDQSKVFVKVFTEIDRMPQLLAYYYKCHKVQLLAAWQELCQSDLSLDRQLTGLYDALLGAWHTQIQWATQVFQKPHEVVMVLLIQTLGALMPSLPSCLSNGVERAGPEQELTRLLEFYDATAHFAKGLEMALLPHLHEHNLVKVTELVDAVYDPYKPYQLKYGDMEESNLLIQMSAVPLEHGEVIDCVQELSHSVNKLFGLASAAVDRCVRFTNGLGTCGLLSALKSLFAKYVSDFTSTLQSIRKKCKLDHIPPNSLFQEDWTAFQNSIRIIATCGELLRHCGDFEQQLANRILSTAGKYLSDSCSPRSLAGFQESILTDKKNSAKNPWQEYNYLQKDNPAEYASLMEILYTLKEKGSSNHNLLAAPRAALTRLNQQAHQLAFDSVFLRIKQQLLLISKMDSWNTAGIGETLTDELPAFSLTPLEYISNIGQYIMSLPLNLEPFVTQEDSALELALHAGKLPFPPEQGDELPELDNMADNWLGSIARATMQTYCDAILQIPELSPHSAKQLATDIDYLINVMDALGLQPSRTLQHIVTLLKTRPEDYRQVSKGLPRRLATTVATMRSVNY

SEQ ID NO: 4344 - protein, 707 aa, Homo sapiens
MAAAVAAAGRLGWLFAALCLGNAAGEAAPGPRVLGFCLEEDGAAGAGWVRGGAARDTPDATFLLRLFGPGFANSSWSWVAPEGAGCREEAASPAGEWRALLRLRLRAEAVRPHSALLAVRVEPGGGAAEEAAPPWALGLGAAGLLALAALARGLQLSALALAPAEVQVLRESGSEAERAAARRLEPARRWAGCALGALLLLASLAQAALAVLLYRAAGQRAVPAVLGSAGLVFLVGEVVPAAVSGRWTLALAPRALGLSRLAVLLTLPVALPVGQLLELAARPGRLRERVLELARGGGDPYSDLSKGVLRCRTVEDVLTPLEDCFMLDASTVLDFGVLASIMQSGHTRIPVYEEERSNIVDMLYLKDLAFVDPEDCTPLSTITRFYNHPLHFVFNDTKLDAVLEEFKRGKSHLAIVQKVNNEGEGDPFYEVLGLVTLEDVIEEIIRSEILDESEDYRDTVVKRKPASLMAPLKRKEEFSLFKVSDDEYKVTISPQLLLATQRFLSREVDVFSPLRISEKVLLHLLKHPSVNQEVRFDESNRLATHHYLYQRSQPVDYFILILQGRVEVEIGKEGLKFENGAFTYYGVSALTVPSSVHQSPVSSLQPIRHDLQPDPGDGTHSSAYCPDYTVRALSDLQLIKVTRLQYLNALLATRAQNLPQSPENTDLQVIPGSQTRLLGEKTTTAAGSSHSRPGVPVEGSPGRNPGV

SEQ ID NO: 4345 - protein, 584 aa, Homo sapiens
MDLLWMPLLLVAACVSAVHSSPEVNAGVSSIHITKPVHILEERSLLVLTPAGLTQMLNQTRFLMVLFHNPSSKQSRNLAEELGKAVEIMGKGKNGIGFGKVDITIEKELQQEFGITKAPELKLFFEGNRSEPISCKGVVESAALVVWLRRQISQKAFLFNSSEQVAEFVISRPLVIVGFFQDLEEEVAELFYDVIKDFPELTFGVITIGNVIGRFHVTLDSVLVFKKGKIVNRQKLINDSTNKQELNRVIKQHLTDFVIEYNTENKDLISELHIMSHMLLFVSKSSESYGIIIQHYKLASKEFQNKILFILVDADEPRNGRVFKYFRVTEVDIPSVQILNLSSDARYKMPSDDITYESLKKFGRSFLSKNATKHQSSEEIPKYWDQGLVKQLVGKNFNVVVFDKEKDVFVMFYAPWSKKCKMLFPLLEELGRKYQNHSTIIIAKIDVTANDIQLMYLDRYPFFRLFPSGSQQAVLYKGEHTLKGFSDFLESHIKTKIEDEDELLSVEQNEVIEEEVLAEEKEVPMMRKGLPEQQSPELENMTKYVSKLEEPAGKKKTSEEVVVVVAKPKGPPVQKKKPKVKEEL

SEQ ID NO: 4346 - protein, 380 aa, Homo sapiens
MGIQGLAKLIADVAPSAIRENDIKSYFGRKVAIDASMSIYQFLIAVRQGGDVLQNEEGETTSHLMGMFYRTIRMMENGIKPVYVFDGKPPQLKSGELAKRSERRAEAEKQLQQAQAAGAEQEVEKFTKRLVKVTKQHNDECKHLLSLMGIPYLDAPSEAEASCAALVKAGKVYAAATEDMDCLTFGSPVLMRHLTASEAKKLPIQEFHLSRILQELGLNQEQFVDLCILLGSDYCESIRGIGPKRAVDLIQKHKSIEEIVRRLDPNKYPVPENWLHKEAHQLFLEPEVLDPESVELKWSEPNEEELIKFMCGEKQFSEERIRSGVKRLSKSRQGSTQGRLDDFFKVTGSLSSAKRKEPEPKGSTKKKAKTGAAGKFKRGK

SEQ ID NO: 4347 - protein, 753 aa, Homo sapiens
MAPDSDPFPEGPLLKLLPLDARDRGTQRCRLGPAALHALGARLGSAVKISLPDGGSCLCTAWPRRDGADGFVQLDPLCASPGAAVGASRSRRSLSLNRLLLVPCPPLRRVAVWPVLRERAGAPGARNTAAVLEAAQELLRNRPISLGHVVVAPPGAPGLVAALHIVGGTPSPDPAGLVTPRTRVSLGGEPPSEAQPQPEVPLGGLSEAADSLRELLRLPLRYPRALTALGLAVPRGVLLAGPPGVGKTQLVRAVAREAGAELLAVSAPALQGSRPGETEENVRRVFQRARELASRGPSLLFLDEMDALCPQRGSRAPESRVVAQVLTLLDGASGDREVVVVGATNRPDALDPALRRPGRFDREVVIGTPTLKQRKEILQVITSKMPISSHVDLGLLAEMTVGYVGADLTALCREAAMHALLHSEKNQDNPVIDEIDFLEAFKNIQPSSFRSVIGLMDIKPVDWEEIGGLEDVKLKLKQSIEWPLKFPWEFVRMGLTQPKGVLLYGPPGCAKTTLVRALATSCHCSFVSVSGADLFSPFVGDSEKVLSQIFRQARASTPAILFLDEIDSILGARSASKTGCDVQERVLSVLLNELDGVGLKTIERRGSKSSQQEFQEVFNRSVMIIAATNRPDVLDTALLRPGRLDKIIYIPPPDHKGRLSILKVCTKTMPIGPDVSLENLAAETCFFSGADLRNLCTEAALLALQENGLDATTVKQEHFLKSLKTVKPSLSCKDLALYENLFKKEGFSNVEGI

SEQ ID NO: 4348 - protein, 757 aa, Homo sapiens
MPALPLDQLQITHKDPKTGKLRTSPALHPEQKADRYFVLYKPPPKDNIPALVEEYLERATFVANDLDWLLALPHDKFWCQVIFDETLQKCLDSYLRYVPRKFDEGVASAPEVVDMQKRLHRSVFLTFLRMSTHKESKDHFISPSAFGEILYNNFLFDIPKILDLCVLFGKGNSPLLQKMIGNIFTQQPSYYSDLDETLPTILQVFSNILQHCGLQGDGANTTPQKLEERGRLTPSDMPLLELKDIVLYLCDTCTTLWAFLDIFPLACQTFQKHDFCYRLASFYEAAIPEMESAIKKRRLEDSKLLGDLWQRLSHSRKKLMEIFHIILNQICLLPILESSCDNIQGFIEEFLQIFSSLLQEKRFLRDYDALFPVAEDISLLQQASSVLDETRTAYILQAVESAWEGVDRRKATDAKDPSVIEEPNGEPNGVTVTAEAVSQASSHPENSEEEECMGAAAAVGPAMCGVELDSLISQVKDLLPDLGEGFILACLEYYHYDPEQVINNILEERLAPTLSQLDRNLDREMKPDPTPLLTSRHNVFQNDEFDVFSRDSVDLSRVHKGKSTRKEENTRSLLNDKRAVAAQRQRYEQYSVVVEEVPLQPGESLPYHSVYYEDEYDDTYDGNQVGANDADSDDELISRRPFTIPQVLRTKVPREGQEEDDDDEEDDADEEAPKPDHFVQDPAVLREKAEARRMAFLAKKGYRHDSSTAVAGSPRGHGQSRETTQERRKKEANKATRANHNRRTMADRKRSKGMIPS

SEQ ID NO: 4349 - protein, 522 aa, Homo sapiens
MSGFNFGGTGAPTGGFTFGTAKTATTTPATGFSFSTSGTGGFNFGAPFQPATSTPSTGLFSLATQTPATQTTGFTFGTATLASGGTGFSLGIGASKLNLSNTAATPAMANPSGFGLGSSNLTNAISSTVTSSQGTAPTGFVFGPSTTSVAPATTSGGFSFTGGSTAQPSGFNIGSAGNSAQPTAPATLPFTPATPAATTAGATQPAAPTPTATITSTGPSLFASIATAPTSSATTGLSLCTPVTTAGAPTAGTQGFSLKAPGAASGTSTTTSTAATATATTTSSSSTTGFALNLKPLAPAGIPSNTAAAVTAPPGPGAAAGAAASSAMTYAQLESLINKWSLELEDQERHFLQQATQVNAWDRTLIENGEKITSLHREVEKVKLDQKRLDQELDFILSQQKELEDLLSPLEELVKEQSGTIYLQHADEEREKTYKLAENIDAQLKRMAQDLKDIIEHLNTSGAPADTSDPLQQICKILNAHMDSLQWIDQNSALLQRKVEEVTKVCEGRRKEQERSFRITFD

SEQ ID NO: 4350 - protein, 310 aa, Homo sapiens
MLVVEVANGRSLVWGAEAVQALRERLGVGGRTVGALPRGPRQNSRLGLPLLLMPEEARLLAEIGAVTLVSAPRPDSRHHSLALTSFKRQQEESFQEQSALAAEARETRRQELLEKITEGQAAKKQKLEQASGASSSQEAGSSQAAKEDETSDGQASGEQEEAGPSSSQAGPSNGVAPLPRSALLVQLATARPRPVKARPLDWRVQSKDWPHAGRPAHELRYSIYRDLWERGFFLSAAGKFGGDFLVYPGDPLRFHAHYIAQCWAPEDTIPLQDLVAAGRLGTSVRKTLLLCSPQPDGKVVYTSLQWASLQ

SEQ ID NO: 4351 - protein, 387 aa, Homo sapiens
MPVPASWPHPPGPFLLLTLLLGLTEVAGEEELQMIQPEKLLLVTVGKTATLHCTVTSLLPVGPVLWFRGVGPGRELIYNQKEGHFPRVTTVSDLTKRNNMDFSIRISSITPADVGTYYCVKFRKGSPENVEFKSGPGTEMALGAKPSAPVVLGPAARTTPEHTVSFTCESHGFSPRDITLKWFKNGNELSDFQTNVDPTGQSVAYSIRSTARVVLDPWDVRSQVICEVAHVTLQGDPLRGTANLSEAIRVPPTLEVTQQPMRVGNQVNVTCQVRKFYPQSLQLTWSENGNVCQRETASTLTENKDGTYNWTSWFLVNISDQRDDVVLTCQVKHDGQLAVSKRLALEVTVHQKDQSSDATPGPASSLTALLLIAVLLGPIYVPWKQKT

SEQ ID NO: 4352 - protein, 903 aa, Homo sapiens
MTRSCSAVGCSTRDTVLSRERGLSFHQFPTDTIQRSKWIRAVNRVDPRSKKIWIPGPGAILCSKHFQESDFESYGIRRKLKKGAVPSVSLYKIPQGVHLKGKARQKILKQPLPDNSQEVATEDHNYSLKTPLTIGAEKLAEVQQMLQVSKKRLISVKNYRMIKKRKGLRLIDALVEEKLLSEETECLLRAQFSDFKWELYNWRETDEYSAEMKQFACTLYLCSSKVYDYVRKILKLPHSSILRTWLSKCQPSPGFNSNIFSFLQRRVENGDQLYQYCSLLIKSMPLKQQLQWDPSSHSLQGFMDFGLGKLDADETPLASETVLLMAVGIFGHWRTPLGYFFVNRASGYLQAQLLRLTIGKLSDIGITVLAVTSDATAHSVQMAKALGIHIDGDDMKCTFQHPSSSSQQIAYFFDSCHLLRLIRNAFQNFQSIQFINGIAHWQHLVELVALEEQELSNMERIPSTLANLKNHVLKVNSATQLFSESVASALEYLLSLDLPPFQNCIGTIHFLRLINNLFDIFNSRNCYGKGLKGPLLPETYSKINHVLIEAKTIFVTLSDTSNNQIIKGKQKLGFLGFLLNAESLKWLYQNYVFPKVMPFPYLLTYKFSHDHLELFLKMLRQVLVTSSSPTCMAFQKAYYNLETRYKFQDEVFLSKVSIFDISIARRKDLALWTVQRQYGVSVTKTVFHEEGICQDWSHCSLSEALLDLSDHRRNLICYAGYVANKLSALLTCEDCITALYASDLKASKIGSLLFVKKKNGLHFPSESLCRVINICERVVRTHSRMAIFELVSKQRELYLQQKILCELSGHINLFVDVNKHLFDGEVCAINHFVKLLKDIIICFLNIRAKNVAQNPLKHHSERTDMKTLSRKHWSSVQDYKCSSFANTSSKFRHLLSNDGYPFK

SEQ ID NO: 4353 - protein, 356 aa, Homo sapiens
MDAGVTESGLNVTLTIRLLMHGKEVGSIIGKKGESVKRIREESGARINISEGNCPERIITLTGPTNAIFKAFAMIIDKLEEDINSSMTNSTAASRPPVTLRLVVPATQCGSLIGKGGCKIKEIRESTGAQVQVAGDMLPNSTERAITIAGVPQSVTECVKQICLVMLETLSQSPQGRVMTIPYQPMPASSPVICAGGQDRCSDAAGYPHATHDLEGPPLDAYSIQGQHTISPLDLAKLNQVARQQSHFAMMHGGTGFAGIDSSSPEVKGYWASLDASTQTTHELTIPNNLIGCIIGRQGANINEIRQMSGAQIKIANPVEGSSGRQVTITGSAASISLAQYLINARLSSEKGMGCS

SEQ ID NO: 4354 - protein, 397 aa, Homo sapiens
MSVGRRRIKLLGILMMANVFIYFIMEVSKSSSQEKNGKGEVIIPKEKFWKISTPPEAYWNREQEKLNRQYNPILSMLTNQTGEAGRLSNISHLNYCEPDLRVTSVVTGFNNLPDRFKDFLLYLRCRNYSLLIDQPDKCAKKPFLLLAIKSLTPHFARRQAIRESWGQESNAGNQTVVRVFLLGQTPPEDNHPDLSDMLKFESEKHQDILMWNYRDTFFNLSLKEVLFLRWVSTSCPDTEFVFKGDDDVFVNTHHILNYLNSLSKTKAKDLFIGDVIHNAGPHRDKKLKYYIPEVVYSGLYPPYAGGGGFLYSGHLALRLYHITDQVHLYPIDDVYTGMCLQKLGLVPEKHKGFRTFDIEEKNKNNICSYVDLMLVHSRKPQEMIDIWSQLQSAHLKC

SEQ ID NO: 4355 - protein, 829 aa, Homo sapiens
MNSGVAMKYGNDSSAELSELHSAALASLKGDIVELNKRLQQTERERDLLEKKLAKAQCEQSHLMREHEDVQERTTLRYEERITELHSVIAELNKKIDRLQGTTIREEDEYSELRSELSQSQHEVNEDSRSMDQDQTSVSIPENQSTMVTADMDNCSDLNSELQRVLTGLENVVCGRKKSSCSLSVAEVDKHIEQLTTASEHCDLAIKTVEEIEGVLGRDLYPNLAEERSRWEKELAGLREENESLTAMLCSKEEELNRTKATMNAIREERDRLRRRVRELQTRLQSVQATGPSSPGRLTSTNRPINPSTGELSTSSSSNDIPIAKIAERVKLSKTRSESSSSDRPVLGSEISSIGVSSSVAEHLAHSLQDCSNIQEIFQTLYSHGSAISESKIREFEVETERLNSRIEHLKSQNDLLTITLEECKSNAERMSMLVGKYESNATALRLALQYSEQCIEAYELLLALAESEQSLILGQFRAAGVGSSPGDQSGDENITQMLKRAHDCRKTAENAAKALLMKLDGSCGGAFAVAGCSVQPWESLSSNSHTSTTSSTASSCDTEFTKEDEQRLKDYIQQLKNDRAAVKLTMLELESIHIDPLSYDVKPRGDSQRLDLENAVLMQELMAMKEEMAELKAQLYLLEKEKKALELKLSTREAQEQAYLVHIEHLKSEVEEQKEQRMRSLSSTSSGSKDKPGKECADAASPALSLAELRTTCSENELAAEFTNAIRREKKLKARVQELVSALERLTKSSEIRHQQSAEFVNDLKRANSNLVAAYEKAKKKHQNKLKKLESQMMAMVERHETQVRMLKQRIALLEEENSRPHTNETSL

SEQ ID NO: 4356 - protein, 116 aa, Homo sapiens
MAGIELERCQQQANEVTEIMRNNFGKVLERGVKLAELQQRSDQLLDMSSTFNKTTQNLAQKKCWENIRYRICVGLVVVGVLLIILIVLLVVFLPQSSDSSSAPRTQDAGIASGPGN

SEQ ID NO: 4357 - protein, 98 aa, Homo sapiens
MNQTAILICCLIFLTLSGIQGVPLSRTVRCTCISISNQPVNPRSLEKLEIIPASQFCPRVEIIATMKKKGEKRCLNPESKAIKNLLKAVSKERSKRSP

SEQ ID NO: 4358 - protein, 739 aa, Homo sapiens
MASILLRSCRGRAPARLPPPPRYTVPRGSPGDPAHLSCASTLGLRNCLNVPFGCCTPIHPVYTSSRGDHLGCWALRPECLRIVSRAPWTSTSVGFVAVGPQCLPVRGWHSSRPVRDDSVVEKSLKSLKDKNKKLEEGGPVYSPPAEVVVKKSLGQRVLDELKHYYHGFRLLWIDTKIAARMLWRILNGHSLTRRERRQFLRICADLFRLVPFLVFVVVPFMEFLLPVAVKLFPNMLPSTFETQSLKEERLKKELRVKLELAKFLQDTIEEMALKNKAAKGSATKDFSVFFQKIRETGERPSNEEIMRFSKLFEDELTLDNLTRPQLVALCKLLELQSIGTNNFLRFQLTMRLRSIKADDKLIAEEGVDSLNVKELQAACRARGMRALGVTEDRLRGQLKQWLDLHLHQEIPTSLLILSRAMYLPDTLSPADQLKSTLQTLPEIVAKEAQVKVAEVEGEQVDNKAKLEATLQEEAAIQQEHREKELQKRSEVAKDFEPERVVAAPQRPGTEPQPEMPDTVLQSETLKDTAPVLEGLKEEEITKEEIDILSDACSKLQEQKKSLTKEKEELELLKEDVQDYSEDLQEIKKELSKTGEEKYVEESKASKRLTKRVQQMIGQIDGLISQLEMDQQAGKLAPANGMPTGENVISVAELINAMKQVKHIPESKLTSLAAALDENKDGKVNIDDLVKVIELVDKEDVHISTSQVAEIVATLEKEEKVEEKEKAKEKAEKEVAEVKS

SEQ ID NO: 4359 - protein, 205 aa, Homo sapiens
MLQQDSNDDTEDVSLFDAEEETTNRPRKAKIRHPVASFFHLFFRVSAIIVYLLCGLLSSSFITCMVTIILLLSCDFWAVKNVTGRLMVGLRWWNHIDEDGKSHWVFESRKESSQENKTVSEAESRIFWLGLIACPVLWVIFAFSALFSFRVKWLAVVIMGVVLQGANLYGYIRCKVRSRKHLTSMATSYFGKQFLRQNTGDDQTS

SEQ ID NO: 4360 - protein, 376 aa, Homo sapiens
MDGEEQQPPHEANVEPVVPSEASEPVPRVLSGDPQNLSDVDAFNLLLEMKLKRRRQRPNLPRTVTQLVAEDGSRVYVVGTAHFSDDSKRDVVKTIREVQPDVVVVELCQYRVSMLKMDESTLLREAQELSLEKLQQAVRQNGLMSGLMQMLLLKVSAHITEQLGMAPGGEFREAFKEASKVPFCKFHLGDRPIPVTFKRAIAALSFWQKVRLAWGLCFLSDPISKDDVERCKQKDLLEQMMAEMIGEFPDLHRTIVSERDVYLTYMLRQAARRLELPRASDAEPRKCVPSVVVGVVGMGHVPGIEKNWSTDLNIQEIMTVPPPSVSGRVSRLAVKAAFFGLLGYSLYWMGRRTASLVLSLPAAQYCLQRVTEARHK

SEQ ID NO: 4361 - protein, 524 aa, Homo sapiens
MKEPRIFPRERPTPWTRAPLPPRGRLDGSLGPQGGPVLNTGHPLGVNSDPFLMAAGSLGGNLTPFPRNPSPFPASSGSLASNPAPFPAGARDPSMASFPRGMNPTGTGAVSFPRPGGLLGPGPGPGPTLNPRTGALPGPGPLSNPRLGGLPGPGPMSNPRAGGLLGAGPDPRGGGPMGPGSGPNLRAGVLLTSGNGPPNPRPVGLGPGPNPNLRSGFLGTNPAPRSGVFPGPGLGPNPRPSGLGPGPNLDARAGGLLGTGSGLNLRMAGPQGLDLAPILRAAGLLGANSASFSQASGNMGTSPSSMARVPGPMGPNSGPSSRGIGLPGPNPSPMSRAPGPIGPNSAHFSRPVGPMGVNANPFPRGAGSSAFSQSSGTLASNPATFQRSAGLQGSNPTIFPRASGPLGPNPANFPRATGLQGPSPTTFPRSTGPLGPGQVTFPRPAAGHLGPSPAGPVGINPAPFTRPTGTLGLNPASFPRMNGPAGKSFVPFPRVGSLPGTNPAAFPRPGGPMAAMYPNGMLPP

SEQ ID NO: 4362 - protein, 952 aa, Homo sapiens
MGVRHPPCSHRLLAVCALVSLATAALLGHILLHDFLLVPRELSGSSPVLEETHPAHQQGASRPGPRDAQAHPGRPRAVPTQCDVPPNSRFDCAPDKAITQEQCEARGCCYIPAKQGLQGAQMGQPWCFFPPSYPSYKLENLSSSEMGYTATLTRTTPTFFPKDILTLRLDVMMETENRLHFTIKDPANRRYEVPLETPHVHSRAPSPLYSVEFSEEPFGVIVRRQLDGRVLLNTTVAPLFFADQFLQLSTSLPSQYITGLAEHLSPLMLSTSWTRITLWNRDLAPTPGANLYGSHPFYLALEDGGSAHGVFLLNSNAMDVVLQPSPALSWRSTGGILDVYIFLGPEPKSVVQQYLDVVGYPFMPPYWGLGFHLCRWGYSSTAITRQVVENMTRAHFPLDVQWNDLDYMDSRRDFTFNKDGFRDFPAMVQELHQGGRRYMMIVDPAISSSGPAGSYRPYDEGLRRGVFITNETGQPLIGKVWPGSTAFPDFTNPTALAWWEDMVAEFHDQVPFDGMWIDMNEPSNFIRGSEDGCPNNELENPPYVPGVVGGTLQAATICASSHQFLSTHYNLHNLYGLTEAIASHRALVKARGTRPFVISRSTFAGHGRYAGHWTGDVWSSWEQLASSVPEILQFNLLGVPLVGADVCGFLGNTSEELCVRWTQLGAFYPFMRNHNSLLSLPQEPYSFSEPAQQAMRKALTLRYALLPHLYTLFHQAHVAGETVARPLFLEFPKDSSTWTVDHQLLWGEALLITPVLQAGKAEVTGYFPLGTWYDLQTVPVEALGSLPPPPAAPREPAIHSEGQWVTLPAPLDTINVHLRAGYIIPLQGPGLTTTESRQQPMALAVALTKGGEARGELFWDDGESLEVLERGAYTQVIFLARNNTIVNELVRVTSEGAGLQLQKVTVLGVATAPQQVLSNGVPVSNFTYSPDTKVLDICVSLLMGEQFLVSWC

SEQ ID NO: 4363 - protein, 343 aa, Homo sapiens
MWAAAGGLWRSRAGLRALFRSRDAALFPGCERGLHCSAVSCKNWLKKFASKTKKKVWYESPSLGSHSTYKPSKLEFLMRSTSKKTRKEDHARLRALNGLLYKALTDLLCTPEVSQELYDLNVELSKVSLTPDFSACRAYWKTTLSAEQNAHMEAVLQRSAAHMRHLLMSQQTLRNVPPIVFVQDKGNAALAELDQLLAVADFGPRDERDNFVQNDFRDPDAPQPCGTTEPTTSSSLCGIDHEALNKQIMEYKRRKDKGLGGLVWQGQVAELTTQMKKGRKRAKPRLEQDSSLKSYLSGEEVEDDLDLVGAPEYECYAPDTEELEAERGGGRTEDGHSCGASRE

SEQ ID NO: 4364 - protein, 718 aa, Homo sapiens
MFSVESLERAELCESLLTWIQTFNVDAPCQTVEDLTNGVVMAQVLQKIDPAYFDENWLNRIKTEVGDNWRLKISNLKKILKGILDYNHEILGQQINDFTLPDVNLIGEHSDAAELGRMLQLILGCAVNCEQKQEYIQAIMMMEESVQHVVMTAIQELMSKESPVSAGNDAYVDLDRQLKKTTEELNEALSAKEEIAQRCHELDMQVAALQEEKSSLLAENQVLMERLNQSDSIEDPNSPAGRRHLQLQTQLEQLQEETFRLEAAKDDYRIRCEELEKEISELRQQNDELTTLADEAQSLKDEIDVLRHSSDKVSKLEGQVESYKKKLEDLGDLRRQVKLLEEKNTMYMQNTVSLEEELRKANAARSQLETYKRQVVELQNRLSEESKKADKLDFEYKRLKEKVDSLQKEKDRLRTERDSLKETIEELRCVQAQEGQLTTQGLMPLGSQESSDSLAAEIVTPEIREKLIRLQHENKMLKLNQEGSDNEKIALLQSLLDDANLRKNELETENRLVNQRLLEVQSQVEELQKSLQDQGSKAEDSVLLKKKLEEHLEKLHEANNELQKKRAIIEDLEPRFNNSSLKIEELQEALRKKEEEMKQMEERYKKYLEKAKSVIRTLDPKQNQGAAPEIQALKNQLQERDRLFHSLEKEYEKTKSQREMEEKYIVSAWYNMGMTLHKKAAEDRLASTGSGQSFLARQRQATSSRRSYPGHVQPATAR

SEQ ID NO: 4365 - protein, 986 aa, Homo sapiens
MPGVARLPLLLGLLLLPRPGRPLDLADYTYDLAEEDDSEPLNYKDPCKAAAFLGDIALDEEDLRAFQVQQAVDLRRHTARKSSIKAAVPGNTSTPSCQSTNGQPQRGACGRWRGRSRSRRAATSRPERVWPDGVIPFVIGGNFTGSQRAVFRQAMRHWEKHTCVTFLERTDEDSYIVFTYRPCGCCSYVGRRGGGPQAISIGKNCDKFGIVVHELGHVVGFWHEHTRPDRDRHVSIVRENIQPGQEYNFLKMEPQEVESLGETYDFDSIMHYARNTFSRGIFLDTIVPKYEVNGVKPPIGQRTRLSKGDIAQARKLYKCPACGETLQDSTGNFSSPEYPNGYSAHMHCVWRISVTPGEKIILNFTSLDLYRSRLCWYDYVEVRDGFWRKAPLRGRFCGSKLPEPIVSTDSRLWVEFRSSSNWVGKGFFAVYEAICGGDVKKDYGHIQSPNYPDDYRPSKVCIWRIQVSEGFHVGLTFQSFEIERHDSCAYDYLEVRDGHSESSTLIGRYCGYEKPDDIKSTSSRLWLKFVSDGSINKAGFAVNFFKEVDECSRPNRGGCEQRCLNTLGSYKCSCDPGYELAPDKRRCEAACGGFLTKLNGSITSPGWPKEYPPNKNCIWQLVAPTQYRISLQFDFFETEGNDVCKYDFVEVRSGLTADSKLHGKFCGSEKPEVITSQYNNMRVEFKSDNTVSKKGFKAHFFSDKDECSKDNGGCQQDCVNTFGSYECQCRSGFVLHDNKHDCKEAGCDHKVTSTSGTITSPNWPDKYPSKKECTWAISSTPGHRVKLTFMEMDIESQPECAYDHLEVFDGRDAKAPVLGRFCGSKKPEPVLATGSRMFLRFYSDNSVQRKGFQASHATECGGQVRADVKTKDLYSHAQFGDNNYPGGVDCEWVIVAEEGYGVELVFQTFEVEEETDCGYDYMELFDGYDSTAPRLGRYCGSGPPEEVYSAGDSVLVKFHSDDTITKKGFHLRYTSTKFQDTLHSRK

SEQ ID NO: 4366 - protein, 1353 aa, Homo sapiens
MSSPMPDCTSKCRSLKHALDVLSVVTKGSENQIKAFLSSHCYNAATIKDVFGRNALHLVSSCGKKGVLDWLIQKGVDLLVKDKESGWTALHRSIFYGHIDCVWSLLKHGVSLYIQDKEGLSALDLVMKDRPTHVVFKNTDPTDVYTWGDNTNFTLGHGSQNSKHHPELVDLFSRSGIYIKQVVLCKFHSVFLSQKGQVYTCGHGPGGRLGHGDEQTCLVPRLVEGLNGHNCSQVAAAKDHTVVLTEDGCVYTFGLNIFHQLGIIPPPSSCNVPRQIQAKYLKGRTIIGVAAGRFHTVLWTREAVYTMGLNGGQLGCLLDPNGEKCVTAPRQVSALHHKDIALSLVAASDGATVCVTTRGDIYLLADYQCKKMASKQLNLKKVLVSGGHMEYKVDPEHLKENGGQKICILAMDGAGRVFCWRSVNSSLKQCRWAYPRQVFISDIALNRNEILFVTQDGEGFRGRWFEEKRKSSEKKEILSNLHNSSSDVSYVSDINSVYERIRLEKLTFAHRAVSVSTDPSGCNFAILQSDPKTSLYEIPAVSSSSFFEEFGKLLREADEMDSIHDVTFQVGNRLFPAHKYILAVHSDFFQKLFLSDGNTSEFTDIYQKDEDSAGCHLFVVEKVHPDMFEYLLQFIYTDTCDFLTHGFKPRIHLNKNPEEYQGTLNSHLNKVNFHEDDNQKSAFEVYKSNQAQTVSERQKSKPKSCKKGKNIREDDPVRMLQTVAKKFDFSNLSSRLDGVRFENEKINVIAKNTGNKLKLSQKKCSFLCDVTMKSVDGKEFPCHKCVLCARLEYFHSMLSSSWIEASSCAALEMPIHSDILKVILDYLYTDEAVVIKESQNVDFICSVLVVADQLLITRLKEICEVALTEKLTLKNAAMLLEFAAMYSAKQLKLSCLQFIGLNMAALLEARSLDVLSDGVLKDLSEFYRKMIPAMDRRVITPYQDGPDISYLEVEDGDIFLKEEINMEQNHSETMFKKAKTKAKKKPRKRSDSSGGYNLSDIIQSPSSTGLLKSGKTNSVESLPELLTSDSEGSYAGVGSPRDLQSPDFTTGFHSDKIEAKVKPYVNGTSPVYSREDLKPWEKSPILKISAPQPIPSNRIDTTSSASWVAGSFSPVSPPVVDLRTIMEIEESRQKCGATPKSHLGKTVSHGVKLSQKQRKMIALTTKENNSGMNSMETVLFTPSKAPKPVNAWASSLHSVSSKSFRDFLLEEKKSVTSHSSGDHVKKVSFKGIENSQAPKIVRCSTHGTPGPEGNHISDLPLLDSPNPWLSSSVTAPSMVAPVTFASIVEEELQQEAALIRSREKPLALIQIEEHAIQDLLVFYEAFGNPEEFVIVERTPQGPLAVPMWNKHGC

SEQ ID NO: 4367 - protein, 352 aa, Homo sapiens
MKPALLEVMRMNRICRMVLATCLGSFILVIFYFQSMLHPVMRRNPFGVDICCRKGSRSPLQELYNPIQLELSNTAVLHQMRRDQVTDTCRANSATSRKRRVLTPNDLKHLVVDEDHELIYCYVPKVACTNWKRLMMVLTGRGKYSDPMEIPANEAHVSANLKTLNQYSIPEINHRLKSYMKFLFVREPFERLVSAYRNKFTQKYNISFHKRYGTKIIKRQRKNATQEALRKGDDVKFEEFVAYLIDPHTQREEPFNEHWQTVYSLCHPCHIHYDLVGKYETLEEDSNYVLQLAGVGSYLKFPTYAKSTRTTDEMTTEFFQNISSEHQTQLYEVYKLDFLMFNYSVPSYLKLE

SEQ ID NO: 4368 - protein, 141 aa, Homo sapiens
MAQYLSTLLLLLATLAVALAWSPKEEDRIIPGGIYNADLNDEWVQRALHFAISEYNKATKDDYYRRPLRVLRARQQTVGGVNYFFDVEVGRTICTKSQPNLDTCAFHEQPELQKKQLCSFEIYEVPWENRRSLVKSRCQES

SEQ ID NO: 4369 - protein, 465 aa, Homo sapiens
MNVTSLFSFTSPAVKRLLGWKQGDEEEKWAEKAVDALVKKLKKKKGAMEELEKALSCPGQPSNCVTIPRSLDGRLQVSHRKGLPHVIYCRVWRWPDLQSHHELKPLECCEFPFGSKQKEVCINPYHYKRVESPVLPPVLVPRHSEYNPQHSLLAQFRNLGQNEPHMPLNATFPDSFQQPNSHPFPHSPNSSYPNSPGSSSSTYPHSPTSSDPGSPFQMPADTPPPAYLPPEDPMTQDGSQPMDTNMMAPPLPSEINRGDVQAVAYEEPKHWCSIVYYELNNRVGEAFHASSTSVLVDGFTDPSNNKNRFCLGLLSNVNRNSTIENTRRHIGKGVHLYYVGGEVYAECLSDSSIFVQSRNCNYHHGFHPTTVCKIPSGCSLKIFNNQEFAQLLAQSVNHGFETVYELTKMCTIRMSFVKGWGAEYHRQDVTSTPCWIEIHLHGPLQWLDKVLTQMGSPHNPISSVS

SEQ ID NO: 4370 - protein, 422 aa, Homo sapiens
MDHPSREKDERQRTTKPMAQRSAHCSRPSGSSSSSGVLMVGPNFRVGKKIGCGNFGELRLGKNLYTNEYVAIKLEPIKSRAPQLHLEYRFYKQLGSAGEGLPQVYYFGPCGKYNAMVLELLGPSLEDLFDLCDRTFTLKTVLMIAIQLLSRMEYVHSKNLIYRDVKPENFLIGRQGNKKEHVIHIIDFGLAKEYIDPETKKHIPYREHKSLTGTARYMSINTHLGKEQSRRDDLEALGHMFMYFLRGSLPWQGLKADTLKERYQKIGDTKRNTPIEALCENFPEEMATYLRYVRRLDFFEKPDYEYLRTLFTDLFEKKGYTFDYAYDWVGRPIPTPVGSVHVDSGASAITRESHTHRDRPSQQQPLRNQVVSSTNGELNVDDPTGAHSNAPITAHAEVEVVEEAKCCCFFKRKRKKTAQRHK

SEQ ID NO: 4371 - protein, 1217 aa, Homo sapiens
MFLYNLTLQRATGISFAIHGNFSGTKQQEIVVSRGKILELLRPDPNTGKVHTLLTVEVFGVIRSLMAFRLTGGTKDYIVVGSDSGRIVILEYQPSKNMFEKIHQETFGKSGCRRIVPGQFLAVDPKGRAVMISAIEKQKLVYILNRDAAARLTISSPLEAHKANTLVYHVVGVDVGFENPMFACLEMDYEEADNDPTGEAAANTQQTLTFYELDLGLNHVVRKYSEPLEEHGNFLITVPGGSDGPSGVLICSENYITYKNFGDQPDIRCPIPRRRNDLDDPERGMIFVCSATHKTKSMFFFLAQTEQGDIFKITLETDEDMVTEIRLKYFDTVPVAAAMCVLKTGFLFVASEFGNHYLYQIAHLGDDDEEPEFSSAMPLEEGDTFFFQPRPLKNLVLVDELDSLSPILFCQIADLANEDTPQLYVACGRGPRSSLRVLRHGLEVSEMAVSELPGNPNAVWTVRRHIEDEFDAYIIVSFVNATLVLSIGETVEEVTDSGFLGTTPTLSCSLLGDDALVQVYPDGIRHIRADKRVNEWKTPGKKTIVKCAVNQRQVVIALTGGELVYFEMDPSGQLNEYTERKEMSADVVCMSLANVPPGEQRSRFLAVGLVDNTVRIISLDPSDCLQPLSMQALPAQPESLCIVEMGGTEKQDELGERGSIGFLYLNIGLQNGVLLRTVLDPVTGDLSDTRTRYLGSRPVKLFRVRMQGQEAVLAMSSRSWLSYSYQSRFHLTPLSYETLEFASGFASEQCPEGIVAISTNTLRILALEKLGAVFNQVAFPLQYTPRKFVIHPESNNLIIIETDHNAYTEATKAQRKQQMAEEMVEAAGEDERELAAEMAAAFLNENLPESIFGAPKAGNGQWASVIRVMNPIQGNTLDLVQLEQNEAAFSVAVCRFSNTGEDWYVLVGVAKDLILNPRSVAGGFVYTYKLVNNGEKLEFLHKTPVEEVPAAIAPFQGRVLIGVGKLLRVYDLGKKKLLRKCENKHIANYISGIQTIGHRVIVSDVQESFIWVRYKRNENQLIIFADDTYPRWVTTASLLDYDTVAGADKFGNICVVRLPPNTNDEVDEDPTGNKALWDRGLLNGASQKAEVIMNYHVGETVLSLQKTTLIPGGSESLVYTTLSGGIGILVPFTSHEDHDFFQHVEMHLRSEHPPLCGRDHLSFRSYYFPVKNVIDGDLCEQFNSMEPNKQKNVSEELDRTPPEVSKKLEDIRTRYAF

SEQ ID NO: 4372 - protein, 589 aa, Homo sapiens
MEAEETMECLQEFPEHHKMILDRLNEQREQDRFTDITLIVDGHHFKAHKAVLAACSKFFYKFFQEFTQEPLVEIEGVSKMAFRHLIEFTYTAKLMIQGEEEANDVWKAAEFLQMLEAIKALEVRNKENSAPLEENTTGKNEAKKRKIAETSNVITESLPSAESEPVEIEVEIAEGTIEVEDEGIETLEEVASAKQSVKYIQSTGSSDDSALALLADITSKYRQGDRKGQIKEDGCPSDPTSKQEHMKSHSTESFKCEICNKRYLRESAWKQHLNCYHLEEGGVSKKQRTGKKIHVCQYCEKQFDHFGHFKEHLRKHTGEKPFECPNCHERFARNSTLKCHLTACQTGVGAKKGRKKLYECQVCNSVFNSWDQFKDHLVIHTGDKPNHCTLCDLWFMQGNELRRHLSDAHNISERLVTEEVLSVETRVQTEPVTSMTIIEQVGKVHVLPLLQVQVDSAQVTVEQVHPDLLQDSQVHDSHMSELPEQVQVSYLEVGRIQTEEGTEVHVEELHVERVNQMPVEVQTELLEADLDHVTPEIMNQEERESSQADAAEAAREDHEDAEDLETKPTVDSEAEKAENEDRTALPVLE

SEQ ID NO: 4373 - protein, 335 aa, Homo sapiens
MAVDITLLFRASVKTVKTRNKALGVAVGGGVDGSRDELFRRSPRPKGDFSSRAREVISHIGKLRDFLLEHRKDYINAYSHTMSEYGRMTDTERDQIDQDAQIFMRTCSEAIQQLRTEAHKEIHSQQVKEHRTAVLDFIEDYLKRVCKLYSEQRAIRVKRVVDKKRLSKLEPEPNTKTRESTSSEKVSQSPSKDSEENPATEERPEKILAETQPELGTWGDGKGEDELSPEEIQMFEQENQRLIGEMNSLFDEVRQIEGRVVEISRLQEIFTEKVLQQEAEIDSIHQLVVGATENIKEGNEDIREAIKNNAGFRVWILFFLVMCSFSLLFLDWYDS

SEQ ID NO: 4374 - protein, 259 aa, Homo sapiens
MSSTSSKRAPTTATQRLKQDYLRIKKDPVPYICAEPLPSNILEWHYVVRGPEMTPYEGGYYHGKLIFPREFPFKPPSIYMITPNGRFKCNTRLCLSITDFHPDTWNPAWSVSTILTGLLSFMVEKGPTLGSIETSDFTKRQLAVQSLAFNLKDKVFCELFPEVVEEIKQKQKAQDELSSRPQTLPLPDVVPDGETHLVQNGIQLLNGHAPGAVPNLAGLQQANRHHGLLGGALANLFVIVGFAAFAYTVKYVLRSIAQE

SEQ ID NO: 4375 - protein, 159 aa, Homo sapiens; identical to SEQ ID NO: 4300

SEQ ID NO: 4376 - protein, 202 aa, Homo sapiens
MCTGGCARCLGGTLIPLAFFGFLANILLFFPGGKVIDDNDHLSQEIWFFGGILGSGVLMIFPALVFLGLKNNDCCGCCGNEGCGKRFAMFTSTIFAVVGFLGAGYSFIISAISINKGPKCLMANSTWGYPFHDGDYLNDEALWNKCREPLNVVPWNLTLFSILLVVGGIQMVLCAIQVVNGLLGTLCGDCQCCGCCGGDGPV

SEQ ID NO: 4377 - protein, 294 aa, Homo sapiens
MAMSSGGSGGGVPEQEDSVLFRRGTGQSDDSDIWDDTALIKAYDKAVASFKHALKNGDICETSGKPKTTPKRKPAKKNKSQKKNTAASLQQWKVGDKCSAIWSEDGCIYPATIASIDFKRETCVVVYTGYGNREEQNLSDLLSPICEVANNIEQNAQENENESQVSTDESENSRSPGNKSDNIKPKSAPWNSFLPPPPPMPGPRLGPGKPGLKFNGPPPPPPPPPPHLLSCWLPPFPSGPPIIPPPPPICPDSLDDADALGSMLISWYMSGYHTGYYMGFRQNQKEGRCSHSLN

SEQ ID NO: 4378 - protein, 401 aa, Homo sapiens
MQVSIACTEHNLKSRNGEDRLLSKQSSTAPNVVNAARAKFRTVAIIARSLGTFTPQHHISLKESTAKQTGMKYRNLGKSGLRVSCLGLGTWVTFGGQISDEVAERLMTIAYESGVNLFDTAEVYAAGKAEVILGSIIKKKGWRRSSLVITTKLYWGGKAETERGLSRKHIIEGLKGSLQRLQLEYVDVVFANRPDSNTPMEEIVRAMTHVINQGMAMYWGTSRWSAMEIMEAYSVARQFNMIPPVCEQAEYHLFQREKVEVQLPELYHKIGVGAMTWSPLACGIISGKYGNGVPESSRASLKCYQWLKERIVSEEGRKQQNKLKDLSPIAERLGCTLPQLAVAWCLRNEGVSSVLLGSSTPEQLIENLGAIQVLPKMTSHVVNEIDNILRNKPYSKKDYRS

SEQ ID NO: 4379 - protein, 336 aa, Homo sapiens
MSEEQFGGDGAAAAATAAVGGSAGEQEGAMVAATQGAAAAAGSGAGTGGGTASGGTEGGSAESEGAKIDASKNEEDEGKMFIGGLSWDTTKKDLKDYFSKFGEVVDCTLKLDPITGRSRGFGFVLFKESESVDKVMDQKEHKLNGKVIDPKRAKAMKTKEPVKKIFVGGLSPDTPEEKIREYFGGFGEVESIELPMDNKTNKRRGFCFITFKEEEPVKKIMEKKYHNVGLSKCEIKVAMSKEQYQQQQQWGSRGGFAGRARGRGGGPSQNWNQGYSNYWNQGYGNYGYNSQGYGGYGGYDYTGYNNYYGYGDYSNQQSGYGKVSRRGGHQNSYKPY

SEQ ID NO: 4380 - protein, 1090 aa, Homo sapiens
MAEAELHKERLQAIAEKRKRQTEIEGKRQQLDEQILLLQHSKSKVLREKWLLQGIPAGTAEEEEARRRQSEEDEFRVKQLEDNIQRLEQEIQTLESEESQISAKEQIILEKLKETEKSFKDFQKGFSSTDGDAVNYISSQLPDLPILCSRTAEPSPGQDGTSRAAGVGWENVLLKEGESASNATETSGPDMTIKKPPQLSEDDIWLKSEGDNYSATLLEPAASSLSPDHKNMEIEVSVAECKSVPGITSTPHPMDHPSAFYSPPHNGLLTDHHESLDNDVAREIRYLDEVLEANCCDSAVDGTYNGTSSPEPGAVVLVGGLSPPVHEATQPEPTERTASRQAPPHIELSNSSPDPMAEAERTNGHSPSQPRDALGDSLQVPVSPSSTTSSRCSSRDGEFTLTTLKKEAKFELRAFHEDKKPSKLFEDDEHEKEQYCIRKVRPSEEMLELEKERRELIRSQAVKKNPGIAAKWWNPPQEKTIEEQLDEEHLESHKKYKERKERRAQQEQLLLQKQLQQQQQQPPSQLCTAPASSHERASMIDKAKEDIVTEQIDFSAARKQFQLMENSRQAVAKGQSTPRLFSIKPFYRPLGSVNSDKPLTNPRPPSVGGPPEDSGASAAKGQKSPGALETPSAAGSQGNTASQGKEGPYSEPSKRGPLSKLWAEDGEFTSARAVLTVVKDDDHGILDQFSRSVNVSLTQEELDSGLDELSVRSQDTTVLETLSNDFSMDNISDSGASNETTNALQENSLADFSLPQTPQTDNPSEGRGEGVSKSFSDHGFYSPSSTLGDSPLVDDPLEYQAGLLVQNAIQQAIAEQVDKAVSKTSRDGAEQQGPEATVEEAEAAAFGSEKPQSMFEPPQVSSPVQEKRDVLPKILPAEDRALRERGPPQPLPAVQPSGPINMEETRPEGSYFSKYSEAAELRSTASLLATQESDVMVGPFKLRSRKQRTLSMIEEEIRAAQEREEELKRQRQVLQSTQSPRTKNAPSLPSRTCYKTAPGKIEKVKPPPSPTTEGPSLQPDLAPEEAAGTQRPKNLMQTLMEDYETHKSKRRERMDDSSVLEATRVNRRKSALALRWEAGIYANQEEEDNE

SEQ ID NO: 4381 - protein, 173 aa, Homo sapiens
MAPKGKVGTRGKKQIFEENRETLKFYLRIILGANAIYCLVTLVFFYSSASFWAWLALGFSLAVYGASYHSMSSMARAAFSEDGALMDGGMDLNMEQGMAEHLKDVILLTAIVQVLSCFSLYVWSFWLLAPGRALYLLWVNVLGPWFTADSGTPAPEHNEKRQRRQERRQMKRL

SEQ ID NO: 4382 - protein, 181 aa, Homo sapiens
MAAAAWLQVLPVILLLLGAHPSPLSFFSAGPATVAAADRSKWHIPIPSGKNYFSFGKILFRNTTIFLKFDGEPCDLSLNITWYLKSADCYNEIYNFKAEEVELYLEKLKEKRGLSGKYQTSSKLFQNCSELFKTQTFSGDFMHRLPLLGEKQEAKENGTNLTFIGDKTIQMPFLKKHFLDC

SEQ ID NO: 4383 - protein, 1180 aa, Homo sapiens
MVLLLILSVLLLKEDVRGSAQSSERRVVAHMPGDIIIGALFSVHHQPTVDKVHERKCGAVREQYGIQRVEAMLHTLERINSDPTLLPNITLGCEIRDSCWHSAVALEQSIEFIRDSLISSEEEEGLVRCVDGSSSSFRSKKPIVGVIGPGSSSVAIQVQNLLQLFNIPQIAYSATSMDLSDKTLFKYFMRVVPSDAQQARAMVDIVKRYNWTYVSAVHTEGNYGESGMEAFKDMSAKEGICIAHSYKIYSNAGEQSFDKLLKKLTSHLPKARVVACFCEGMTVRGLLMAMRRLGLAGEFLLLGSDGWADRYDVTDGYQREAVGGITIKLQSPDVKWFDDYYLKLRPETNHRNPWFQEFWQHRFQCRLEGFPQENSKYNKTCNSSLTLKTHHVQDSKMGFVINAIYSMAYGLHNMQMSLCPGYAGLCDAMKPIDGRKLLESLMKTNFTGVSGDTILFDENGDSPGRYEIMNFKEMGKDYFDYINVGSWDNGELKMDDDEVWSKKSNIIRSVCSEPCEKGQIKVIRKGEVSCCWTCTPCKENEYVFDEYTCKACQLGSWPTDDLTGCDLIPVQYLRWGDPEPIAAVVFACLGLLATLFVTVVFIIYRDTPVVKSSSRELCYIILAGICLGYLCTFCLIAKPKQIYCYLQRIGIGLSPAMSYSALVTKTNRIARILAGSKKKICTKKPRFMSACAQLVIAFILICIQLGIIVALFIMEPPDIMHDYPSIREVYLICNTTNLGVVTPLGYNGLLILSCTFYAFKTRNVPANFNEAKYIAFTMYTTCIIWLAFVPIYFGSNYKIITMCFSVSLSATVALGCMFVPKVYIILAKPERNVRSAFTTSTVVRMHVGDGKSSSAASRSSSLVNLWKRRGSSGETLSSNGKSVTWAQNEKSSRGQHLWQRLSIHINKKENPNQTAVIKPFPKSTESRGLGAGAGAGGSAGGVGATGGAGCAGAGPGGPESPDAGPKALYDVAEAEEHFPAPARPRSPSPISTLSHRAGSASRTDDDVPSLHSEPVARSSSSQGSLMEQISSVVTRFTANISELNSMMLSTAAPSPGVGAPLCSSYLIPKEIQLPTTMTTFAEIQPLPAIEVTGGAQPAAGAQAAGDAARESPAAGPEAAAAKPDLEELVALTPPSPFRDSVDSGSTTPNSPVSESALCIPSSPKYDTLIIRDYTQSSSSL

SEQ ID NO: 4384 - protein, 703 aa, Homo sapiens
MLGTLTPLSSLLLLLLVLVLGCGPRASSGGGAGGAAGYAPVKYIQPMQKGPVGPPFREGKGQYLEMPLPLLPMDLKGEPGPPGKPGPRGPPGPPGFPGKPGMGKPGLHGQPGPAGPPGFSRMGKAGPPGLPGKVGPPGQPGLRGEPGIRGDQGLRGPPGPPGLPGPSGITIPGKPGAQGVPGPPGFQGEPGPQGEPGPPGDRGLKGDNGVGQPGLPGAPGQGGAPGPPGLPGPAGLGKPGLDGLPGAPGDKGESGPPGVPGPRGEPGAVGPKGPPGVDGVGVPGAAGLPGPQGPSGAKGEPGTRGPPGLIGPTGYGMPGLPGPKGDRGPAGVPGLLGDRGEPGEDGEPGEQGPQGLGGPPGLPGSAGLPGRRGPPGPKGEAGPGGPPGVPGIRGDQGPSGLAGKPGVPGERGLPGAHGPPGPTGPKGEPGFTGRPGGPGVAGALGQKGDLGLPGQPGLRGPSGIPGLQGPAGPIGPQGLPGLKGEPGLPGPPGEGRAGEPGTAGPTGPPGVPGSPGITGPPGPPGPPGPPGAPGAFDETGIAGLHLPNGGVEGAVLGKGGKPQFGLGELSAHATPAFTAVLTSPFPASGMPVKFDRTLYNGHSGYNPATGIFTCPVGGVYYFAYHVHVKGTNVWVALYKNNVPATYTYDEYKKGYLDQASGGAVLQLRPNDQVWVQMPSDQANGLYSTEYIHSSFSGFLLCPT

SEQ ID NO: 4385 - protein, 726 aa, Homo sapiens
MSTATTVAPAGIPATPGPVNPPPPEVSNPSKPGRKTNQLQYMQNVVVKTLWKHQFAWPFYQPVDAIKLNLPDYHKIIKNPMDMGTIKKRLENNYYWSASECMQDFNTMFTNCYIYNKPTDDIVLMAQALEKIFLQKVAQMPQEEVELLPPAPKGKGRKPAAGAQSAGTQQVAAVSSVSPATPFQSVPPTVSQTPVIAATPVPTITANVTSVPVPPAAAPPPPATPIVPVVPPTPPVVKKKGVKRKADTTTPTTSAITASRSESPPPLSDPKQAKVVARRESGGRPIKPPKKDLEDGEVPQHAGKKGKLSEHLRYCDSILREMLSKKHAAYAWPFYKPVDAEALELHDYHDIIKHPMDLSTVKRKMDGREYPDAQGFAADVRLMFSNCYKYNPPDHEVVAMARKLQDVFEMRFAKMPDEPVEAPALPAPAAPMVSKGAESSRSSEESSSDSGSSDSEEERATRLAELQEQLKAVHEQLAALSQAPVNKPKKKKEKKEKEKKKKDKEKEKEKHKVKAEEEKKAKVAPPAKQAQQKKAPAKKANSTTTAGRQLKKGGKQASASYDSEEEEEGLPMSYDEKRQLSLDINRLPGEKLGRVVHIIQSREPSLRDSNPDEIEIDFETLKPTTLRELERYVKSCLQKKQRKPFSASGKKQAAKSKEELAQEKKKELEKRLQDVSGQLSSSKKPARKEKPGSAPSGGPSRLSSSSSSESGSSSSSGSSSDSSDSE

SEQ ID NO: 4386 - protein, 476 aa, Homo sapiens
MIRPQLRTAGLGRCLLPGLLLLLVPVLWAGAEKLHTQPSCPAVCQPTRCPALPTCALGTTPVFDLCRCCRVCPAAEREVCGGAQGQPCAPGLQCLQPLRPGFPSTCGCPTLGGAVCGSDRRTYPSMCALRAENRAARRLGKVPAVPVQWGNCGDTGTRSAGPLRRNYNFIAAVVEKVAPSVVHVQLWGRLLHGSRLVPVYSGSGFIVSEDGLIITNAHVVRNQQWIEVVLQNGARYEAVVKDIDLKLDLAVIKIESNAELPVLMLGRSSDLRAGEFVVALGSPFSLQNTATAGIVSTKQRGGKELGMKDSDMDYVQIDATINYGNSGGPLVNLDGDVIGVNSLRVTDGISFAIPSDRVRQFLAEYHEHQMKGKAFSNKKYLGLQMLSLTVPLSEELKMHYPDFPDVSSGVYVCKVVEGTAAQSSGLRDHDVIVNINGKPITTTTDVVKALDSDSLSMAVLRGKDNLLLTVIPETIN

SEQ ID NO: 4387 - protein, 546 aa, Homo sapiens
MPGFLVRILPLLLVLLLLGPTRGLRNATQRMFEIDYSRDSFLKDGQPFRYISGSIHYSRVPRFYWKDRLLKMKMAGLNAIQTLPGSCGQVVGSPSAQDEASPLSEWRASYNSAGSNITDAFLSQRKCEPKGPLINSEFYTGWLDHWGQPHSTIKTEAVASSLYDILARGASVNLYMFIGGTNFAYWNGANSPYAAQPTSYDYDAPLSEAGDLTEKYFALRNIIQKFEKVPEGPIPPSTPKFAYGKVTLEKLKTVGAALDILCPSGPIKSLYPLTFIQVKQHYGFVLYRTTLPQDCSNPAPLSSPLNGVHDRAYVAVDGIPQGVLERNNVITLNITGKAGATLDLLVENMGRVNYGAYINDFKGLVSNLTLSSNILTDWTIFPLDTEDAVCSHLGGWGHRDSGHHDEAWAHNSSNYTLPAFYMGNFSIPSGIPDLPQDTFIQFPGWTKGQVWINGFNLGRYWPARGPQLTLFVPQHILMTSAPNTITVLELEWAPCSSDDPELCAVTFVDRPVIGSSVTYDHPSKPVEKRLMPPPPQKNKDSWLDHV

SEQ ID NO: 4388 - protein, 551 aa, Homo sapiens
MSGGEQKPERYYVGVDVGTGSVRAALVDQSGVLLAFADQPIKNWEPQFNHHEQSSEDIWAACCVVTKKVVQGIDLNQIRGLGFDATCSLVVLDKQFHPLPVNQEGDSHRNVIMWLDHRAVSQVNRINETKHSVLQYVGGVMSVEMQAPKLLWLKENLREICWDKAGHFFDLPDFLSWKATGVTARSLCSLVCKWTYSAEKGWDDSFWKMIGLEDFVADNYSKIGNQVLPPGASLGNGLTPEAARDLGLLPGIAVAASLIDAHAGGLGVIGADVRGHGLICEGQPVTSRLAVICGTSSCHMGISKDPIFVPGVWGPYFSAMVPGFWLNEGGQSVTGKLIDHMVQGHAAFPELQVKATARCQSIYAYLNSHLDLIKKAQPVGFLTVDLHVWPDFHGNRSPLADLTLKGMVTGLKLSQDLDDLAILYLATVQAIALGTRFIIEAMEAAGHSISTLFLCGGLSKNPLFVQMHADITGMPVVLSQEVESVLVGAAVLGACASGDFASVQEAMAKMSKVGKVVFPRLQDKKYYDKKYQVFLKLVEHQKEYLAIMNDD

SEQ ID NO: 4389 - protein, 543 aa, Homo sapiens
MEQVNELKEKGNKALSVGNIDDALQCYSEAIKLDPHNHVLYSNRSAAYAKKGDYQKAYEDGCKTVDLKPDWGKGYSRKAAALEFLNRFEEAKRTYEEGLKHEANNPQLKEGLQNMEARLAERKFMNPFNMPNLYQKLESDPRTRTLLSDPTYRELIEQLRNKPSDLGTKLQDPRIMTTLSVLLGVDLGSMDEEEEIATPPPPPPPKKETKPEPMEEDLPENKKQALKEKELGNDAYKKKDFDTALKHYDKAKELDPTNMTYITNQAAVYFEKGDYNKCRELCEKAIEVGRENREDYRQIAKAYARIGNSYFKEEKYKDAIHFYNKSLAEHRTPDVLKKCQQAEKILKEQERLAYINPDLALEEKNKGNECFQKGDYPQAMKHYTEAIKRNPKDAKLYSNRAACYTKLLEFQLALKDCEECIQLEPTFIKGYTRKAAALEAMKDYTKAMDVYQKALDLDSSCKEAADGYQRCMMAQYNRHDSPEDVKRRAMADPEVQQIMSDPAMRLILEQMQKDPQALSEHLKNPVIAQKIQKLMDVGLIAIR

SEQ ID NO: 4390 - protein, 583 aa, Homo sapiens
MESKGASSCRLLFCLLISATVFRPGLGWYTVNSAYGDTIIIPCRLDVPQNLMFGKWKYEKPDGSPVFIAFRSSTKKSVQYDDVPEYKDRLNLSENYTLSISNARISDEKRFVCMLVTEDNVFEAPTIVKVFKQPSKPEIVSKALFLETEQLKKLGDCISEDSYPDGNITWYRNGKVLHPLEGAVVIIFKKEMDPVTQLYTMTSTLEYKTTKADIQMPFTCSVTYYGPSGQKTIHSEQAVFDIYYPTEQVTIQVLPPKNAIKEGDNITLKCLGNGNPPPEEFLFYLPGQPEGIRSSNTYTLTDVRRNATGDYKCSLIDKKSMIASTAITVHYLDLSLNPSGEVTRQIGDALPVSCTISASRNATVVWMKDNIRLRSSPSFSSLHYQDAGNYVCETALQEVEGLKKRESLTLIVEGKPQIKMTKKTDPSGLSKTIICHVEGFPKPAIQWTITGSGSVINQTEESPYINGRYYSKIIISPEENVTLTCTAENQLERTVNSLNVSAISIPEHDEADEISDENREKVNDQAKLIVGIVVGLLLAALVAGVVYWLYMKKSKTASKHVNKDLGNMEENKKLEENNHKTEA

SEQ ID NO: 4391 - protein, 69 aa, Homo sapiens
MVPPVQVSPLIKLGRYSALFLGVAYGATRYNYLKPRAEEERRIAAEEKKKQDELKRIARELAEDDSILK

SEQ ID NO: 4392 - protein, 180 aa, Homo sapiens
MGLTISSLFSRLFGKKQMRILMVGLDAAGKTTILYKLKLGEIVTTIPTIGFNVETVEYKNICFTVWDVGGQDRIRPLWKHYFQNTQGLIFVVDSNDRERIQEVADELQKMLLVDELRDAVLLLFANKQDLPNAMAISEMTDKLGLQSLRNRTWYVQATCATQGTGLYEGLDWLSNELSKR

SEQ ID NO: 4393 - protein, 1261 aa, Homo sapiens
MGTGDFICISMTGGAPWGFRLQGGKEQKQPLQVAKIRNQSKASGSGLCEGDEVVSINGNPCADLTYPEVIKLMESITDSLQMLIKRPSSGISEALISENENKNLEHLTHGGYVESTTLQIRPATKTQCTEFFLAPVKTEVPLAENQRSGPDCAGSLKEETGPSYQRAPQMPDSQRGRVAEELILREKVEAVQPGPVVELQLSLSQERHKGASGPLVALPGAEKSKSPDPDPNLSHDRIVHINSIPTNEKADPFLRSSKIIQISSGRELRVIQESEAGDAGLPRVEVILDCSDRQKTEGCRLQAGKECVDSPVEGGQSEAPPSLVSFAVSSEGTEQGEDPRSEKDHSRPHKHRARHARLRRSESLSEKQVKEAKSKCKSIALLLTDAPNPNSKGVLMFKKRRRRARKYTLVSYGTGELEREADEEEEGDKEDTCEVAFLGASESEVDEELLSDVDDNTQVVNFDWDSGLVDIEKKLNRGDKMEMLPDTTGKGALMFAKRRERMDQITAQKEEDKVGGTPSREQDAAQTDGLRTTTSYQRKEEESVRTQSSVSKSYIEVSHGLGHVPQQNGFSGTSETANIQRMVPMNRTAKPFPGSVNQPATPFSPTRNMTSPIADFPAPPPYSAVTPPPDAFSRGVSSPIAGPAQPPPWPQPAPWSQPAFYDSSERIASRDERISVPAKRTGILQEAKRRSTTKPMFTFKEPKVSPNPELLSLLQNSEGKRGTGAGGDSGPEEDYLSLGAEACNFMQSSSAKQKTPPPVAPKPAVKSSSSQPVTPVSPVWSPGVAPTQPPAFPTSNPSKGTVVSSIKIAQPSYPPARPASTLNVAGPFKGPQAAVASQNYTPKPTVSTPTVNAVQPGAVGPSNELPGMSGRGAQLFAKRQSRMEKYVVDSDTVQAHAARAQSPTPSLPASWKYSSNVRAPPPVAYNPIHSPSYPLAALKSQPSAAQPSKMGKKKGKKPLNALDVMKHQPYQLNASLFTFQPPDAKDGLPQKSSVKVNSALAMKQALPPRPVNAASPTNVQASSVYSVPAYTSPPSFFAEASSPVSASPVPVGIPTSPKQESASSSYFVAPRPKFSAKKSGVTIQESGRSLSLPGRSVPPPISTSPWVYQPTYSYSSKPTDGLEKANKRPTPWEAAAKSPLGLVDDAFQPRNIQESIVANVVSAARRKVLPGPPEDWNERLSYIPQTQKAYMGSCGRQEYNVTANNNMSTTSQYGSQLPYAYYRQASRNDSAIMSMETRSDYCLPVADYNYNPHPRGWRRQT

SEQ ID NO: 4394 - protein, 316 aa, Homo sapiens
MRQPLSWGRWRAMLARTYGPGPSAGYRWASGAQGYVRNPPVGACDLQGELDRFGGISVRLARLDALDRLDAAAFQKGLQAAVQQWRSEGRTAVWLHIPILQSRFIAPAASLGFCFHHAESDSSTLTLWLREGPSRLPGYASHQVGVAGAVFDESTRKILVVQDRNKLKNMWKFPGGLSEPEEDIGDTAVREVFEETGIKSEFRSVLSIRQQHTNPGAFGKSDMYIICRLKPYSFTINFCQEECLRCEWMDLNDLAKTENTTPITSRVARLLLYGYREGFDKIDLTVEELPAVYTGLFYKLYHKELPENYKTMKGID

SEQ ID NO: 4395 - protein, 420 aa, Homo sapiens
MAALVRPARFVVRPLLQVVQAWDLDARRWVRALRRSPVKVVFPSGEVVEQKRAPGKQPRKAPSEASAQEQREKQPLEESASRAPSTWEESGLRYDKAYPGDRRLSSVMTIVKSRPFREKQGKILLEGRRLISDALKAGAVPKMFFFSRLEYLKELPVDKLKGVSLIKVKFEDIKDWSDLVTPQGIMGIFAKPDHVKMTYPKTQLQHSLPLLLICDNLRDPGNLGTILRSAAGAGCSKVLLTKGCVDAWEPKVLRAGMGAHFRMPIINNLEWETVPNYLPPDTRVYVADNCGLYAQAEMSNKASDHGWVCDQRVMKFHKYEEEEDVETGASQDWLPHVEVQSYDSDWTEAPAAVVIGGETYGVSLESLQLAESTGGKRLLIPVVPGVDSLNSAMAASILLFEGKRQLRGRAEDLSRDRSYH

SEQ ID NO: 4396 - protein, 491 aa, Homo sapiens
MKRMVSWSFHKLKTMKHLLLLLLCVFLVKSQGVNDNEEGFFSARGHRPLDKKREEAPSLRPAPPPISGGGYRARPAKAAATQKKVERKAPDAGGCLHADPDLGVLCPTGCQLQEALLQQERPIRNSVDELNNNVEAVSQTSSSSFQYMYLLKDLWQKRQKQVKDNENVVNEYSSELEKHQLYIDETVNSNIPTNLRVLRSILENLRSKIQKLESDVSAQMEYCRTPCTVSCNIPVVSGKECEEIIRKGGETSEMYLIQPDSSVKPYRVYCDMNTENGGWTVIQNRQDGSVDFGRKWDPYKQGFGNVATNTDGKNYCGLPGEYWLGNDKISQLTRMGPTELLIEMEDWKGDKVKAHYGGFTVQNEANKYQISVNKYRGTAGNALMDGASQLMGENRTMTIHNGMFFSTYDRDNDGWLTSDPRKQCSKEDGGGWWYNRCHAANPNGRYYWGGQYTWDMAKHGTDDGVVWMNWKGSWYSMRKMSMKIRPFFPQQ

SEQ ID NO: 4397 - protein, 974 aa, Homo sapiens
MAGRVPSLLVLLVFPSSCLAFRSPLSVFKRFKETTRPFSNECLGTTRPVVPIDSSDFALDIRMPGVTPKQSDTYFCMSMRIPVDEEAFVIDFKPRASMDTVHHMLLFGCNMPSSTGSYWFCDEGTCTDKANILYAWARNAPPTRLPKGVGFRVGGETGSKYFVLQVHYGDISAFRDNNKDCSGVSLHLTRLPQPLIAGMYLMMSVDTVIPAGEKVVNSDISCHYKNYPMHVFAYRVHTHHLGKVVSGYRVRNGQWTLIGRQSPQLPQAFYPVGHPVDVSFGDLLAARCVFTGEGRTEATHIGGTSSDEMCNLYIMYYMEAKHAVSFMTCTQNVAPDMFRTIPPEANIPIPVKSDMVMMHEHHKETEYKDKIPLLQQPKREEEEVLDQGDFYSLLSKLLGEREDVVHVHKYNPTEKAESESDLVAEIANVVQKKDLGRSDAREGAEHERGNAILVRDRIHKFHRLVSTLRPPESRVFSLQQPPPGEGTWEPEHTGDFHMEEALDWPGVYLLPGQVSGVALDPKNNLVIFHRGDHVWDGNSFDSKFVYQQIGLGPIEEDTILVIDPNNAAVLQSSGKNLFYLPHGLSIDKDGNYWVTDVALHQVFKLDPNNKEGPVLILGRSMQPGSDQNHFCQPTDVAVDPGTGAIYVSDGYCNSRIVQFSPSGKFITQWGEESSGSSPLPGQFTVPHSLALVPLLGQLCVADRENGRIQCFKTDTKEFVREIKHSSFGRNVFAISYIPGLLFAVNGKPHFGDQEPVQGFVMNFSNGEIIDIFKPVRKHFDMPHDIVASEDGTVYIGDAHTNTVWKFTLTEKLEHRSVKKAGIEVQEIKEAEAVVETKMENKPTSSELQKMQEKQKLIKEPGSGVPVVLITTLLVIPVVVLLAIAIFIRWKKSRAFGADSEHKLETSSGRVLGRFRGKGSGGLNLGNFFASRKGYSRKGFDRLSTEGSDQEKEDDGSESEEEYSAPLPALAPSSS

SEQ ID NO: 4398 - protein, 478 aa, Homo sapiens
MATDSWALAVDEQEAAVKSMTNLQIKEEKVKADTNGIIKTSTTAEKTDEEEKEDRAAQSLLNKLIRSNLVDNTNQVEVLQRDPNSPLYSVKSFEELRLKPQLLQGVYAMGFNRPSKIQENALPMMLAEPPQNLIAQSQSGTGKTAAFVLAMLSRVEPSDRYPQCLCLSPTYELALQTGKVIEQMGKFYPELKLAYAVRGNKLERGQKISEQIVIGTPGTVLDWCSKLKFIDPKKIKVFVLDEADVMIATQGHQDQSIRIQRMLPRNCQMLLFSATFEDSVWKFAQKVVPDPNVIKLKREEETLDTIKQYYVLCSSRDEKFQALCNLYGAITIAQAMIFCHTRKTASWLAAELSKEGHQVALLSGEMMVEQRAAVIERFREGKEKVLVTTNVCARGIDVEQVSVVINFDLPVDKDGNPDNETYLHRIGRTGRFGKRGLAVNMVDSKHSMNILNRIQEHFNKKIERLDTDDLDEIEKIAN

SEQ ID NO: 4399 - protein, 730 aa, Homo sapiens
MPGVARLPLLLGLLLLPRPGRPLDLADYTYDLAEEDDSEPLNYKDPCKAAAFLGDIALDEEDLRAFQVQQAVDLRRHTARKSSIKAAVPGNTSTPSCQSTNGQPQRGACGRWRGRSRSRRAATSRPERVWPDGVIPFVIGGNFTGSQRAVFRQAMRHWEKHTCVTFLERTDEDSYIVFTYRPCGCCSYVGRRGGGPQAISIGKNCDKFGIVVHELGHVVGFWHEHTRPDRDRHVSIVRENIQPGQEYNFLKMEPQEVESLGETYDFDSIMHYARNTFSRGIFLDTIVPKYEVNGVKPPIGQRTRLSKGDIAQARKLYKCPACGETLQDSTGNFSSPEYPNGYSAHMHCVWRISVTPGEKIILNFTSLDLYRSRLCWYDYVEVRDGFWRKAPLRGRFCGSKLPEPIVSTDSRLWVEFRSSSNWVGKGFFAVYEAICGGDVKKDYGHIQSPNYPDDYRPSKVCIWRIQVSEGFHVGLTFQSFEIERHDSCAYDYLEVRDGHSESSTLIGRYCGYEKPDDIKSTSSRLWLKFVSDGSINKAGFAVNFFKEVDECSRPNRGGCEQRCLNTLGSYKCSCDPGYELAPDKRRCEAACGGFLTKLNGSITSPGWPKEYPPNKNCIWQLVAPTQYRISLQFDFFETEGNDVCKYDFVEVRSGLTADSKLHGKFCGSEKPEVITSQYNNMRVEFKSDNTVSKKGFKAHFFSEKRPALQPPRGRPHQLKFRVQKRNRTPQ

SEQ ID NO: 4400 - protein, 1393 aa, Homo sapiens
MLSRPKPGESEVDLLHFQSQFLAAGAAPAVQLVKKGNRGGGDANSDRPPLQDHRDVVMLDNLPDLPPALVPSPPKRARPSPGHCLPEDEDPEERLRRHDQHITAVLTKIIERDTSSVAVNLPVPSGVAFPAVFLRSRDTQGKSATSGKRSIFAQEIAARRIAEAKGPSVGEVVPNVGPPEGAVTCETPTPRNQGCQLPGSSHSFQGPNLVTGKGLRDQEAEQEAQTIHEENIARLQAMAPEEILQEQQRLLAQLDPSLVAFLRSHSHTQEQTGETASEEQRPGGPSANVTKEEPLMSAFASEPRKRDKLEPEAPALALPVTPQKEWLHMDTVELEKLHWTQDLPPVRRQQTQERMQARFSLQGELLAPDVDLPTHLGLHHHGEEAERAGYSLQELFHLTRSQVSQQRALALHVLAQVISRAQAGEFGDRLAGSVLSLLLDAGFLFLLRFSLDDRVDGVIATAIRALRALLVAPGDEELLDSTFSWYHGALTFPLMPSQEDKEDEDEDEECPAGKAKRKSPEEESRPPPDLARHDVIKGLLATSLLPRLRYVLEVTYPGPAVVLDILAVLIRLARHSLESATRVLECPRLIETIVREFLPTSWSPVGAGPTPSLYKVPCATAMKLLRVLASAGRNIAARLLSSFDLRSRLCRIIAEAPQELALPPEEAEMLSTEALRLWAVAASYGQGGYLYRELYPVLMRALQVVPRELSTHPPQPLSMQRIASLLTLLTQLTLAAGSTPAETISDSAEASLSATPSLVTWTQVSGLQPLVEPCLRQTLKLLSRPEMWRAVGPVPVACLLFLGAYYQAWSQQPSSCPEDWLQDMQRLSEELLLPLLSQPTLGSLWDSLRHCSLLCNPLSCVPALEAPPSLVSLGCSGGCPRLSLAGSASPFPFLTALLSLLNTLAQIHKGLCGQLAAILAAPGLQNYFLQCVAPGAAPHLTPFSAWALRHEYHLQYLALALAQKAAALQPLPATHAALYHGMALALLSRLLPGSEYLTHELLLSCVFRLEFLPERTSGGPEAADFSDQLSLGSSRVPRCGQGTLLAQACQDLPSIRNCYLTHCSPARASLLASQALHRGELQRVPTLLLPMPTEPLLPTDWPFLPLIRLYHRASDTPSGLSPTDTMGTAMRVLQWVLVLESWRPQALWAVPPAARLARLMCVFLVDSELFRESPVQHLVAALLAQLCQPQVLPNLNLDCRLPGLTSFPDLYANFLDHFEAVSFGDHLFGALVLLPLQRRFSVTLRLALFGEHVGALRALSLPLTQLPVSLECYTVPPEDNLALLQLYFRTLVTGALRPRWCPVLYAVAVAHVNSFIFSQDPQSSDEVKAARRSMLQKTWLLADEGLRQHLLHYKLPNSTLPEGFELYSQLPPLRQHYLQRLTSTVLQNGVSET

SEQ ID NO: 4401 - protein, 737 aa, Homo sapiens
MVVFNGLLKIKICEAVSLKPTAWSLRHAVGPRPQTFLLDPYIALNVDDSRIGQTATKQKTNSPAWHDEFVTDVCNGRKIELAVFHDAPIGYDDFVANCTIQFEELLQNGSRHFEDWIDLEPEGRVYVIIDLSGSSGEAPKDNEERVFRERMRPRKRQGAVRRRVHQVNGHKFMATYLRQPTYCSHCRDFIWGVIGKQGYQCQVCTCVVHKRCHELIITKCAGLKKQETPDQVGSQRFSVNMPHKFGIHNYKVPTFCDHCGSLLWGLLRQGLQCKVCKMNVHRRCETNVAPNCGVDARGIAKVLADLGVTPDKITNSGQRRKKLIAGAESPQPASGSSPSEEDRSKSAPTSPCDQEIKELENNIRKALSFDNRGEEHRAASSPDGQLMSPGENGEVRQGQAKRLGLDEFNFIKVLGKGSFGKVMLAELKGKDEVYAVKVLKKDVILQDDDVDCTMTEKRILALARKHPYLTQLYCCFQTKDRLFFVMEYVNGGDLMFQIQRSRKFDEPRSRFYAAEVTSALMFLHQHGVIYRDLKLDNILLDAEGHCKLADFGMCKEGILNGVTTTTFCGTPDYIAPEILQELEYGPSVDWWALGVLMYEMMAGQPPFEADNEDDLFESILHDDVLYPVWLSKEAVSILKAFMTKNPHKRLGCVASQNGEDAIKQHPFFKEIDWVLLEQKKIKPPFKPRIKTKRDVNNFDQDFTREEPVLTLVDEAIVKQINQEEFKGFSYFGEDLMP

SEQ ID NO: 4402 - protein, 1212 aa, Homo sapiens
MVLLLILSVLLLKEDVRGSAQSSERRVVAHMPGDIIIGALFSVHHQPTVDKVHERKCGAVREQYGIQRVEAMLHTLERINSDPTLLPNITLGCEIRDSCWHSAVALEQSIEFIRDSLISSEEEEGLVRCVDGSSSSFRSKKPIVGVIGPGSSSVAIQVQNLLQLFNIPQIAYSATSMDLSDKTLFKYFMRVVPSDAQQARAMVDIVKRYNWTYVSAVHTEGNYGESGMEAFKDMSAKEGICIAHSYKIYSNAGEQSFDKLLKKLTSHLPKARVVACFCEGMTVRGLLMAMRRLGLAGEFLLLGSDGWADRYDVTDGYQREAVGGITIKLQSPDVKWFDDYYLKLRPETNHRNPWFQEFWQHRFQCRLEGFPQENSKYNKTCNSSLTLKTHHVQDSKMGFVINAIYSMAYGLHNMQMSLCPGYAGLCDAMKPIDGRKLLESLMKTNFTGVSGDTILFDENGDSPGRYEIMNFKEMGKDYFDYINVGSWDNGELKMDDDEVWSKKSNIIRSVCSEPCEKGQIKVIRKGEVSCCWTCTPCKENEYVFDEYTCKACQLGSWPTDDLTGCDLIPVQYLRWGDPEPIAAVVFACLGLLATLFVTVVFIIYRDTPVVKSSSRELCYIILAGICLGYLCTFCLIAKPKQIYCYLQRIGIGLSPAMSYSALVTKTNRIARILAGSKKKICTKKPRFMSACAQLVIAFILICIQLGIIVALFIMEPPDIMHDYPSIREVYLICNTTNLGVVTPLGYNGLLILSCTFYAFKTRNVPANFNEAKYIAFTMYTTCIIWLAFVPIYFGSNYKIITMCFSVSLSATVALGCMFVPKVYIILAKPERNVRSAFTTSTVVRMHVGDGKSSSAASRSSSLVNLWKRRGSSGETLRYKDRRLAQHKSEIECFTPKGSMGNGGRATMSSSNGKSVTWAQNEKSSRGQHLWQRLSIHINKKENPNQTAVIKPFPKSTESRGLGAGAGAGGSAGGVGATGGAGCAGAGPGGPESPDAGPKALYDVAEAEEHFPAPARPRSPSPISTLSHRAGSASRTDDDVPSLHSEPVARSSSSQGSLMEQISSVVTRFTANISELNSMMLSTAAPSPGVGAPLCSSYLIPKEIQLPTTMTTFAEIQPLPAIEVTGGAQPAAGAQAAGDAARESPAAGPEAAAAKPDLEELVALTPPSPFRDSVDSGSTTPNSPVSESALCIPSSPKYDTLIIRDYTQSSSSL

SEQ ID NO: 4403 - protein, 459 aa, Homo sapiens
MTILGTTFGMVFSLLQVVSGESGYAQNGDLEDAELDDYSFSCYSQLEVNGSQHSLTCAFEDPDVNITNLEFEICGALVEVKCLNFRKLQEIYFIETKKFLLIGKSNICVKVGEKSLTCKKIDLTTIVKPEAPFDLSVVYREGANDFVVTFNTSHLQKKYVKVLMHDVAYRQEKDENKWTHVNLSSTKLTLLQRKLQPAAMYEIKVRSIPDHYFKGFWSEWSPSYYFRTPEINNSSGEMDPILLTISILSFFSVALLVILACVLWKKRIKPIVWPSLPDHKKTLEHLCKKPRKNLNVSFNPESFLDCQIHRVDDIQARDEVEGFLQDTFPQQLEESEKQRLGGDVQSPNCPSEDVVITPESFGRDSSLTCLAGNVSACDAPILSSSRSLDCRESGKNGPHVYQDLLLSLGTTNSTLPPPFSLQSGILTLNPVAQGQPILTSLGSNQEEAYVTMSSFYQNQ

SEQ ID NO: 4404 - protein, 335 aa, Homo sapiens
MDPKGLLSLTFVLFLSLAFGASYGTGGRMMNCPKILRQLGSKVLLPLTYERINKSMNKSIHIVVTMAKSLENSVENKIVSLDPSEAGPPRYLGDRYKFYLENLTLGIRESRKEDEGWYLMTLEKNVSVQRFCLQLRLYEQVSTPEIKVLNKTQENGTCTLILGCTVEKGDHVAYSWSEKAGTHPLNPANSSHLLSLTLGPQHADNIYICTVSNPISNNSQTFSPWPGCRTDPSETKPWAVYAGLLGGVIMILIMVVILQLRRRGKTNHYQTTVEKKSLTIYAQVQKPGPLQKKLDSFPAQDPCTTIYVAATEPVPESVQETNSITVYASVTLPES

SEQ ID NO: 4405 - protein, 131 aa, Homo sapiens
MAPSLWKGLVGIGLFALAHAAFSAAQHRSYMRLTEKEDESLPIDIVLQTLLAFAVTCYGIVHIAGEFKDMDATSELKNKTFDTLRNHPSFYVFNHRGRVLFRPSDTANSSNQDALSSNTSLKLRKLESLRR

SEQ ID NO: 4406 - protein, 240 aa, Homo sapiens [sequence omitted]

SEQ ID NO: 4407 - protein, 380 aa, Homo sapiens
MMFSGFNADYEASSSRCSSASPAGDSLSYYHSPADSFSSMGSPVNAQDFCTDLAVSSANFIPTVTAISTSPDLQWLVQPALVSSVAPSQTRAPHPFGVPAPSAGAYSRAGVVKTMTGGRAQSIGRRGKVEQLSPEEEEKRRIRRERNKMAAAKCRNRRRELTDTLQAETDQLEDEKSALQTEIANLLKEKEKLEFILAAHRPACKIPDDLGFPEEMSVASLDLTGGLPEVATPESEEAFTLPLLNDPEPKPSVEPVKSISSMELKTEPFDDFLFPASSRPSGSETARSVPDMDLSGSFYAADWEPLHSGSLGMGPMATELEPLCTPVVTCTPSCTAYTSSFVFTYPEADSFPSCAAAHRKGSSSNEPSSDSLSSPTLLAL

SEQ ID NO: 4408 - protein, 394 aa, Homo sapiens
MKRQNVRTLALIVCTFTYLLVGAAVFDALESEPELIERQRLELRQQELRARYNLSQGGYEELERVVLRLKPHKAGVQWRFAGSFYFAITVITTIGYGHAAPSTDGGKVFCMFYALLGIPLTLVMFQSLGERINTLVRYLLHRAKKGLGMRRADVSMANMVLIGFFSCISTLCIGAAAFSHYEHWTFFQAYYYCFITLTTIGFGDYVALQKDQALQTQPQYVAFSFVYILTGLTVIGAFLNLVVLRFMTMNAEDEKRDAEHRALLTRNGQAGGGGGGGSAHTTDTASSTAAAGGGGFRNVYAEVLHFQSMCSCLWYKSREKLQYSIPMIIPRDLSTSDTCVEQSHSSPGGGGRYSDTPSRRCLCSGAPRSAISSVSTGLHSLSTFRGLMKRRSSV

SEQ ID NO: 4409 - protein, 581 aa, Homo sapiens
MPLKHYLLLLVGCQAWGAGLAYHGCPSECTCSRASQVECTGARIVAVPTPLPWNAMSLQILNTHITELNESPFLNISALIALRIEKNELSRITPGAFRNLGSLRYLSLANNKLQVLPIGLFQGLDSLESLLLSSNQLLQIQPAHFSQCSNLKELQLHGNHLEYIPDGAFDHLVGLTKLNLGKNSLTHISPRVFQHLGNLQVLRLYENRLTDIPMGTFDGLVNLQELALQQNQIGLLSPGLFHNNHNLQRLYLSNNHISQLPPSVFMQLPQLNRLTLFGNSLKELSPGIFGPMPNLRELWLYDNHISSLPDNVFSNLRQLQVLILSRNQISFISPGAFNGLTELRELSLHTNALQDLDGNVFRMLANLQNISLQNNRLRQLPGNIFANVNGLMAIQLQNNQLENLPLGIFDHLGKLCELRLYDNPWRCDSDILPLRNWLLLNQPRLGTDTVPVCFSPANVRGQSLIIINVNVAVPSVHVPEVPSYPETPWYPDTPSYPDTTSVSSTTELTSPVEDYTDLTTIQVTDDRSVWGMTQAQSGLAIAAIVIGIVALACSLAACVGCCCCKKRSQAVLMQMKAPNEC

SEQ ID NO: 4410 - protein, 640 aa, Homo sapiens
MGQPSLTWMLMVVVASWFITTAATDTSEARWCSECHSNATCTEDEAVTTCTCQEGFTGDGLTCVDLDECAIPGAHNCSANSSCVNTPGSFSCVCPEGFRLSPGLGCTDVDECAEPGLSHCHALATCVNVVGSYLCVCPAGYRGDGWHCECSPGSCGPGLDCVPEGDALVCADPCQAHRTLDEYWRSTEYGEGYACDTDLRGWYRFVGQGGARMAETCVPVLRCNTAAPMWLNGTHPSSDEGIVSRKACAHWSGHCCLWDASVQVKACAGGYYVYNLTAPPECHLAYCTDPSSVEGTCEECSIDEDCKSNNGRWHCQCKQDFNITDISLLEHRLECGANDMKVSLGKCQLKSLGFDKVFMYLSDSRCSGFNDRDNRDWVSVVTPARDGPCGTVLTRNETHATYSNTLYLADEIIIRDLNIKINFACSYPLDMKVSLKTALQPMVSALNIRVGGTGMFTVRMALFQTPSYTQPYQGSSVTLSTEAFLYVGTMLDGGDLSRFALLMTNCYATPSSNATDPLKYFIIQDRCPHTRDSTIQVVENGESSQGRFSVQMFRFAGNYDLVYLHCEVYLCDTMNEKCKPTCSGTRFRSGSVIDQSRVLNLGPITRKGVQATVSRAFSSLGLLKVWLPLLLSATLTLTFQ

SEQ ID NO: 4411 - protein, 590 aa, Homo sapiens
MEPRAGCRLPVRVEQVVNGALVVTVSCGERSFAGILLDCTKKSGLFGLPPLAPLPQVDESPVNDSHGRAPEEGDAEVMQLGSSSPPPARGVQPPETTRPEPPPPLVPPLPAGSLPPYPPYFEGAPFPHPLWLRDTYKLWVPQPPPRTIKRTRRRLSRNRDPGRLILSTIRLRPRQVLCEKCKSTLSPPEASPGPPAAPRARRRLGSGPDRELRKPEEPENGEPTAAATARRSKRERREEDRAPAEQVPRSPVIKISYSTPQGKGEVVKIPSRVHGSLEPFRPQQAPQDDGSQDPEVLDRESRDRPSCAPSASIPKLKLTRPVPAGADLPPPKIRLKPHRLGDSEHEPVYRAELVGELNGYLRDSSPAPCADGPAGGLADLSSGSSGEDDDFKSCPQGPQGREGLAFLVSCPEGRADCASESACSSDSLDEARSSGSEGTPADTGDLSPGHGASAPSVSREARQTVPPLTVRLHTQSVSECITEDGRTVAVGDIVWGKIHGFPWWPARVLDISLGQKEDGEPSWREAKVSWFGSPTTSFLSISKLSPFSEFFKLRFNRKKKGMYRKAITEAANAARHVAPEIRELLTQFET

SEQ ID NO: 4412 - protein, 247 aa, Homo sapiens
MVDREQLVQKARLAEQAERYDDMAAAMKNVTELNEPLSNEERNLLSVAYKNVVGARRSSWRVISSIEQKTSADGNEKKIEMVRAYREKIEKELEAVCQDVLSLLDNYLIKNCSETQYESKVFYLKMKGDYYRYLAEVATGEKRATVVESSEKAYSEAHEISKEHMQPTHPIRLGLALNYSVFYYEIQNAPEQACHLAKTAFDDAIAELDTLNEDSYKDSTLIMQLLRDNLTLWTSDQQDDDGGEGNN

SEQ ID NO: 4413 - protein, 458 aa, Homo sapiens
MAALSKSIPHNCYEIGHTWHPSCRVSFLQITGGALEESLKIYAPLYLIAAILRKRKLDYYLHKLLPEILQSASFLTANGALYMAFFCILRKILGKFYSWTPGFGAALPASYVAILIERKSRRGLLTIYMANLATETLFRMGVARGTITTLRNGEVLLFCITAAMYMFFFRCKDGLKGFTFSALRFIVGKEEIPTHSFSPEAAYAKVEQKREQHEEKPGRMNMIGLVRKFVDSICKHGPRHRCCKHYEDNCISYCIKGFIRMFSVGYLIQCCLRIPSAFRHLFTQPSRLLSLFYNKENFQLGAFLGSFVSIYKGTSCFLRWIRNLDDELHAIIAGFLAGISMMFYKSTTISMYLASKLVETMYFKGIEAGKVPYFPHADTIIYSISTAICFQAAVMEVQTLRPSYWKFLLRLTKGKFAVMNRKVLDVFGTGASKHFQDFIPRLDPRYTTVTPELPTEFS

SEQ ID NO: 4414 - protein, 589 aa, Homo sapiens
MSVSVHENRKSRASSGSINIYLFHKSSYADSVLTHLNLLRQQRLFTDVLLHAGNRTFPCHRAVLAACSRYFEAMFSGGLKESQDSEVNFDNSIHPEVLELLLDYAYSSRVIINEENAESLLEAGDMLEFQDIRDACAEFLEKNLHPTNCLGMLLLSDAHQCTKLYELSWRMCLSNFQTIRKNEDFLQLPQDMVVQLLSSEELETEDERLVYESAINWISYDLKKRYCYLPELLQTVRLALLPAIYLMENVAMEELITKQRKSKEIVEEAIRCKLKILQNDGVVTSLCARPRKTGHALFLLGGQTFMCDKLYLVDQKAKEIIPKADIPSPRKEFSACAIGCKVYITGGRGSENGVSKDVWVYDTLHEEWSKAAPMLVARFGHGSAELKHCLYVVGGHTAATGCLPASPSVSLKQVEHYDPTINKWTMVAPLREGVSNAAVVSAKLKLFAFGGTSVSHDKLPKVQCYDQCENRWTVPATCPQPWRYTAAAVLGNQIFIMGGDTEFSACSAYKFNSETYQWTKVGDVTAKRMSCHAVASGNKLYVVGGYFGIQRCKTLDCYDPTLDVWNSITTVPYSLIPTAFVSTWKHLPS

SEQ ID NO: 4415 - protein, 1136 aa, Homo sapiens
MAKMEVKTSLLDNMIGVGDMVLLEPLNEETFINNLKKRFDHSEIYTYIGSVVISVNPYRSLPIYSPEKVEEYRNRNFYELSPHIFALSDEAYRSLRDQDKDQCILITGESGAGKTEASKLVMSYVAAVCGKGAEVNQVKEQLLQSNPVLEAFGNAKTVRNDNSSRFGKYMDIEFDFKGDPLGGVISNYLLEKSRVVKQPRGERNFHVFYQLLSGASEELLNKLKLERDFSRYNYLSLDSAKVNGVDDAANFRTVRNAMQIVGFMDHEAESVLAVVAAVLKLGNIEFKPESRVNGLDESKIKDKNELKEICELTGIDQSVLERAFSFRTVEAKQEKVSTTLNVAQAYYARDALAKNLYSRLFSWLVNRINESIKAQTKVRKKVMGVLDIYGFEIFEDNSFEQFIINYCNEKLQQIFIELTLKEEQEEYIREDIEWTHIDYFNNAIICDLIENNTNGILAMLDEECLRPGTVTDETFLEKLNQVCATHQHFESRMSKCSRFLNDTSLPHSCFRIQHYAGKVLYQVEGFVDKNNDLLYRDLSQAMWKASHALIKSLFPEGNPAKINLKRPPTAGSQFKASVATLMKNLQTKNPNYIRCIKPNDKKAAHIFNEALVCHQIRYLGLLENVRVRRAGYAFRQAYEPCLERYKMLCKQTWPHWKGPARSGVEVLFNELEIPVEEYSFGRSKIFIRNPRTLFKLEDLRKQRLEDLATLIQKIYRGWKCRTHFLLMKKSQIVIAAWYRRYAQQKRYQQTKSSALVIQSYIRGWKARKILRELKHQKRCKEAVTTIAAYWHGTQARRELRRLKEEARNKHAIAVIWAYWLGSKARRELKRLKEEARRKHAVAVIWAYWLGLKVRREYRKFFRANAGKKIYEFTLQRIVQKYFLEMKNKMPSLSPIDKNWPSRPYLFLDSTHKELKRIFHLWRCKKYRDQFTDQQKLIYEEKLEASELFKDKKALYPSSVGQPFQGAYLEINKNPKYKKLKDAIEEKIIIAEVVNKINRANGKSTSRIFLLTNNNLLLADQKSGQIKSEVPLVDVTKVSMSSQNDGFFAVHLKEGSEAASKGDFLFSSDHLIEMATKLYRTTLSQTKQKLNIEISDEFLVQFRQDKVCVKFIQGNQKNGSVPTCKRKNNRLLEVAVP

SEQ ID NO: 4416 - protein, 290 aa, Homo sapiens
MRRPAAVPLLLLLCFGSQRAKAATACGRPRMLNRMVGGQDTQEGEWPWQVSIQRNGSHFCGGSLIAEQWVLTAAHCFRNTSETSLYQVLLGARQLVQPGPHAMYARVRQVESNPLYQGTASSADVALVELEAPVPFTNYILPVCLPDPSVIFETGMNCWVTGWGSPSEEDLLPEPRILQKLAVPIIDTPKCNLLYSKDTEFGYQPKTIKNDMLCAGFEEGKKDACKGDSGGPLVCLVGQSWLQAGVISWGEGCARQNRPGVYIRVTAHHNWIHRIIPKLQFQPARLGGQK

SEQ ID NO: 4417 - protein, 235 aa, Homo sapiens
LALPAGPAEAACALCQRAPREPVRADCGHRFCRACVVRFWAEEDGPFPCPECADDCWQRAVEPGRPPLSRRLLALEEAAAAPARDGPASEAALQLLCRADAGPLCAACRMAAGPEPPEWEPRWRKALRGKENKGSVEIMRKDLNDARDLHGQAESAAAVWKGHVMDRRKKALTDYKKLRAFFVEEEEHFLQEAEKEEGLPEDELADPTERFRSLLQAVSELEKKHRNLGLSMLLQ

SEQ ID NO: 4418 - protein, 274 aa, Homo sapiens
MLSVASRSGPFAPVLSATSRGVAGALRPLVQATVPATPEQPVLDLKRPFLSRESLSGQAVRRPLVASVGLNVPASVCYSHTDIKVPDFSEYRRLEVLDSTKSSRESSEARKGFSYLVTGVTTVGVAYAAKNAVTQFVSSMSASADVLALAKIEIKLSDIPEGKNMAFKWRGKPLFVRHRTQKEIEQEAAVELSQLRDPQHDLDRVKKPEWVILIGVCTHLGCVPIANAGDFGGYYCPCHGSHYDASGRIRLGPAPLNLEVPTYEFTSDDMVIVG

SEQ ID NO: 4419 - protein, 613 aa, Homo sapiens
MRAPGALLARMSRLLLLLLLKVSASSALGVAPASRNETCLGESCAPTVIQRRGRDAWGPGNSARDVLRARAPREEQGAAFLAGPSWDLPAAPGRDPAAGRGAEASAAGPPGPPTRPPGPWRWKGARGQEPSETLGRGNPTALQLFLQISEEEEKGPRGAGISGRSQEQSVKTVPGASDLFYWPRRAGKLQGSHHKPLSKTANGLAGHEGWTIALPGRALAQNGSLGEGIHEPGGPRRGNSTNRRVRLKNPFYPLTQESYGAYAVMCLSVVIFGTGIIGNLAVMCIVCHNYYMRSISNSLLANLAFWDFLIIFFCLPLVIFHELTKKWLLEDFSCKIVPYIEVASLGVTTFTLCALCIDRFRAATNVQMYYEMIENCSSTTAKLAVIWVGALLLALPEVVLRQLSKEDLGFSGRAPAERCIIKISPDLPDTIYVLALTYDSARLWWYFGCYFCLPTLFTITCSLVTARKIRKAEKACTRGNKRQIQLESQMNCTVVALTILYGFCIIPENICNIVTAYMATGVSQQTMDLLNIISQFLLFFKSCVTPVLLFCLCKPFSRAFMECCCCCCEECIQKSSTVTSDDNDNEYTTELELSPFSTIRREMSTFASVGTHC

SEQ ID NO: 4420 - protein, 523 aa, Homo sapiens
MSGARSKLALFLCGCYVVALGAHTGEESVADHHEAEYYVAAVYEHPSILSLNPLALISRQEALELMNQNLDIYEQQVMTAAQKDVQIIVFPEDGIHGFNFTRTSIYPFLDFMPSPQVVRWNPCLEPHRFNDTEVLQRLSCMAIRGDMFLVANLGTKEPCHSSDPRCPKDGRYQFNTNVVFSNNGTLVDRYRKHNLYFEAAFDVPLKVDLITFDTPFAGRFGIFTCFDILFFDPAIRVLRDYKVKHVVYPTAWMNQLPLLAAIEIQKAFAVAFGINVLAANVHHPVLGMTGSGIHTPLESFWYHDMENPKSHLIIAQVAKNPVGLIGAENATGETDPSHSKFLKILSGDPYCEKDAQEVHCDEATKWNVNAPPTFHSEMMYDNFTLVPVWGKEGYLHVCSNGLCCYLLYERPTLSKELYALGVFDGLHTVHGTYYIQVCALVRCGGLGFDTCGQEITEATGIFEFHLWGNFSTSYIFPLFLTSGMTLEVPDQLGWENDHYFLRKSRLSSGLVTAALYGRLYERD

SEQ ID NO: 4421 - protein, 229 aa, Homo sapiens
MAEEMESSLEASFSSSGAVSGASGFLPPARSRIFKIIVIGDSNVGKTCLTYRFCAGRFPDRTEATIGVDFRERAVEIDGERIKIQLWDTAGQERFRKSMVQHYYRNVHAVVFVYDMTNMASFHSLPSWIEECKQHLLANDIPRILVGNKCDLRSAIQVPTDLAQKFADTHSMPLFETSAKNPNDNDHVEAIFMTLAHKLKSHKPLMLSQPPDNGIILKPEPKPAMTCWC

SEQ ID NO: 4422 - protein, 99 aa, Homo sapiens
MTSKLAVALLAAFLISAALCEGAVLPRSAKELRCQCIKTYSKPFHPKFIKELRVIESGPHCANTEIIVKLSDGRELCLDPKENWVQRVVEKFLKRAENS

SEQ ID NO: 4423 - protein, 796 aa, Homo sapiens
MIPVAEFKQFTEQQPAFKVLKPWWDVLAEYLTVAMLMIGVFGCTLQVTQDKIICLPNHELQENLSEAPCQQLLPRGIPEQIGALQEVKGLKNNLDLQQYSFINQLCYETALHWYAKYFPYLVVIHTLIFMVCTSFWFKFPGTSSKIEHFISILGKCFDSPWTTRALSEVSGENQKGPAATERAAATIVAMAGTGPGKAGEGEKEKVLAEPEKVVTEPPVVTLLDKKEGEQAKALFEKVKKFRMHVEEGDILYTMYIRQTVLKVCKFLAILVYNLVYVEKISFLVACRVETSEVTGYASFCCNHTKAHLFSKLAFCYISFVCIYGLTCIYTLYWLFHRPLKEYSFRSVREETGMGDIPDVKNDFAFMLHLIDQYDSLYSKRFAVFLSEVSESRLKQLNLNHEWTPEKLRQKLQRNAAGRLELALCMLPGLPDTVFELSEVESLRLEAICDITFPPGLSQLVHLQELSLLHSPARLPFSLQVFLRDHLKVMRVKCEELREVPLWVFGLRGLEELHLEGLFPQELARAATLESLRELKQLKVLSLRSNAGKVPASVTDVAGHLQRLSLHNDGARLVALNSLKKLAALRELELVACGLERIPHAVFSLGALQELDLKDNHLRSIEEILSFQHCRKLVTLRLWHNQIAYVPEHVRKLRSLEQLYLSYNKLETLPSQLGLCSGLRLLDVSHNGLHSLPPEVGLLQNLQHLALSYNALEALPEELFFCRKLRTLLLGDNQLSQLSPHVGALRALSRLELKGNRLEALPEELGNCGGLKKAGLLVEDTLYQGLPAEVRDKMEEE

SEQ ID NO: 4424 - protein, 194 aa, Homo sapiens
MGANQLVVLNVYDMYWMNEYTSSIGIGVFHSGIEVYGREFAYGGHPYPFSGIFEISPGNASELGETFKFKEAVVLGSTDFLEDDIEKIVEELGKEYKGNAYHLMHKNCNHFSSALSEILCGKEIPRWINRLAYFSSCIPFLQSCLPKEWLTPAALQSSVSQELQDELEEAEDAAASASVASTAAGSRPGRHTKL

SEQ ID NO: 4425 - protein, 178 aa, Homo sapiens
MSSFSRAPQQWATFARIWYLLDGKMQPPGKLAAMASIRLQGLHKPVYHALSDCGDHVVIMNTRHIAFSGNKWEQKVYSSHTGYPGGFRQVTAAQLHLRDPVAIVKLAIYGMLPKNLHRRTMMERLHLFPDEYIPEDILKNLVEELPQPRKIPKRLDEYTQEEIDAFPRLWTPPEDYRL

SEQ ID NO: 4426 - protein, 430 aa, Homo sapiens
MLCSLLLCECLLLVAGYAHDDDWIDPTDMLNYDAASGTMRKSQAKYGISGEKDVSPDLSCADEISECYHKLDSLTYKIDECEKKKREDYESQSNPVFRRYLNKILIEAGKLGLLAFAQHQAEVAKMEPLNNVCAKKMDWTGSIWEWFRSSWTYKDDPCQKYYELLLVNPIWLVPPTKALAVTFTTFVTEPLKHIGKGTGEFIKALMKEIPALLHLPVLIIMALAILSFCYGAGKSVHVLRHIGGPESEPPQALRPRDRRRQEEIDYRPDGGAGDADFHYRGQMGPTEQGPYAKTYEGRREILRERDVDLRFQTGNKSPEVLRAFDVPDAEAREHPTVVPSHKSPVLDTKPKETGGILGEGTPKESSTESSQSAKPVSGQDTSGNTEGSPAAEKAQLKSEAAGSPDQGSTYSPARGVAGPRGQDPVSSPCG

SEQ ID NO: 4427 - protein, 159 aa, Homo sapiens
MAERPGPPGGAVSATAYPDTPAEFPPHLQAGAMRRRFWGVFNCLCAGAFGALAAASAKLAFGSEVSMGLCVLGIIVMASTNSLMWTFFSRGLSFSMSSAIASVTVTFSNILSSAFLGYVLYGECQEVLWWGGVFLILCGLTLIHRKLPPTWKPLPHKQQ

SEQ ID NO: 4428 - protein, 522 aa, Homo sapiens
MSFGASFVSFLNAMMTFEEEKMQLACDDLKTTEKLCESEEAGVIETIKNKIKKNVDVRKSAPSMVDRLQRQIIIADCQVYLAVLSFVKQELSAYIKGGWILRKAWKIYNKCYLDINALQELYQKKLTEESLTSDAANDNHIVAEGVSEESLNRLKGAVSFGYGLFHLCISMVPPNLLKIINLLGFPGDRLQGLSSLMYASESKDMKAPLATLALLWYHTVVRPFFALDGSDNKAGLDEAKEILLKKEAAYPNSSLFMFFKGRIQRLECQINSALTSFHTALELAVDQREIQHVCLYEIGWCSMIELNFKDAFDSFERLKNESRWSQCYYAYLTAVCQGATGDVDGAQIVFKEVQKLFKRKNNQIEQFSVKKAERFRKQTPTKALCVLASIEVLYLWKALPNCSFPNLQRMSQACHEVDDSSVVGLKYLLLGAIHKCLGNSEDAVQYFQRAVKDELCRQNNLYVQPYACYELGCLLLDKPETVGRGRALLLQAKEDFSGYDFENRLHVRIHAALASLRELVPQ

SEQ ID NO: 4429 - protein, 375 aa, Homo sapiens
MSTAGKVIKCKAAVLWEVKKPFSIEDVEVAPPKAYEVRIKMVAVGICHTDDHVVSGNLVTPLPVILGHEAAGIVESVGEGVTTVKPGDKVIPLFTPQCGKCRVCKNPESNYCLKNDLGNPRGTLQDGTRRFTCRGKPIHHFLGTSTFSQYTVVDENAVAKIDAASPLEKVCLIGCGFSTGYGSAVNVAKVTPGSTCAVFGLGGVGLSAVMGCKAAGAARIIAVDINKDKFAKAKELGATECINPQDYKKPIQEVLKEMTDGGVDFSFEVIGRLDTMMASLLCCHEACGTSVIVGVPPASQNLSINPMLLLTGRTWKGAVYGGFKSKEGIPKLVADFMAKKFSLDALITHVLPFEKINEGFDLLHSGKSIRTVLTF

SEQ ID NO: 4430 - protein, 177 aa, Homo sapiens
MAVANSSPVNPVVFFDVSIGGQEVGRMKIELFADVVPKTAENFRQFCTGEFRKDGVPIGYKGSTFHRVIKDFMIQGGDFVNGDGTGVASIYRGPFADENFKLRHSAPGLLSMANSGPSTNGCQFFITCSKCDWLDGKHVVFGKIIDGLLVMRKIENVPTGPNNKPKLPVVISQCGEM

SEQ ID NO: 4431 - protein, 468 aa, Homo sapiens
MAGVVHVSLAALLLLPMAPAMHSDCIFKKEQAMCLEKIQRANELMGFNDSSPGCPGMWDNITCWKPAHVGEMVLVSCPELFRIFNPDQVWETETIGESDFGDSNSLDLSDMGVVSRNCTEDGWSEPFPHYFDACGFDEYESETGDQDYYYLSVKALYTVGYSTSLVTLTTAMVILCRFRKLHCTRNFIHMNLFVSFMLRAISVFIKDWILYAEQDSNHCFISTVECKAVMVFFHYCVVSNYFWLFIEGLYLFTLLVETFFPERRYFYWYTIIGWGTPTVCVTVWATLRLYFDDTGCWDMNDSTALWWVIKGPVVGSIMVNFVLFIGIIVILVQKLQSPDMGGNESSIYLRLARSTLLLIPLFGIHYTVFAFSPENVSKRERLVFELGLGSFQGFVVAVLYCFLNGEVQAEIKRKWRSWKVNRYFAVDFKHRHPSLASSGVNGGTQLSILSKSSSQIRMSGLPADNLAT

SEQ ID NO: 4432 - protein, 647 aa, Homo sapiens
MAAPAGGGGSAVSVLAPNGRRHTVKVTPSTVLLQVLEDTCRRQDFNPCEYDLKFQRSVLDLSLQWRFANLPNNAKLEMVPASRSREGPENMVRIALQLDDGSRLQDSFCSGQTLWELLSHFPQIRECLQHPGGATPVCVYTRDEVTGEAALRGTTLQSLGLTGGSATIRFVMKCYDPVGKTPGSLGSSASAGQAAASAPLPLESGELSRGDLSRPEDADTSGPCCEHTQEKQSTRAPAAAPFVPFSGGGQRLGGPPGPTRPLTSSSAKLPKSLSSPGGPSKPKKSKSGQDPQQEQEQERERDPQQEQERERPVDREPVDREPVVCHPDLEERLQAWPAELPDEFFELTVDDVRRRLAQLKSERKRLEEAPLVTKAFREAQIKEKLERYPKVALRVLFPDRYVLQGFFRPSETVGDLRDFVRSHLGNPELSFYLFITPPKTVLDDHTQTLFQPQLGDRVAPFTLGPSLKRCLGPEQRTRLPVVGDGGDVDSGRLLFWGPSRGRASPSTGQPPCHPVCRPSSPPSPRPSSGDPSRVKAGHKHVGTGRANLFPAALVHLGAEEPAGVYLEPGLLEHAISPSAADVLVARYMSRAAGSPSPLPAPDPAPKSEPAAEEGALVPPEPIPGTAQPVKRSLGKVPKWLKLPASKR

SEQ ID NO: 4433 - protein, 299 aa, Homo sapiens
MEHFDASLSTYFKALLGPRDTRVKGWFLLDNYIPTFICSVIYLLIVWLGPKYMRNKQPFSCRGILVVYNLGLTLLSLYMFCELVTGVWEGKYNFFCQGTRTAGESDMKIIRVLWWYYFSKLIEFMDTFFFILRKNNHQITVLHVYHHASMLNIWWFVMNWVPCGHSYFGATLNSFIHVLMYSYYGLSSVPSMRPYLWWKKYITQGQLLQFVLTIIQTSCGVIWPCTFPLGWLYFQIGYMISLIALFTNFYIQTYNKKGASRRKDHLKDHQNGSMAAVNGHTNSFSPLENNVKPRKLRKD

SEQ ID NO: 4434 - protein, 62 aa, Homo sapiens
MILANVFCLFFFLGPGPLLRRNGVQREKTCSYIQGRMMPEFSLGYEEGCPTESPWCALAKWV

SEQ ID NO: 4435 - protein, 211 aa, Homo sapiens
MSTAAVPELKQISRVEAMRLGPGWSHSCHAMLYAANPGQLFGRIPMRFSVLMQMRFDGLLGFPGGFVDRRFWSLEDGLNRVLGLGLGCLRLTEADYLSSHLTEGPHRVVAHLYARQLTLEQLHAVEISAVHSRDHGLEVLGLVRVPLYTQKDRVGGFPNFLSNAFVSTAKCQLLFALKVLNMMPEEKLVEALAAATEKQKKALEKLLPASS

SEQ ID NO: 4436 - protein, 518 aa, Homo sapiens
MALERLCSVLKVLLITVLVVEGIAVAQKTQDGQNIGIKHIPATQCGIWVRTSNGGHFASPNYPDSYPPNKECIYILEAAPRQRIELTFDEHYYIEPSFECRFDHLEVRDGPFGFSPLIDRYCGVKSPPLIRSTGRFMWIKFSSDEELEGLGFRAKYSFIPDPDFTYLGDCQFELSGADGIVRSSQVEQEEKTKPGQAVDCIWTIKATPKAKIYLRFLDYQMEHSNECKRNFVAVYDGSSSIENLKAKFCSTVANDVMLKTGIGVIRMWADEGSRLSRFRMLFTSFVEPPCTSSTFFCHSNMCINNSLVCNGVQNCAYPWDENHCKEKKKAGVFEQITKTHGTIIGITSGIVLVLLIISILVQVKQPRKKVMACKTAFNKTGFQEVFDPPHYELFSLRDKEISADLADLSEELDNYQKMRRSSTASRCIHDHHCGSQASSVKQSRTNLSSMELPFRNDFAQPQPMKTFNSTFKKSSYTFKQGHECPEQALEDRVMEEIPCEIYVRGREDSAQASISIDF

SEQ ID NO: 4437 - protein, 426 aa, Homo sapiens
MHALFADSFAALGRLDNITLVMVFHPQYLESFLKTQHYLLQMDGPLPLHYRHYIGIMAAARHQCSYLVNLHVNDFLHVGGDPKWLNGLENAPQKLQNLGELNKVLAHRPWLITKEHIEGLLKAEEHSWSLAELVHAVVLLTHYHSLASFTFGCGISPEIHCDGGHTFRPPSVSNYCICDITNGNHSVDEMPVNSAENVSVSDSFFEVEALMEKMRQLQECRDEEEASQEEMASRFEIEKRESMFVFSSDDEEVTPARAVSRHFEDTSYGYKDFSRHGMHVPTFRVQDYCWEDHGYSLVNRLYPDVGQLIDEKFHIAYNLTYNTMAMHKDVDTSMLRRAIWNYIHCMFGIRYDDYDYGEINQLLDRSFKVYIKTVVCTPEKVTKRMYDSFWRQFKHSEKVHVNLLLIEARMQAELLYALRAITRYMT

SEQ ID NO: 4438 - protein, 374 aa, Homo sapiens
MLLLLLLPLLWGRERVEGQKSNRKDYSLTMQSSVTVQEGMCVHVRCSFSYPVDSQTDSDPVHGYWFRAGNDISWKAPVATNNPAWAVQEETRDRFHLLGDPQTKNCTLSIRDARMSDAGRYFFRMEKGNIKWNYKYDQLSVNVTDPPQNLTVTVFQGEGTASTALGNSSSLSVLEGQSLRLVCAVDSNPPARLSWTWRSLTLYPSQPSNPLVLELQVHLGDEGEFTCRAQNSLGSQHVSLNLSLQQEYTGKMRPVSGVLLGAVGGAGATALVFLSFCVIFIVVRSCRKKSARPAADVGDIGMKDANTIRGSASQGNLTESWADDNPRHHGLAAHSSGEEREIQYAPLSFHKGEPQDLSGQEATNNEYSEIKIPK

SEQ ID NO: 4439 - protein, 373 aa, Homo sapiens
MSSTPHDPFYSSPFGPFYRRHTPYMVQPEYRIYEMNKRLQSRTEDSDNLWWDAFATEFFEDDATLTLSFCLEDGPKRYTIGRTLIPRYFSTVFEGGVTDLYYILKHSKESYHNSSITVDCDQCTMVTQHGKPMFTKVCTEGRLILEFTFDDLMRIKTWHFTIRQYRELVPRSILAMHAQDPQVLDQLSKNITRMGLTNFTLNYLRLCVILEPMQELMSRHKTYNLSPRDCLKTCLFQKWQRMVAPPAEPTRQPTTKRRKRKNSTSSTSNSSAGNNANSTGSKKKTTAANLSLSSQVPDVMVVGEPTLMGGEFGDEDERLITRLENTQYDAANGMDDEEDFNNSPALGNNSPWNSKPPATQETKSENPPPQASQ

SEQ ID NO: 4440 - protein, 669 aa, Homo sapiens
MALLLVSLLAFLSLGSGCHHRICHCSNRVFLCQESKVTEIPSDLPRNAIELRFVLTKLRVIQKGAFSGFGDLEKIEISQNDVLEVIEADVFSNLPKLHEIRIEKANNLLYINPEAFQNLPNLQYLLISNTGIKHLPDVHKIHSLQKVLLWLNKNGIQEIHNCAFNGTQLDELNLSDNNNLEELPNDVFHGASGPVILDISRTRIHSLPSYGLENLKKLRARSTYNLKKLPTLEKLVALMEASLTYPSHCCAFANWRRQISELHPICNKSILRQEVDYMTQARGQRSSLAEDNESSYSRGFDMTYTEFDYDLCNEVVDVTCSPKPDAFNPCEDIMGYNILRVLIWFISILAITGNIIVLVILTTSQYKLTVPRFLMCNLAFADLCIGIYLLLIASVDIHTKSQYHNYAIDWQTGAGCDAAGFFTVFASELSVYTLTAITLERWHTITHAMQLDCKVQLRHAASVMVMGWIFAFAAALFPIFGISSYMKVSICLPMDIDSPLSQLYVMSLLVLNVLAFVVICGCYIHIYLTVRNPNIVSSSSDTRIAKRMAMLIFTDFLCMAPISFFAISASLKVPLITVSKAKILLVLFHPINSCANPFLYAIFTKNFRRDFFILLSKCGCYEMQAQIYRTETSSTVHNTHPRNGHCSSAPRVTSGSTYILVPLSHLAQN

SEQ ID NO: 4441 - protein, 1145 aa, Homo sapiens
MTMYLWLKLLAFGFAFLDTEVFVTGQSPTPSPTDAYLNASETTTLSPSGSAVISTTTIATTPSKPTCDEKYANITVDYLYNKETKLFTAKLNVNENVECGNNTCTNNEVHNLTECKNASVSISHNSCTAPDKTLILDVPPGVEKFQLHDCTQVEKADTTICLKWKNIETFTCDTQNITYRFQCGNMIFDNKEIKLENLEPEHEYKCDSEILYNNHKFTNASKIIKTDFGSPGEPQIIFCRSEAAHQGVITWNPPQRSFHNFTLCYIKETEKDCLNLDKNLIKYDLQNLKPYTKYVLSLHAYIIAKVQRNGSAAMCHFTTKSAPPSQVWNMTVSMTSDNSMHVKCRPPRDRNGPHERYHLEVEAGNTLVRNESHKNCDFRVKDLQYSTDYTFKAYFHNGDYPGEPFILHHSTSYNSKALIAFLAFLIIVTSIALLVVLYKIYDLHKKRSCNLDEQQELVERDDEKQLMNVEPIHADILLETYKRKIADEGRLFLAEFQSIPRVFSKFPIKEARKPFNQNKNRYVDILPYDYNRVELSEINGDAGSNYINASYIDGFKEPRKYIAAQGPRDETVDDFWRMIWEQKATVIVMVTRCEEGNRNKCAEYWPSMEEGTRAFGDVVVKINQHKRCPDYIIQKLNIVNKKEKATGREVTHIQFTSWPDHGVPEDPHLLLKLRRRVNAFSNFFSGPIVVHCSAGVGRTGTYIGIDAMLEGLEAENKVDVYGYVVKLRRQRCLMVQVEAQYILIHQALVEYNQFGETEVNLSELHPYLHNMKKRDPPSEPSPLEAEFQRLPSYRSWRTQHIGNQEENKSKNRNSNVIPYDYNRVPLKHELEMSKESEHDSDESSDDDSDSEEPSKYINASFIMSYWKPEVMIAAQGPLKETIGDFWQMIFQRKVKVIVMLTELKHGDQEICAQYWGEGKQTYGDIEVDLKDTDKSSTYTLRVFELRHSKRKDSRTVYQYQYTNWSVEQLPAEPKELISMIQVVKQKLPQKNSSEGNKHHKSTPLLIHCRDGSQQTGIFCALLNLLESAETEEVVDIFQVVKALRKARPGMVSTFEQYQFLYDVIASTYPAQNGQVKKNNHQEDKIEFDNEVDKVKQDANCVNPLGAPEKLPEAKEQAEGSEPTSGTEGPEHSVNGPASPALNQGS

SEQ ID NO: 4442 - protein, 203 aa, Homo sapiens
MAEGDNRSTNLLAAETASLEEQLQGWGEVMLMADKVLRWERAWFPPAIMGVVSLVFLIIYYLDPSVLSGVSCFVMFLCLADYLVPILAPRIFGSNKWTTEQQQRFHEICSNLVKTRRRAVGWWKRLFTLKEEKPKMYFMTMIVSLAAVAWVGQQVHNLLLTYLIVTSLLLLPGLNQHGIILKYIGMAKREINKLLKQKEKKNE

SEQ ID NO: 4443 - protein, 362 aa, Homo sapiens
MQAERGARGGRGRRPGRGRPGGDRHSERPGAAAAVARGGGGGGGGDGGGRRGRGRGRGFRGARGGRGGGGAPRGSRREPGGWGAGASAPVEDDSDAETYGEENDEQGNYSKRKIVSNWDRYQDIEKEVNNESGESQRGTDFSVLLSSAGDSFSQFRFAEEKEWDSEASCPKQNSAFYVDSELLVRALQELPLCLRLNVAAELVQGTVPLEVPQVKPKRTDDGKGLGMQLKGPLGPGGRGPIFELKSVAAGCPVLLGKDNPSPGPSRDSQKPTSPLQSAGDHLEEELDLLLNLDAPIKEGDNILPDQTSQDLKSKEDGEVVQEEEVCAKPSVTEEKNMEPEQPSTSKNVTEEELEDWLDSMIS

SEQ ID NO: 4444 - protein, 833 aa, Homo sapiens
MAPHWAVWLLAARLWGLGIGAEVWWNLVPRKTVSSGELATVVRRFSQTGIQDFLTLTLTEPTGLLYVGAREALFAFSMEALELQGAISWEAPVEKKTECIQKGKNNQTECFNFIRFLQPYNASHLYVCGTYAFQPKCTYVNMLTFTLEHGEFEDGKGKCPYDPAKGHAGLLVDGELYSATLNNFLGTEPIILRNMGPHHSMKTEYLAFWLNEPHFVGSAYVPESVGSFTGDDDKVYFFFRERAVESDCYAEQVVARVARVCKGDMGGARTLQRKWTTFLKARLACSAPNWQLYFNQLQAMHTLQDTSWHNTTFFGVFQAQWGDMYLSAICEYQLEEIQRVFEGPYKEYHEEAQKWDRYTDPVPSPRPGSCINNWHRRHGYTSSLELPDNILNFVKKHPLMEEQVGPRWSRPLLVKKGTNFTHLVADRVTGLDGATYTVLFIGTGDGWLLKAVSLGPWVHLIEELQLFDQEPMRSLVLSQSKKLLFAGSRSQLVQLPVADCMKYRSCADCVLARDPYCAWSVNTSRCVAVGGHSGSLLIQHVMTSDTSGICNLRGSKKVRPTPKNITVVAGTDLVLPCHLSSNLAHARWTFGGRDLPAEQPGSFLYDARLQALVVMAAQPRHAGAYHCFSEEQGARLAAEGYLVAVVAGPSVTLEARAPLENLGLVWLAVVALGAVCLVLLLLVLSLRRRLREELEKGAKATERTLVYPLELPKEPTSPPFRPCPEPDEKLWDPVGYYYSDGSLKIVPGHARCQPGGGPPSPPPGIPGQPLPSPTRLHLGGGRNSNANGYVRLQLGGEDRGGLGHPLPELADELRRKLQQRQPLPDSNPEESSV

SEQ ID NO: 4445 - protein, 673 aa, Homo sapiens
MCSRVPLLLPLLLLLALGPGVQGCPSGCQCSQPQTVFCTARQGTTVPRDVPPDTVGLYVFENGITMLDAGSFAGLPGLQLLDLSQNQIASLPSGVFQPLANLSNLDLTANRLHEITNETFRGLRRLERLYLGKNRIRHIQPGAFDTLDRLLELKLQDNELRALPPLRLPRLLLLDLSHNSLLALEPGILDTANVEALRLAGLGLQQLDEGLFSRLRNLHDLDVSDNQLERVPPVIRGLRGLTRLRLAGNTRIAQLRPEDLAGLAALQELDVSNLSLQALPGDLSGLFPRLRLLAAARNPFNCVCPLSWFGPWVRESHVTLASPEETRCHFPPKNAGRLLLELDYADFGCPATTTTATVPTTRPVVREPTALSSSLAPTWLSPTEPATEAPSPPSTAPPTVGPVPQPQDCPPSTCLNGGTCHLGTRHHLACLCPEGFTGLYCESQMGQGTRPSPTPVTPRPPRSLTLGIEPVSPTSLRVGLQRYLQGSSVQLRSLRLTYRNLSGPDKRLVTLRLPASLAEYTVTQLRPNATYSVCVMPLGPGRVPEGEEACGEAHTPPAVHSNHAPVTQAREGNLPLLIAPALAAVLLAALAAVGAAYCVRRGRAMAAAAQDKGQVGPGAGPLELEGVKVPLEPGPKATEGGGEALPSGSECEVPLMGFPGPGLQSPLHAKPYI

SEQ ID NO: 4446 - protein, 117 aa, Homo sapiens
MKFVYKEEHPFEKRRSEGEKIRKKYPDRVPVIVEKAPKARIGDLDKKKYLVPSDLTVGQFYFLIRKRIHLRAEDALFFFVNNVIPPTSATMGQLYQEHHEEDFFLYIAYSDESVYGL

SEQ ID NO: 4447 - protein, 499 aa, Homo sapiens
MAQGLVTFRDVAIEFSLEEWKCLEPAQRDLYREVTLENFGHLASLGLSISKPDVVSLLEQGKEPWMIANDVTGPWCPDLESRCEKFLQKDIFEIGAFNWEIMESLKCSDLEGSDFRADWECEGQFERQVNEECYFKQVNVTYGHMPVFQHHTSHTVRQSRETGEKLMECHECGKAFSRGSHLIQHQKIHTGEKPFGCKECGKAFSRASHLVQHQRIHTGEKPYDCKDCGKAFGRTSELILHQRLHTGVKPYECKECGKTFRQHSQLILHQRTHTGEKPYVCKDCGKAFIRGSQLTVHRRIHTGARPYECKECGKAFRQHSQLTVHQRIHTGEKPYECKECGKGFIHSSEVTRHQRIHSGEKPYECKECGKAFRQHAQLTRHQRVHTGDRPYECKDCGKAFSRSSYLIQHQRIHTGDKPYECKECGKAFIRVSQLTHHQRIHTCEKPYECRECGMAFIRSSQLTEHQRIHPGIKPYECRECGQAFILGSQLIEHYRIHTG

SEQ ID NO: 4448 - protein, 765 aa, Homo sapiens
MTTYLEFIQQNEERDGVRFSWNVWPSSRLEATRMVVPVAALFTPLKERPDLPPIQYEPVLCSRTTCRAVLNPLCQVDYRAKLWACNFCYQRNQFPPSYAGISELNQPAELLPQFSSIEYVVLRGPQMPLIFLYVVDTCMEDEDLQALKESMQMSLSLLPPTALVGLITFGRMVQVHELGCEGISKSYVFRGTKDLSAKQLQEMLGLSKVPLTQATRGPQVQQPPPSNRFLQPVQKIDMNLTDLLGELQRDPWPVPQGKRPLRSSGVALSIAVGLLECTFPNTGARIMMFIGGPATQGPGMVVGDELKTPIRSWHDIDKDNAKYVKKGTKHFEALANRAATTGHVIDIYACALDQTGLLEMKCCPNLTGGYMVMGDSFNTSLFKQTFQRVFTKDMHGQFKMGFGGTLEIKTSREIKISGAIGPCVSLNSKGPCVSENEIGTGGTCQWKICGLSPTTTLAIYFEVVNQHNAPIPQGGRGAIQFVTQYQHSSGQRRIRVTTIARNWADAQTQIQNIAASFDQEAAAILMARLAIYRAETEEGPDVLRWLDRQLIRLCQKFGEYHKDDPSSFRFSETFSLYPQFMFHLRRSSFLQVFNNSPDESSYYRHHFMRQDLTQSLIMIQPILYAYSFSGPPEPVLLDSSSILADRILLMDTFFQILIYHGETIAQWRKSGYQDMPEYENFRHLLQAPVDDAQEILHSRFPMPRYIDTEHGGSQARFLLSKVNPSQTHNNMYAWGQESGAPILTDDVSLQVFMDHLKKLAVSSAA

SEQ ID NO: 4449 - protein, 94 aa, Homo sapiens
MSVKGMAIALAVILCATVVQGFPMFKRGRCLCIGPGVKAVKVADIEKASIMYPSNNCDKIEVIITLKENKGQRCLNPKSKQARLIIKKVERKNF

SEQ ID NO: 4450 - protein, 195 aa, Homo sapiens
MENHKSNNKENITIVDISRKINQLPEAERNLLENGSVYVGLNAALCGLIANSLFRRILNVTKARIAAGLPMAGIPFLTTDLTYRCFVSFPLNTGDLDCETCTITRSGLTGLVIGGLYPVFLAIPVNGGLAARYQSALLPHKGNILSYWIRTSKPVFRKMLFPILLQTMFSAYLGSEQYKLLIKALQLSEPGKEIH

SEQ ID NO: 4451 - protein, 1308 aa, Homo sapiens
MGSVTGAVLKTLLLLSTQNWNRVEAGNSYDCDDPLVSALPQASFSSSSELSSSHGPGFARLNRRDGAGGWSPLVSNKYQWLQIDLGERMEVTAVATQGGYGSSNWVTSYLLMFSDSGWNWKQYRQEDSIWGFSGNANADSVVYYRLQPSIKARFLRFIPLEWNPKGRIGMRIEVFGCAYRSEVVDLDGKSSLLYRFDQKSLSPIKDIISLKFKTMQSDGILLHREGPNGDHITLQLRRARLFLLINSGEAKLPSTSTLVNLTLGSLLDDQHWHSVLIQRLGKQVNFTVDEHRHHFHARGEFNLMNLDYEISFGGIPAPGKSVSFPHRNFHGCLENLYYNGVDIIDLAKQQKPQIIAMGNVSFSCSQPQSMPVTFLSSRSYLALPDFSGEEEVSATFQFRTWNKAGLLLFSELQLISGGILLFLSDGKLKSNLYQPGKLPSDITAGVELNDGQWHSVSLSAKKNHLSVAVDGQMASAAPLLGPEQIYSGGTYYFGGCPDKSFGSKCKSPLGGFQGCMRLISISGKVVDLISVQQGSLGNFSDLQIDSCGISDRCLPNYCEHGGECSQSWSTFHCNCTNTGYRGATCHNSIYEQSCEAYKHRGNTSGFYYIDSDGSGPLEPFLLYCNMTETAWTIIQHNGSDLTRVRNTNPENPYAGFFEYVASMEQLQATINRAEHCEQEFTYYCKKSRLVNKQDGTPLSWWVGRTNETQTYWGGSSPDLQKCTCGLEGNCIDSQYYCNCDADRNEWTNDTGLLAYKEHLPVTKIVITDTGRLHSEAAYKLGPLLCQGDRSFWNSASFDTEASYLHFPTFHGELSADVSFFFKTTASSGVFLENLGIADFIRIELRSPTVVTFSFDVGNGPFEISVQSPTHFNDNQWHHVRVERNMKEASLQVDQLTPKTQPAPADGHVLLQLNSQLFVGGTATRQRGFLGCIRSLQLNGMTLDLEERAQVTPEVQPGCRGHCSSYGKLCRNGGKCRERPIGFFCDCTFSAYTGPFCSNEISAYFGSGSSVIYNFQENYLLSKNSSSHAASFHGDMKLSREMIKFSFRTTRTPSLLLFVSSFYKEYLSVIIAKNGDLQIRYKLNKYQEPDVVNFDFKNMADGQLHHIMINREEGVVFIEIDDNRRRQVHLSSGTEFSAVKSLVLGRILEHSDVDQDTALAGAQGFTGCLSAVQLSHVAPLKAALHPSHPDPVTVTGHVTESSCMAQPGTDATSRERTHSFADHSGTIDDREPLANAIKSDSAVIGGLIAVVIFILLCITAIAVRIYQQKRLYKRSEAKRSENVDSAEAVLKSELNIQNAVNENQKEYFF

SEQ ID NO: 4452 - protein, 510 aa, Homo sapiens
MDGFYDQQVPFMVPGKSRSEECRGRPVIDRKRKFLDTDLAHDSEELFQDLSQLQEAWLAEAQVPDDEQFVPDFQSDNLVLHAPPPTKIKRELHSPSSELSSCSHEQALGANYGEKCLYNYCAYDRKPPSGFKPLTPPTTPLSPTHQNPLFPPPQATLPTSGHAPAAGPVQGVGPAPAPHSLPEPGPQQQTFAVPRPPHQPLQMPKMMPENQYPSEQRFQRQLSEPCHPFPPQPGVPGDNRPSYHRQMSEPIVPAAPPPPQGFKQEYHDPLYEHGVPGMPGPPAHGFQSPMGIKQEPRDYCVDSEVPNCQSSYMRGGYFSSSHEGFSYEKDPRLYFDDTCVVPERLEGKVKQEPTMYREGPPYQRRGSLQLWQFLVTLLDDPANAHFIAWTGRGMEFKLIEPEEVARRWGIQKNRPAMNYDKLSRSLRYYYEKGIMQKVAGERYVYKFVCDPDALFSMAFPDNQRPFLKAESECHLSEEDTLPLTHFEDSPAYLLDMDRCSSLPYAEGFAY

SEQ ID NO: 4453 - protein, 176 aa, Homo sapiens
MRKHLSWWWLATVCMLLFSHLSAVQTRGIKHRIKWNRKALPSTAQITEAQVAENRPGAFIKQGRKLDIDFGAEGNRYYEANYWQFPDGIHYNGCSEANVTKEAFVTGCINATQAANQGEFQKPDNKLHQQVLWRLVQELCSLKHCEFWLERGAGLRVTMHQPVLLCLLALIWLTVK

SEQ ID NO: 4454 - protein, 153 aa, Homo sapiens
MASYFDEHDCEPSDPEQETRTNMLLELARSLFNRMDFEDLGLVVDWDHHLPPPAAKTVVENLPRTVIRGSQAELKCPVCLLEFEEEETAIEMPCHHLFHSSCILPWLSKTNSCPLCRYELPTDDDTYEEHRRDKARKQQQQHRLENLHGAMYT

SEQ ID NO: 4455 - protein, 938 aa, Homo sapiens
MLRKVRSWTEIWRWATLLFLFYHLGYVCGQIRYPVPEESQEGTFVGNVAQDFLLDTDSLSARRLQVAGEVNQRHFRVDLDSGALLIKNPIDREALCGLSASCIVPLEFVTEGPLEMYRAEVEIVDVNDHAPRFPRQQLDLEIGEAAPPGQRFPLEKAQDADVGSNSISSYRLSSNEHFALDVKKRSDGSLVPELLLEKPLDREKQSDYRLVLTAVDGGNPPRSGTAELRVSVLDVNDNAPAFQQSSYRISVLESAPAGMVLIQLNASDPDLGPSGNVTFYFSGHTPDRVRNLFSLHPTTGKLTLLGPLDFESENYYEFDVRARDGGSPAMEQHCSLRVDLLDVNDNAPYITVTSELGTLPESAEPGTVVALISVQDPDSGSNGDVSLRIPDHLPFALKSAFRNQFSLVTAGPLDREAKSSYDIMVTASDAGNPPLSTHRTIFLNISDVNDNPPSFFQRSHEVFVPENNRPGDLLCSLAASDPDSGLNALISYSLLEPRNRDVSASSFISLNPQTGAVHATRSFDYEQTQTLQFEVQARDRGNPPLSSTVTVRLFVLDLNDNAPAVLRPRARPGSLCPQALPPSVGAGHLITKVTAVDLDSGYNAWVSYQLLEAPDPSLFAVSRYAGEVRTAVPIPADLPPQKLVIVVKDSGSPPLSTSVTLLVSLEEDTHPVVPDLRESSAPREGESRLTLYLAVSLVAICFVSFGSFVALLSKCLRGAACGVTCFPAGTCACLTRSRRREGLPPSNGILRIQLGSDDPIKFVDVGGHSHGCTPLASAPTRSDSFMMVKSPSAPMAGEPVRPSCPPSDLLYGLEQAPPNTDWRFSQAQRPGTSGSQNGDDTGTWPNNQFDTEMLQAMILASASEAADGSSTLGGGAGTMGLSARYGPQFTLQHVPDYRQNVYIPGSNATLTNAAGKRDGKAPAGGNGNKKKSGKKEKK

SEQ ID NO: 4456 - protein, 677 aa, Homo sapiens
MPGFLVRILPLLLVLLLLGPTRGLRNATQRMFEIDYSRDSFLKDGQPFRYISGSIHYSRVPRFYWKDRLLKMKMAGLNAIQTYVPWNFHEPWPGQYQFSEDHDVEYFLRLAHELGLLVILRPGPYICAEWEMGGLPAWLLEKESILLRSSDPDYLAAVDKWLGVLLPKMKPLLYQNGGPVITVQVENEYGSYFACDFDYLRFLQKRFRHHLGDDVVLFTTDGAHKTFLKCGALQGLYTTVDFGTGSNITDAFLSQRKCEPKGPLINSEFYTGWLDHWGQPHSTIKTEAVASSLYDILARGASVNLYMFIGGTNFAYWNGANSPYAAQPTSYDYDAPLSEAGDLTEKYFALRNIIQKFEKVPEGPIPPSTPKFAYGKVTLEKLKTVGAALDILCPSGPIKSLYPLTFIQVKQHYGFVLYRTTLPQDCSNPAPLSSPLNGVHDRAYVAVDGIPQGVLERNNVITLNITGKAGATLDLLVENMGRVNYGAYINDFKGLVSNLTLSSNILTDWTIFPLDTEDAVCSHLGGWGHRDSGHHDEAWAHNSSNYTLPAFYMGNFSIPSGIPDLPQDTFIQFPGWTKGQVWINGFNLGRYWPARGPQLTLFVPQHILMTSAPNTITVLELEWAPCSSDDPELCAVTFVDRPVIGSSVTYDHPSKPVEKRLMPPPPQKNKDSWLDHV

SEQ ID NO: 4457 - protein, 189 aa, Homo sapiens
MAAGRLFLSRLRAPFSSMAKSPLEGVSSSRGLHAGRGPRRLSIEGNIAVGKSTFVKLLTKTYPEWHVATEPVATWQNIQAAGTQKACTAQSLGNLLDMMYREPARWSYTFQTFSFLSRLKVQLEPFPEKLLQARKPVQIFERSVYSDRLHFEALMNIPVLVLDVNDDFSEEVTKQEDLMREVNTFVKNL

SEQ ID NO: 4458 - protein, 230 aa, Homo sapiens
MLKNPYTIKKQPLHQFVQRPLFPLPAAFYHPVRYMFIQTQDTPNPNSLKFIPGKPVLETRTMDFPTPAAAFRSPLARQLFRIEGVKSVFFGPDFITVTKENEELDWNLLKPDIYATIMDFFASGLPLVTEETPSGEAGSEEDDEVVAMIKELLDTRIRPTVQEDGGDVIYKGFEDGIVQLKLQGSCTSCPSSIITLKNGIQNMLQFYIPEVEGVEQVMDDESDEKEANSP

SEQ ID NO: 4459 - protein, 1422 aa, Homo sapiens
MSGIKRTIKETDPDYEDVSVALPNKRHKAIENSARDAAVQKIETIIKEQFALEMKNKEHEIEVIDQRLIEARRMMDKLRACIVANYYASAGLLKVSEGSKTCDTMVFNHPAIKKFLESPSRSSSPANQRAETPSANHSESDSLSQHNDFLSDKDNNSNMDIEERLSNNMEQRPSRNTGRDTSRITGSHKTEQRNADLTDETSRLFVKKTIVVGNVSKYIPPDKREENDQSTHKWMVYVRGSRREPSINHFVKKVWFFLHPSYKPNDLVEVREPPFHLTRRGWGEFPVRVQVHFKDSQNKRIDIIHNLKLDRTYTGLQTLGAETVVDVELHRHSLGEDCIYPQSSESDISDAPPSLPLTIPAPVKASSPIKQSHEPVPDTSVEKGFPASTEAERHTPFYALPSSLERTPTKMTTSQKVTFCSHGNSAFQPIASSCKIVPQSQVPNPESPGKSFQPITMSCKIVSGSPISTPSPSPLPRTPTSTPVHVKQGTAGSVINNPYVIMDKQPGQVIGATTPSTGSPTNKISTASQVSQGTGSPVPKIHGSSFVTSTVKQEDSLFASMPPLCPIGSHPKVQSPKPITGGLGAFTKVIIKQEPGEAPHVPATGAASQSPLPQYVTVKGGHMIAVSPQKQVITPGEGIAQSAKVQPSKVVGVPVGSALPSTVKQAVAISGGQILVAKASSSVSKAVGPKQVVTQGVAKAIVSGGGGTIVAQPVQTLTKAQVTAAGPQKSGSQGSVMATLQLPATNLANLANLPPGTKLYLTTNSKNPSGKGKLLLIPQGAILRATNNANLQSGSAASGGSGAGGGGGGGGGGGSGSGGGGSTGGGGGTAGGGTQSTAGPGGISQHLTYTSYILKQTPQGTFLVGQPSPQTSGKQLTTGSVVQGTLGVSTSSAQGQQTLKVISGQKTTLFTQAAHGGQASLMKISDSTLKTVPATSQLSKPGTTMLRVAGGVITTATSPAVALSANGPAQQSEGMAPVSSSTVSSVTKTSGQQQVCVSQATVGTCKAATPTVVSATSLVPTPNPISGKATVSGLLKIHSSQSSPQQAVLTIPSQLKPLSVNTSGGVQTILMPVNKVVQSFSTSKPPAILPVAAPTPVVPSSAPAAVAKVKTEPETPGPSCLSQEGQTAVKTEESSELGNYVIKIDHLETIQQLLTAVVKKIPLITAKSEDASCFSAKSVEQYYGWNIGKRRAAEWQRAMTMRKVLQEILEKNPRFHHLTPLKTKHIAHWCRCHGYTPPDPESLRNDGDSIEDVLTQIDSEPECPSSFSSADNLCRKLEDLQQFQKREPENEEEVDILSLSEPVKINIKKEQEEKQEEVKFYLPPTPGSEFIGDVTQKIGITLQPVALHRNVYASVVEDMILKATEQLVNDILRQALAVGYQTASHNRIPKEITVSNIHQAICNIPFLDFLTNKHMGILNEDQ

SEQ ID NO: 4460 - protein, 552 aa, Homo sapiens
MHCERFLCILRIIGTTLFGVSLLLGITAAYIVGYQFIQTDNYYFSFGLYGAFLASHLIIQSLFAFLEHRKMKKSLETPIKLNKTVALCIAAYQEDPDYLRKCLQSVKRLTYPGIKVVMVIDGNSEDDLYMMDIFSEVMGRDKSATYIWKNNFHEKGPGETDESHKESSQHVTQLVLSNKSICIMQKWGGKREVMYTAFRALGRSVDYVQVCDSDTMLDPASSVEMVKVLEEDPMVGGVGGDVQILNKYDSWISFLSSVRYWMAFNIERACQSYFGCVQCISGPLGMYRNSLLHEFVEDWYNQEFMGNQCSFGDDRHLTNRVLSLGYATKYTARSKCLTETPIEYLRWLNQQTRWSKSYFREWLYNAMWFHKHHLWMTYEAIITGFFPFFLIATVIQLFYRGKIWNILLFLLTVQLVGLIKSSFASCLRGNIVMVFMSLYSVLYMSSLLPAKMFAIATINKAGWGTSGRKTIVVNFIGLIPVSVWFTILLGGVIFTIYKESKRPFSESKQTVLIVGTLLYACYWVMLLTLYVVLINKCGRRKKGQQYDMVLDV

SEQ ID NO: 4461 - protein, 264 aa, Homo sapiens
MLSHNTMMKQRKQQATAIMKEVHGNDVDGMDLGKKVSIPRDIMLEELSHLSNRGARLFKMRQRRSDKYTFENFQYQSRAQINHSIAMQNGKVDGSNLEGGSQQAPLTPPNTPDPRSPPNPDNIAPGYSGPLKEIPPEKFNTTAVPKYYQSPWEQAISNDPELLEALYPKLFKPEGKAELPDYRSFNRVATPFGGFEKASRMVKFKVPDFELLLLTDPRFMSFVNPLSGRRSFNRTPKGWISENIPIVITTEPTDDTTVPESEDL

SEQ ID NO: 4462 - protein, 511 aa, Homo sapiens
MSGGFELQPRDGGPRVALAPGETVIGRGPLLGITDKRVSRRHAILEVAGGQLRIKPIHTNPCFYQSSEKSQLLPLKPNLWCYLNPGDSFSLLVDKYIFRILSIPSEVEMQCTLRNSQVLDEDNILNETPKSPVINLPHETTGASQLEGSTEIAKTQMTPTNSVSFLGENRDCNKQQPILAERKRILPTWMLAEHLSDQNLSVPAISGGNVIQGSGKEEICKDKSQLNTTQQGRRQLISSGSSENTSAEQDTGEECKNTDQEESTISSKEMPQSFSAITLSNTEMNNIKTNAQRNKLPIEELGKVSKHKIATKRTPHKEDEAMSCSENCSSAQGDSLQDESQGSHSESSSNPSNPETLHAKATDSVLQGSEGNKVKRTSCMYGANCYRKNPVHFQHFSHPGDSDYGGVQIVGQDETDDRPECPYGPSCYRKNPQHKIEYRHNTLPVRNVLDEDNDNVGQPNEYDLNDSFLDDEEEDYEPTDEDSDWEPGKEDEEKEDVEELLKEAKRFMKRK

SEQ ID NO: 4463 - protein, 471 aa, Homo sapiens
MSYPQGYLYQAPGSLALYSCPAYGASALAAPRSEELARSASGSAFSPYPGSAAFTAQAATGFGSPLQYSADAAAAAAGFPSYMGAPYDAHTTGMTGAISYHPYGSAAYPYQLNDPAYRKNATRDATATLKAWLNEHRKNPYPTKGEKIMLAIITKMTLTQVSTWFANARRRLKKENKMTWAPRNKSEDEDEDEGDATRSKDESPDKAQEGTETSAEDEGISLHVDSLTDHSCSAESDGEKLPCRAGDPLCESGSECKDKYDDLEDDEDDDEEGERGLAPPKPVTSSPLTGLEAPLLSPPPEAAPRGGRKTPQGSRTSPGAPPPASKPKLWSLAEIATSDLKQPSLGPGCGPPGLPAAAAPASTGAPPGGSPYPASPLLGRPLYYTSPFYGNYTNYGNLNAALQGQGLLRYNSAAAAPGEALHTAPKAASDAGKAGAHPLESHYRSPGGGYEPKKDASEGCTVVGGGVQPYL

SEQ ID NO: 4464 - protein, 994 aa, Homo sapiens
MRRRPPSRGGRGAARARETRRQPRHRSGRRMAEAISCTLNCSCQSFKPGKINHRQCDQCKHGWVAHALSKLRIPPMYPTSQVEIVQSNVVFDISSLMLYGTQAIPVRLKILLDRLFSVLKQDEVLQILHALDWTLQDYIRGYVLQDASGKVLDHWSIMTSEEEVATLQQFLRFGETKSIVELMAIQEKEEQSIIIPPSTANVDIRAFIESCSHRSSSLPTPVDKGNPSSIHPFENLISNMTFMLPFQFFNPLPPALIGSLPEQYMLEQGHDQSQDPKQEVHGPFPDSSFLTSSSTPFQVEKDQCLNCPDAITKKEDSTHLSDSSSYNIVTKFERTQLSPEAKVKPERNSLGTKKGRVFCTACEKTFYDKGTLKIHYNAVHLKIKHKCTIEGCNMVFSSLRSRNRHSANPNPRLHMPMNRNNRDKDLRNSLNLASSENYKCPGFTVTSPDCRPPPSYPGSGEDSKGQPAFPNIGQNGVLFPNLKTVQPVLPFYRSPATPAEVANTPGILPSLPLLSSSIPEQLISNEMPFDALPKKKSRKSSMPIKIEKEAVEIANEKRHNLSSDEDMPLQVVSEDEQEACSPQSHRVSEEQHVQSGGLGKPFPEGERPCHRESVIESSGAISQTPEQATHNSERETEQTPALIMVPREVEDGGHEHYFTPGMEPQVPFSDYMELQQRLLAGGLFSALSNRGMAFPCLEDSKELEHVGQHALARQIEENRFQCDICKKTFKNACSVKIHHKNMHVKEMHTCTVEGCNATFPSRRSRDRHSSNLNLHQKALSQEALESSEDHFRAAYLLKDVAKEAYQDVAFTQQASQTSVIFKGTSRMGSLVYPITQVHSASLESYNSGPLSEGTILDLSTTSSMKSESSSHSSWDSDGVSEEGTVLMEDSDGNCEGSSLVPGEDEYPICVLMEKADQSLASLPSGLPITCHLCQKTYSNKGTFRAHYKTVHLRQLHKCKVPGCNTMFSSVRSRNRHSQNPNLHKSLASSPSHLQ

SEQ ID NO: 4465 - protein, 201 aa, Homo sapiens
MRRAWILLTLGLVACVSAESRAELTSDKDMYLDNSSIEEASGVYPIDDDDYASASGSGADEDVESPELTTSRPLPKILLTSAAPKVETTTLNIQNKIPAQTKSPEETDKEKVHLSDSERKMDPAEEDTNVYTEKHSDSLFKRTEVLAAVIAGGVIGFLFAIFLILLLVYRMRKKDEGSYDLGERKPSSAAYQKAPTKEFYA

SEQ ID NO: 4466 - protein, 153 aa, Homo sapiens
MLRLRSGLRHLRATPNTRGSARLLCAEMPKKAGATTKGKSQSKEPERPLPPLGPVAVDPKGCVTIAIHAKPGSKQNAVTDLTAEAVNVAIAAPPSEGEANAELCRYLSKVLELRKSDVVLDKGGKSREKVVKLLASTTPEEILEKLKKEAKKT

SEQ ID NO: 4467 - protein, 372 aa, Homo sapiens
MTFQFNFTIEDHLENELTPIRDGALTLDSSKELSVSESQKGEERDRKCSAEQFDLPQDHLWEHKSMENAAPSQDTDSPLSAASSSRNLEPHGKQPSLRAAKEHAMPKDLKKMLENKVIETLPGFQHVKLSVVKTILLKENFPGENIVSKSFSSHSDLITGVYEGGLKIWECTFDLLAYFTKAKVKFAGKKVLDLGCGSGLLGITAFKGGSKEIHFQDYNSMVIDEVTLPNVVANSTLEDEENDVNEPDVKRCRKPKVTQLYKCRFFSGEWSEFCKLVLSSEKLFVKYDLILTSETIYNPDYYSNLHQTFLRLLSKNGRVLLASKAHYFGVGGGVHLFQKFVEERDVFKTRILKIIDEGLKRFIIEITFKFPG

SEQ ID NO: 4468 - protein, 963 aa, Homo sapiens
MADLAECNIKVMCRFRPLNESEVNRGDKYIAKFQGEDTVVIASKPYAFDRVFQSSTSQEQVYNDCAKKIVKDVLEGYNGTIFAYGQTSSGKTHTMEGKLHDPEGMGIIPRIVQDIFNYIYSMDENLEFHIKVSYFEIYLDKIRDLLDVSKTNLSVHEDKNRVPYVKGCTERFVCSPDEVMDTIDEGKSNRHVAVTNMNEHSSRSHSIFLINVKQENTQTEQKLSGKLYLVDLAGSEKVSKTGAEGAVLDEAKNINKSLSALGNVISALAEGSTYVPYRDSKMTRILQDSLGGNCRTTIVICCSPSSYNESETKSTLLFGQRAKTIKNTVCVNVELTAEQWKKKYEKEKEKNKILRNTIQWLENELNRWRNGETVPIDEQFDKEKANLEAFTVDKDITLTNDKPATAIGVIGNFTDAERRKCEEEIAKLYKQLDDKDEEINQQSQLVEKLKTQMLDQEELLASTRRDQDNMQAELNRLQAENDASKEEVKEVLQALEELAVNYDQKSQEVEDKTKEYELLSDELNQKSATLASIDAELQKLKEMTNHQKKRAAEMMASLLKDLAEIGIAVGNNDVKQPEGTGMIDEEFTVARLYISKMKSEVKTMVKRCKQLESTQTESNKKMEENEKELAACQLRISQHEAKIKSLTEYLQNVEQKKRQLEESVDALSEELVQLRAQEKVHEMEKEHLNKVQTANEVKQAVEQQIQSHRETHQKQISSLRDEVEAKAKLITDLQDQNQKMMLEQERLRVEHEKLKATDQEKSRKLHELTVMQDRREQARQDLKGLEETVAKELQTLHNLRKLFVQDLATRVKKSAEIDSDDTGGSAAQKQKISFLENNLEQLTKVHKQLVRDNADLRCELPKLEKRLRATAERVKALESALKEAKENASRDRKRYQQEVDRIKEAVRSKNMARRGHSAQIAKPIRPGQHPAASPTHPSAIRGGGAFVQNSQPVAVRGGGGKQV

SEQ ID NO: 4469 - protein, 1284 aa, Homo sapiens
MHVFIVGMSLSSVTLASALQVRGEALSEEEIWSLLFLAAEQLLEDLRNDSSDYVVCPWSALLSAAGSLSFQGRVSHIEAAPFKAPELLQGQSEDEQPDASQPLQLCEPLHSILLTMCEDQPHRRCTLQSVLEACRVHEKEVSVYPAPAGLHIRRLVGLVLGTISEVEKRVVEESSSVQQNRSYLLRKRLRGTSSESPAAQAPECLHPCRVSERSTETQSSPEPHWSTLTHSHCSLLVNRALPGADPQDQQAGRRLSSGSVHSAADSSWPTTPSQRGFLQRRSKFSRPEFILLAGEAPMTLHLPGSVVTKKGKSYLALRDLCVVLLNGQHLEVKCDVESTVGAVFNAVTSFANLEELTYFGLAYMKSKEFFFLDSETRLCKIAPEGWREQPQKTSMNTFTLFLRIKFFVSHYGLLQHSLTRHQFYLQLRKDILEERLYCNEEILLQLGVLALQAEFGNYPKEVESKPYFHVEDYIPASLIERMTALRVQVEVSEMHRLSSALWGEDAELKFLRVTQQLPEYGVLVHQVFSEKRRPEEEMALGICAKGVIVYEVKNNSRIAMLRFQWRETGKISTYQKKFTITSSVTGKKHTFVTDSAKTSKYLLDLCSAQHGFNAQMGSGQPSHVLFDHDKFVQMANLSPAHQARSKPLIWIQRLSCSENELFVSRLQGAAGGLLSTSMDNFNVDGSKEAGAEGIGRSPCTGREQLKSACVIQKPMTWDSLSGPPVQSMHAGSKNNRRKSFIAEPGREIVRVTLKRDPHRGFGFVINEGEYSGQADPGIFISSIIPGGPAEKAKTIKPGGQILALNHISLEGFTFNMAVRMIQNSPDNIELIISQSKGVGGNNPDEEKNSTANSGVSSTDILSFGYQGSLLSHTQDQDRNTEELDMAGVQSLVPRLRHQLSFLPLKGAGSSCPPSPPEISAGEIYFVELVKEDGTLGFSVTGGINTSVPYGGIYVKSIVPGGPAAKEGQILQGDRLLQVDGVILCGLTHKQAVQCLTGPGQVARLVLERRVPRSTQQCPSANDSMGDERTAVSLVTALPGRPSSCVSVTDGPKFEVKLKKNANGLGFSFVQMEKESCSHLKSDLVRIKRLFPGQPAEENGAIAAGDIILAVNGRSTEGLIFQEVLHLLRGAPQEVTLLLCRPPPGALPELEQEWQTPELSADKEFTRATCTDSCTSPILDQEDSWRDSASPDAGEGLGLRPESSQKAIREAQWGQNRERPWASSLTHSPESHPHLCKLHQERDESTLATSLEKDVRQNCYSVCDIMRLGRYSFSSPLTRLSTDIF

SEQ ID NO: 4470 - protein, 407 aa, Homo sapiens
MDSPCQPQPLSQALPQLPGSSSEPLEPEPGRARMGVESYLPCPLLPSYHCPGVPSEASAGSGTPRATATSTTASPLRDGFGGQDGGELRPLQSEGAAALVTKGCQRLAAQGARPEAPKRKWAEDGGDAPSPSKRPWARQENQEAEREGGMSCSCSSGSGEASAGLMEEALPSAPERLALDYIVPCMRYYGICVKDSFLGAALGGRVLAEVEALKRGGRLRDGQLVSQRAIPPRSIRGDQIAWVEGHEPGCRSIGALMAHVDAVIRHCAGRLGSYVINGRTKAMVACYPGNGLGYVRHVDNPHGDGRCITCIYYLNQNWDVKVHGGLLQIFPEGRPVVANIEPLFDRLLIFWSDRRNPHEVKPAYATRYAITVWYFDAKERAAAKDKYQLASGQKGVQVPVSQPPTPT

SEQ ID NO: 4471 - protein, 813 aa, Homo sapiens
MAWPCITRACCIARFWNQLDKADIAVPLVFTKYSEATEHPGAPPQPPPPQQQAQPALAPPSARAVAIETQPAQGELDAVARATGPAPGPTGEREPAAGPGRSGPGPGLGSGSTSGPADSVMRQDYRAWKVQRPEPSCRPRSEYQPSDAPFERETQYQKDFRAWPLPRRGDHPWIPKPVQISAASQASAPILGAPKRRPQSQERWPVQAAAEAREQEAAPGGAGGLAAGKASGADERDTRRKAGPAWIVRRAEGLGHEQTPLPAAQAQVQATGPEAGRGRAAADALNRQIREEVASAVSSSYRNEFRAWTDIKPVKPIKAKPQYKPPDDKMVHETSYSAQFKGEASKPTTADNKVIDRRRIRSLYSEPFKEPPKVEKPSVQSSKPKKTSASHKPTRKAKDKQAVSGQAAKKKSAEGPSTTKPDDKEQSKEMNNKLAEAKESLAQPVSDSSKTQGPVATEPDKDQGSVVPGLLKGQGPMVQEPLKKQGSVVPGPPKDLGPMIPLPVKDQDHTVPEPLKNESPVISAPVKDQGPSVPVPPKNQSPMVPAKVKDQGSVVPESLKDQGPRIPEPVKNQAPMVPAPVKDEGPMVSASVKDQGPMVSAPVKDQGPIVPAPVKGEGPIVPAPVKDEGPMVSAPIKDQDPMVPEHPKDESAMATAPIKNQGSMVSEPVKNQGLVVSGPVKDQDVVVPEHAKVHDSAVVAPVKNQGPVVPESVKNQDPILPVLVKDQGPTVLQPPKNQGRIVPEPLKNQVPIVPVPLKDQDPLVPVPAKDQGPAVPEPLKTQGPRDPQLPTVSPLPRVMIPTAPHTEYIESSP

SEQ ID NO: 4472 - protein, 156 aa, Homo sapiens
MEPAAGSSMEPSADWLATAAARGRVEEVRALLEAGALPNAPNSYGRRPIQVMMMGSARVAELLLLHGAEPNCADPATLTRPVHDAAREGFLDTLVVLHRAGARLDVRDAWGRLPVDLAEELGHRDVARYLRAAAGGTRGSNHARIDAAEGPSDIPD

SEQ ID NO: 4473 - protein, 142 aa, Homo sapiens
MMWPMHTPLLLLTALMVAVAGSASAQSRTLAGGIHATDLNDKSVQCALDFAISEYNKVINKDEYYSRPLQVMAAYQQIVGGVNYYFNVKFGRTTCTKSQPNLDNCPFNDQPKLKEEEFCSFQINEVPWEDKISILNYKCRKV

SEQ ID NO: 4474 - protein, 566 aa, Homo sapiens
MALSVPGYSPGFRKPPEVVRLRRKRARSRGAAASPPRELTEPAARRAALVAGLPLRPFPAAGGRGGGSGGGPAAARRNPFARLDNRPRVAAEPPDGPAREQPEAPVPFLDSNQENDLLWEEKFPERTTVTELPQTSHVSFSEPDIPSSKSTELPVDWSIKTRLLFTSSQPFTWADHLKAQEEAQGLVQHCRATEVTLPKSIQDPKLSSELRCTFQQSLIYWLHPALSWLPLFPRIGADRKMAGKTSPWSNDATLQHVLMSDWSVSFTSLYNLLKTKLCPYFYVCTYQFTVLFRAAGLAGSDLITALISPTTRGLREAMRNEGIEFSLPLIKESGHKKETASGTSLGYGEEQAISDEDEEESFSWLEEMGVQDKIKKPDILSIKLRKEKHEVQMDHRPESVVLVKGINTFTLLNFLINSKSLVATSGPQAGLPPTLLSPVAFRGATMQMLKARSVNVKTQALSGYRDQFSLEITGPIMPHSLHSLTMLLKSSQSGSFSAVLYPHEPTAVFNICLQMDKVLDMEVVHKELTNCGLHPNTLEQLSQIPLLGKSSLRNVVLRDYIYNWRS

SEQ ID NO: 4475 - protein, 1798 aa, Homo sapiens
MELTSRERGRGQPLPWELRLGLLLSVLAATLAQAPAPDVPGCSRGSCYPATGDLLVGRADRLTASSTCGLNGPQPYCIVSHLQDEKKCFLCDSRRPFSARDNPHSHRIQNVVTSFAPQRRAAWWQSENGIPAVTIQLDLEAEFHFTHLIMTFKTFRPAAMLVERSADFGRTWHVYRYFSYDCGADFPGVPLAPPRHWDDVVCESRYSEIEPSTEGEVIYRVLDPAIPIPDPYSSRIQNLLKITNLRVNLTRLHTLGDNLLDPRREIREKYYYALYELVVRGNCFCYGHASECAPAPGAPAHAEGMVHGACICKHNTRGLNCEQCQDFYRDLPWRPAEDGHSHACRKCECHGHTHSCHFDMAVYLASGNVSGGVCDGCQHNTAGRHCELCRPFFYRDPTKDLRDPAVCRSCDCDPMGSQDGGRCDSHDDPALGLVSGQCRCKEHVVGTRCQQCRDGFFGLSISDRLGCRRCQCNARGTVPGSTPCDPNSGSCYCKRLVTGRGCDRCLPGHWGLSHDLLGCRPCDCDVGGALDPQCDEGTGQCHCRQHMVGRRCEQVQPGYFRPFLDHLIWEAEDTRGQVLDVVERLVTPGETPSWTGSGFVRLQEGQTLEFLVASVPKAMDYDLLLRLEPQVPEQWAELELIVQRPGPVPAHSLCGHLVPKDDRIQGTLQPHARYLIFPNPVCLEPGISYKLHLKLVRTGGSAQPETPYSGPGLLIDSLVLLPRVLVLEMFSGGDAAALERQATFERYQCHEEGLVPSKTSPSEACAPLLISLSTLIYNGALPCQCNPQGSLSSECNPHGGQCLCKPGVVGRRCDLCAPGYYGFGPTGCQACQCSHEGALSSLCEKTSGQCLCRTGAFGLRCDRCQRGQWGFPSCRPCVCNGHADECNTHTGACLGCRDHTGGEHCERCIAGFHGDPRLPYGGQCRPCPCPEGPGSQRHFATSCHQDEYSQQIVCHCRAGYTGLRCEACAPGHFGDPSRPGGRCQLCECSGNIDPMDPDACDPHTGQCLRCLHHTEGPHCAHCKPGFHGQAARQSCHRCTCNLLGTNPQQCPSPDQCHCDPSSGQCPCLPNVQGPSCDRCAPNFWNLTSGHGCQPCACHPSRARGPTCNEFTGQCHCRAGFGGRTCSECQELHWGDPGLQCHACDCDSRGIDTPQCHRFTGHCSCRPGVSGVRCDQCARGFSGIFPACHPCHACFGDWDRVVQDLAARTQRLEQRAQELQQTGVLGAFESSFWHMQEKLGIVQGIVGARNTSAASTAQLVEATEELRREIGEATEHLTQLEADLTDVQDENFNANHALSGLERDRLALNLTLRQLDQHLDLLKHSNFLGAYDSIRHAHSQSAEAERRANTSALAVPSPVSNSASARHRTEALMDAQKEDFNSKHMANQRALGKLSAHTHTLSLTDINELVCGAPGDAPCATSPCGGAGCRDEDGQPRCGGLSCNGAAATADLALGRARHTQAELQRALAEGGSILSRVAETRRQASEAQQRAQAALDKANASRGQVEQANQELQELIQSVKDFLNQEGADPDSIEMVATRVLELSIPASAEQIQHLAGAIAERVRSLADVDAILARTVGDVRRAEQLLQDARRARSWAEDEKQKAETVQAALEEAQRAQGIAQGAIRGAVADTRDTEQTLYQVQERMAGAERALSSAGERARQLDALLEALKLKRAGNSLAASTAEETAGSAQGRAQEAEQLLRGPLGDQYQTVKALAERKAQGVLAAQARAEQLRDEARDLLQAAQDKLQRLQELEGTYEENERALESKAAQLDGLEARMRSVLQAINLQVQIYNTCQ

SEQ ID NO: 4476 - protein, 126 aa, Homo sapiens
MDKSLLLELPILLCCFRALSGSLSMRNDAVNEIVAVKNNFPVIEIVQCRMCHLQFPGEKCSRGRGICTATTEEACMVGRMFKRDGNPWLTFMGCLKNCADVKGIRWSVYLVNFRCCRSHDLCNEDL

SEQ ID NO: 4477 - protein, 280 aa, Homo sapiens
MLGQQQQQLYSSAALLTGERSRLLTCYVQDYLECVESLPHDMQRNVSVLRELDNKYQETLKEIDDVYEKYKKEDDLNQKKRLQQLLQRALINSQELGDEKIQIVTQMLELVENRARQMELHSQCFQDPAESERASDKAKMDSSQPERSSRRPRRQRTSESRDLCHMANGIEDCDDQPPKEKKSKSAKKKKRSKAKQEREASPVEFAIDPNEPTYCLCNQVSYGEMIGCDNEQCPIEWFHFSCVSLTYKPKGKWYCPKCRGDNEKTMDKSTEKTKKDRRSR

SEQ ID NO: 4478 - protein, 2920 aa, Homo sapiens
MRGRRGRPPKQPAAPAAERCAPAPPPPPPPPTSGPIGGLRSRHRGSSRGRWAAAQAEVAPKTRLSSPRGGSSSRRKPPPPPPAPPSTSAPGRGGRGGGGGRTGGGGGGGHLARTTAARRAVNKVVYDDHESEEEEEEEDMVSEEEEEEDGDAEETQDSEDDEEDEMEEDDDDSDYPEEMEDDDDDASYCTESSFRSHSTYSSTPGRRKPRVHRPRSPILEEKDIPPLEFPKSSEDLMVPNEHIMNVIAIYEVLRNFGTVLRLSPFRFEDFCAALVSQEQCTLMAEMHVVLLKAVLREEDTSNTTFGPADLKDSVNSTLYFIDGMTWPEVLRVYCESDKEYHHVLPYQEAEDYPYGPVENKIKVLQFLVDQFLTTNIAREELMSEGVIQYDDHCRVCHKLGDLLCCETCSAVYHLECVKPPLEEVPEDEWQCEVCVAHKVPGVTDCVAEIQKNKPYIRHEPIGYDRSRRKYWFLNRRLIIEEDTENENEKKIWYYSTKVQLAELIDCLDKDYWEAELCKILEEMREEIHRHMDITEDLTNKARGSNKSFLAAANEEILESIRAKKGDIDNVKSPEETEKDKNETENDSKDAEKNREEFEDQSLEKDSDDKTPDDDPEQGKSEVGDFKSEKSNGELSESPGAGKGASGSTRIITRLRNPDSKLSQLKSQQVAAAAHEANKLFKEGKEVLVVNSQGEISRLSTKKEVIMKGNINNYFKLGQEGKYRVYHNQYSTNSFALNKHQHREDHDKRRHLAHKFCLTPAGEFKWNGSVHGSKVLTISTLRLTITQLENNIPSSFLHPNWASHRANWIKAVQMCSKPREFALALAILECAVKPVVMLPIWRESLGHTRLHRMTSIEREEKEKVKKKEKKQEEEETMQQATWVKYTFPVKHQVWKQKGEEYRVTGYGGWSWISKTHVYRFVPKLPGNTNVNYRKSLEGTKNNMDENMDESDKRKCSRSPKKIKIEPDSEKDEVKGSDAAKGADQNEMDISKITEKKDQDVKELLDSDSDKPCKEEPMEVDDDMKTESHVNCQESSQVDVVNVSEGFHLRTSYKKKTKSSKLDGLLERRIKQFTLEEKQRLEKIKLEGGIKGIGKTSTNSSKNLSESPVITKAKEGCQSDSMRQEQSPNANNDQPEDLIQGCSESDSSVLRMSDPSHTTNKLYPKDRVLDDVSIRSPETKCPKQNSIENDIEEKVSDLASRGQEPSKSKTKGNDFFIDDSKLASADDIGTLICKNKKPLIQEESDTIVSSSKSALHSSVPKSTNDRDATPLSRAMDFEGKLGCDSESNSTLENSSDTVSIQDSSEEDMIVQNSNESISEQFRTREQDVEVLEPLKCELVSGESTGNCEDRLPVKGTEANGKKPSQQKKLEERPVNKCSDQIKLKNTTDKKNNENRESEKKGQRTSTFQINGKDNKPKIYLKGECLKEISESRVVSGNVEPKVNNINKIIPENDIKSLTVKESAIRPFINGDVIMEDFNERNSSETKSHLLSSSDAEGNYRDSLETLPSTKESDSTQTTTPSASCPESNSVNQVEDMEIETSEVKKVTSSPITSEEESNLSNDFIDENGLPINKNENVNGESKRKTVITEVTTMTSTVATESKTVIKVEKGDKQTVVSSTENCAKSTVTTTTTTVTKLSTPSTGGSVDIISVKEQSKTVVTTTVTDSLTTTGGTLVTSMTVSKEYSTRDKVKLMKFSRPKKTRSGTALPSYRKFVTKSSKKSIFVLPNDDLKKLARKGGIREVPYFNYNAKPALDIWPYPSPRPTFGITWRYRLQTVKSLAGVSLMLRLLWASLRWDDMAAKAPPGGGTTRTETSETEITTTEIIKRRDVGPYGIRSEYCIRKIICPIGVPETPKETPTPQRKGLRSSALRPKRPETPKQTGPVIIETWVAEEELELWEIRAFAERVEKEKAQAVEQQAKKRLEQQKPTVIATSTTSPTSSTTSTISPAQKVMVAPISGSVTTGTKMVLTTKVGSPATVTFQQNKNFHQTFATWVKQGQSNSGVVQVQQKVLGIIPSSTGTSQQTFTSFQPRTATVTIRPNTSGSGGTTSNSQVITGPQIRPGMTVIRTPLQQSTLGKAIIRTPVMVQPGAPQQVMTQIIRGQPVSTAVSAPNTVSSTPGQKSLTSATSTSNIQSSASQPPRPQQGQVKLTMAQLTQLTQGHGGNQGLTVVIQGQGQTTGQLQLIPQGVTVLPGPGQQLMQAAMPNGTVQRFLFTPLATTATTASTTTTTVSTTAAGTGEQRQSKLSPQMQVHQDKTLPPAQSSSVGPAEAQPQTAQPSAQPQPQTQPQSPAQPEVQTQPEVQTQTTVSSHVPSEAQPTHAQSSKPQVAAQSQPQSNVQGQSPVRVQSPSQTRIRPSTPSQLSPGQQSQVQTTTSQPIPIQPHTSLQIPSQGQPQSQPQVQSSTQTLSSGQTLNQVTVSSPSRPQLQIQQPQPQVIAVPQLQQQVQVLSQIQSQVVAQIQAQQSGVPQQIKLQLPIQIQQSSAVQTHQIQNVVTVQAASVQEQLQRVQQLRDQQQKKKQQQIEIKREHTLQASNQSEIIQKQVVMKHNAVIEHLKQKKSMTPAEREENQRMIVCNQVMKYILDKIDKEEKQAAKKRKREESVEQKRSKQNATKLSALLFKHKEQLRAEILKKRALLDKDLQIEVQEELKRDLKIKKEKDLMQLAQATAVAAPCPPVTPAPPAPPAPPPSPPPPPAVQHTGLLSTPTLPAASQKRKREEEKDSSSKSKKKKMISTTSKETKKDTKLYCICKTPYDESKFYIGCDRCQNWYHGRCVGILQSEAELIDEYVCPQCQSTEDAMTVLTPLTEKDYEGLKRVLRSLQAHKMAWPFLEPVDPNDAPDYYGVIKEPMDLATMEERVQRRYYEKLTEFVADMTKIFDNCRYYNPSDSPFYQCAEVLESFFVQKLKGFKASRSHNNKLQSTAS

SEQ ID NO: 4479 - protein, 342 aa, Homo sapiens
MAASQAVEEMRSRVVLGEFGVRNVHTTDFPGNYSGYDDAWDQDRFEKNFRVDVVHMDENSLEFDMVGIDAAIANAFRRILLAEVPTMAVEKVLVYNNTSIVQDEILAHRLGLIPIHADPRLFEYRNQGDEEGTEIDTLQFRLQVRCTRNPHAAKDSSDPNELYVNHKVYTRHMTWIPLGNQADLFPEGTIRPVHDDILIAQLRPGQEIDLLMHCVKGIGKDHAKFSPVATASYRLLPDITLLEPVEGEAAEELSRCFSPGVIEVQEVQGKKVARVANPRLDTFSREIFRNEKLKKVVRLARVRDHYICKKDLLAAVAHTCNPSTLGGQGEWITGSRERDHPG

SEQ ID NO: 4480 - protein, 290 aa, Homo sapiens
MDIEAYLERIGYKKSRNKLDLETLTDILQHQIRAVPFENLNIHCGDAMDLGLEAIFDQVVRRNRGGWCLQVNHLLYWALTTIGFETTMLGGYVYSTPAKKYSTGMIHLLLQVTIDGRNYIVDAGFGRSYQMWQPLELISGKDQPQVPCVFRLTEENGFWYLDQIRREQYIPNEEFLHSDLLEDSKYRKIYSFTLKPRTIEDFESMNTYLQTSPSSVFTSKSFCSLQTPDGVHCLVGFTLTHRRFNYKDNTDLIEFKTLSEEEIEKVLKNIFNISLQRKLVPKHGDRFFTI

SEQ ID NO: 4481 - protein, 818 aa, Homo sapiens
MAGTRRKSLQNRQVGSLLIFLCISVGDATTIRYSVAEEMESGSFVANVAKDLGLEVGKLAARGARLVSEGNKMHFRLHRKTGDLFVKEKLDRESLCGKADPCVLHFEVVLVEPLQSFRAEVRVFDINDNAPVFLNKEPLLKIPESTPLGSRFPLQSAQDLDVGLNGLQNYTLSANGYFHLHTRFCSHGPKYAELVLNKPLDREEQPEVNLTITAVDGGSPPKSGTAHIHVVVLDVNDHVPQFSRLVYRAQVSENSPNGSLVATVTAVDLDEGTNKAITYSLAQNPEAILKTFQIDPQNGEVRLRGPLDFEAIETYDIDIQATDGGGLSAHSKVLVEVVDVNDNPPEVMVSSVSSPLPEDSPPQTVVALFTIRDRDIRVGGKVTCFLREDLPFVIKPTFGNSYSLVTDRSLDREEVSGYNITIVAMDTGPPSLSAETMIEVLISDVNDNPPIFREDSYILTVRENNSPAVFIGKVHAEDLDLGENAQITYSLLPPKNGDLSVFAYISINSGNGKLYALRTMDYEAIQDFQFVVKATDGGFLSLSSQVTVRVVVLDDNDNRPMILYPLQNGTLPCNDLVPRSAEAGYLVTKVVAVDGDSGQNSWLSYHLLKATDLGLFSVQRQNGEIHTLRQISERDPMMQKLIILVQDHGQPALSTTVSLNILLVDGFSEPYLQFQDPTKHSRKVNPSTKYLVISLVILSFLFLLSVIVIFIIHVYQKIKYREKFTIQEHFYDDCNFSNNLVQGQGNGSLSRPCPYEMCSATGTGNSEFRFLKRFMPNFPFPHATGEIKMEAGSSLPPNSDRNKSQRLEGHDQVSDDYM

SEQ ID NO: 4482 - protein, 1116 aa, Homo sapiens
MERAISPGLLVRALLLLLLLLGLAARTVAAGRARGLPAPTAEAAFGLGAAAAPTSATRVPAAGAVAAAEVTVEDAEALPAAAGEQEPRGPEPDDETELRPRGRSLVIISTLDGRIAALDPENHGKKQWDLDVGSGSLVSSSLSKPEVFGNKMIIPSLDGALFQWDQDRESMETVPFTVESLLESSYKFGDDVVLVGGKSLTTYGLSAYSGKVRYICSALGCRQWDSDEMEQEEDILLLQRTQKTVRAVGPRSGNEKWNFSVGHFELRYIPDMETRAGFIESTFKPNENTEESKIISDVEEQEAAIMDIVIKVSVADWKVMAFSKKGGHLEWEYQFCTPIASAWLLKDGKVIPISLFDDTSYTSNDDVLEDEEDIVEAARGATENSVYLGMYRGQLYLQSSVRISEKFPSSPKALESVTNENAIIPLPTIKWKPLIHSPSRTPVLVGSDEFDKCLSNDKFSHEEYSNGALSILQYPYDNGYYLPYYKRERNKRSTQITVRFLDNPHYNKNIRKKDPVLLLHWWKEIVATILFCIIATTFIVRRLFHPHPHRQRKESETQCQTENKYDSVSGEANDSSWNDIKNSGYISRYLTDFEPIQCLGRGGFGVVFEAKNKVDDCNYAIKRIRLPNRELAREKVMREVKALAKLEHPGIVRYFNAWLEAPPEKWQEKMDEIWLKDESTDWPLSSPSPMDAPSVKIRRMDPFATKEHIEIIAPSPQRSRSFSVGISCDQTSSSESQFSPLEFSGMDHEDISESVDAAYNLQDSCLTDCDVEDGTMDGNDEGHSFELCPSEASPYVRSRERTSSSIVFEDSGCDNASSKEEPKTNRLHIGNHCANKLTAFKPTSSKSSSEATLSISPPRPTTLSLDLTKNTTEKLQPSSPKVYLYIQMQLCRKENLKDWMNGRCTIEERERSVCLHIFLQIAEAVEFLHSKGLMHRDLKPSNIFFTMDDVVKVGDFGLVTAMDQDEEEQTVLTPMPAYARHTGQVGTKLYMSPEQIHGNSYSHKVDIFSLGLILFELLYPFSTQMERVRTLTDVRNLKFPPLFTQKYPCEYVMVQDMLSPSPMERPEAINIIENAVFEDLDFPGKTVLRQRSRSLSSSGTKHSRQSNNSHSPLPSN

SEQ ID NO: 4483 - protein, 359 aa, Homo sapiens
MAAVSGLVRRPLREVSGLLKRRFHWTAPAALQVTVRDAINQGMDEELERDEKVFLLGEEVAQYDGAYKVSRGLWKKYGDKRIIDTPISEMGFAGIAVGAAMAGLRPICEFMTFNFSMQAIDQVINSAAKTYYMSGGLQPVPIVFRGPNGASAGVAAQHSQCFAAWYGHCPGLKVVSPWNSEDAKGLIKSAIRDNNPVVVLENELMYGVPFEFPPEAQSKDFLIPIGKAKIERQGTHITVVSHSRPVGHCLEAAAVLSKEGVECEVINMRTIRPMDMETIEASVMKTNHLVTVEGGWPQFGVGAEICARIMEGPAFNFLDAPAVRVTGADVPMPYAKILEDNSIPQVKDIIFAIKKTLNI

SEQ ID NO: 4484 - protein, 342 aa, Homo sapiens
MQAVDNLTSAPGNTSLCTRDYKITQVLFPLLYTVLFFVGLITNGLAMRIFFQIRSKSNFIIFLKNTVISDLLMILTFPFKILSDAKLGTGPLRTFVCQVTSVIFYFTMYISISFLGLITIDRYQKTTRPFKTSNPKNLLGAKILSVVIWAFMFLLSLPNMILTNRQPRDKNVKKCSFLKSEFGLVWHEIVNYICQVIFWINFLIVIVCYTLITKELYRSYVRTRGVGKVPRKKVNVKVFIIIAVFFICFVPFHFARIPYTLSQTRDVFDCTAENTLFYVKESTLWLTSLNACLDPFIYFFLCKSFRNSLISMLKCPNSATSLSQDNRKKEQDGGDPNEETPM

SEQ ID NO: 4485 - protein, 447 aa, Homo sapiens
MELSQMSELMGLSVLLGLLALMATAAVARGWLRAGEERSGRPACQKANGFPPDKSSGSKKQKQYQRIRKEKPQQHNFTHRLLAAALKSHSGNISCMDFSSNGKYLATCADDRTIRIWSTKDFLQREHRSMRANVELDHATLVRFSPDCRAFIVWLANGDTLRVFKMTKREDGGYTFTATPEDFPKKHKAPVIDIGIANTGKFIMTASSDTTVLIWSLKGQVLSTINTNQMNNTHAAVSPCGRFVASCGFTPDVKVWEVCFGKKGEFQEVVRAFELKGHSAAVHSFAFSNDSRRMASVSKDGTWKLWDTDVEYKKKQDPYLLKTGRFEEAAGAAPCRLALSPNAQVLALASGSSIHLYNTRRGEKEECFERVHGECIANLSFDITGRFLASCGDRAVRLFHNTPGHRAMVEEMQGHLKRASNESTRQRLQQQLTQAQETLKSLGALKK

SEQ ID NO: 4486 - protein, 449 aa, Homo sapiens
MWTALVLIWIFSLSLSESHAASNDPRNFVPNKMWKGLVKRNASVETVDNKTSEDVTMAAASPVTLTKGTSAAHLNSMEVTTEDTSRTDVSEPATSGGAADGVTSIAPTAVASSTTAASITTAASSMTVASSAPTTAASSTTVASIAPTTAASSMTAASSTPMTLALPAPTSTSTGRTPSTTATGHPSLSTALAQVPKSSALPRTATLATLATRAQTVATTANTSSPMSTRPSPSKHMPSDTAASPVPPMRPQAQGPISQVSVDQPVVNTTNKSTPMPSNTTPEPAPTPTVVTTTKAQAREPTASPVPVPHTSPIPEMEAMSPTTQPSPMPYTQRAAGPGTSQAPEQVETEATPGTDSTGPTPRSSGGTKMPATDSCQPSTQGQYMVVTTEPLTQAVVDKTLLLVVLLLGVTLFITVLVLFALQAYESYKKKDYTQVDYLINGMYADSEM

SEQ ID NO: 4487 - protein, 584 aa, Homo sapiens
MASVQASRRQWCYLCDLPKMPWAMVWDFSEAVCRGCVNFEGADRIELLIDAARQLKRSHVLPEGRSPGPPALKHPATKDLAAAAAQGPQLPPPQAQPQPSGTGGGVSGQDRYDRATSSGRLPLPSPALEYTLGSRLANGLGREEAVAEGARRALLGSMPGLMPPGLLAAAVSGLGSRGLTLAPGLSPARPLFGSDFEKEKQQRNADCLAELNEAMRGRAEEWHGRPKAVREQLLALSACAPFNVRFKKDHGLVGRVFAFDATARPPGYEFELKLFTEYPCGSGNVYAGVLAVARQMFHDALREPGKALASSGFKYLEYERRHGSGEWRQLGELLTDGVRSFREPAPAEALPQQYPEPAPAALCGPPPRAPSRNLAPTPRRRKASPEPEGEAAGKMTTEEQQQRHWVAPGGPYSAETPGVPSPIAALKNVAEALGHSPKDPGGGGGPVRAGGASPAASSTAQPPTQHRLVARNGEAEVSPTAGAEAVSGGGSGTGATPGAPLCCTLCRERLEDTHFVQCPSVPGHKFCFPCSREFIKAQGPAGEVYCPSGDKCPLVGSSVPWAFMQGEIATILAGDIKVKKERDP

SEQ ID NO: 4488 - protein, 1161 aa, Homo sapiens
MDEETRHSLECIQANQIFPRKQLIREDENLQVPFLELHGESTEFVGRAEDAIIALSNYRLHIKFKESLVNVPLQLIESVECRDIFQLHLTCKDCKVIRCQFSTFEQCQEWLKRLNNAIRPPAKIEDLFSFAYHAWCMEVYASEKEQHGDLCRPGEHVTSRFKNEVERMGFDMNNAWRISNINEKYKLCGSYPQELIVPAWITDKELESVSSFRSWKRIPAVIYRHQSNGAVIARCGQPEVSWWGWRNADDEHLVQSVAKACASDSRSSGSKLSTRNTSRDFPNGGDLSDVEFDSSLSNASGAESLAIQPQKLLILDARSYAAAVANRAKGGGCECPEYYPNCEVVFMGMANIHSIRRSFQSLRLLCTQMPDPGNWLSALESTKWLHHLSVLLKSALLVVHAVDQDQRPVLVHCSDGWDRTPQIVALAKLLLDPYYRTIEGFQVLVEMEWLDFGHKFADRCGHGENSDDLNERCPVFLQWLDCVHQLQRQFPCSFEFNEAFLVKLVQHTYSCLFGTFLCNNAKERGEKHTQERTCSVWSLLRAGNKAFKNLLYSSQSEAVLYPVCHVRNLMLWSAVYLPCPSPTTPVDDSCAPYPAPGTSPDDPPLSRLPKTRSYDNLTTACDNTVPLASRRCSDPSLNEKWQEHRRSLELSSLAGPGEDPLSADSLGKPTRVPGGAELSVAAGVAEGQMENILQEATKEESGVEEPAHRAGIEIQEGKEDPLLEKESRRKTPEASAIGLHQDPELGDAALRSHLDMSWPLFSQGISEQQSGLSVLLSSLQVPPRGEDSLEVPVEQFRIEEIAEGREEAVLPIPVDAKVGYGTSQSCSLLPSQVPFETRGPNVDSSTDMLVEDKVKSVSGPQGHHRSCLVNSGKDRLPQTMEPSPSETSLVERPQVGSVVHRTSLGSTLSLTRSPCALPLAECKEGLVCNGAPETENRASEQPPGLSTLQMYPTPNGHCANGEAGRSKDSLSRQLSAMSCSSAHLHSRNLHHKWLHSHSGRPSATSSPDQPSRSHLDDDGMSVYTDTIQQRLRQIESGHQQEVETLKKQVQELKSRLESQYLTSSLHFNGDFGDEVMTRWLPDHLAAHCYACDSAFWLASRKHHCRNCGNVFCSSCCNQKVPVPSQQLFEPSRVCKSCYSSLHPTSSSIDLELDKPIAATSN

SEQ ID NO: 4489 - protein, 1335 aa, Homo sapiens
MESEMLQSPLLGLGEEDEADLTDWNLPLAFMKKRHCEKIEGSKSLAQSWRMKDRMKTVSVALVLCLNVGVDPPDVVKTTPCARLECWIDPLSMGPQKALETIGANLQKQYENWQPRARYKQSLDPTVDEVKKLCTSLRRNAKEERVLFHYNGHGVPRPTVNGEVWVFNKNYTQYIPLSIYDLQTWMGSPSIFVYDCSNAGLIVKSFKQFALQREQELEVAAINPNHPLAQMPLPPSMKNCIQLAACEATELLPMIPDLPADLFTSCLTTPIKIALRWFCMQKCVSLVPGVTLDLIEKIPGRLNDRRTPLGELNWIFTAITDTIAWNVLPRDLFQKLFRQDLLVASLFRNFLLAERIMRSYNCTPVSSPRLPPTYMHAMWQAWDLAVDICLSQLPTIIEEGTAFRHSPFFAEQLTAFQVWLTMGVENRNPPEQLPIVLQVLLSQVHRLRALDLLGRFLDLGPWAVSLALSVGIFPYVLKLLQSSARELRPLLVFIWAKILAVDSSCQADLVKDNGHKYFLSVLADPYMPAEHRTMTAFILAVIVNSYHTGQEACLQGNLIAICLEQLNDPHPLLRQWVAICLGRIWQNFDSARWCGVRDSAHEKLYSLLSDPIPEVRCAAVFALGTFVGNSAERTDHSTTIDHNVAMMLAQLVSDGSPMVRKELVVALSHLVVQYESNFCTVALQFIEEEKNYALPSPATTEGGSLTPVRDSPCTPRLRSVSSYGNIRAVATARSLNKSLQNLSLTEESGGAVAFSPGNLSTSSSASSTLGSPENEEHILSFETIDKMRRASSYSSLNSLIGVSFNSVYTQIWRVLLHLAADPYPEVSDVAMKVLNSIAYKATVNARPQRVLDTSSLTQSAPASPTNKGVHIHQAGGSPPASSTSSSSLTNDVAKQPVSRDLPSGRPGTTGPAGAQYTPHSHQFPRTRKMFDKGPEQTADDADDAAGHKSFISATVQTGFCDWSARYFAQPVMKIPEEHDLESQIRKEREWRFLRNSRVRRQAQQVIQKGITRLDDQIFLNRNPGVPSVVKFHPFTPCIAVADKDSICFWDWEKGEKLDYFHNGNPRYTRVTAMEYLNGQDCSLLLTATDDGAIRVWKNFADLEKNPEMVTAWQGLSDMLPTTRGAGMVVDWEQETGLLMSSGDVRIVRIWDTDREMKVQDIPTGADSCVTSLSCDSHRSLIVAGLGDGSIRVYDRRMALSECRVMTYREHTAWVVKASLQKRPDGHIVSVSVNGDVRIFDPRMPESVNVLQIVKGLTALDIHPQADLIACGSVNQFTAIYNSSGELINNIKYYDGFMGQRVGAISCLAFHPHWPHLAVGSNDYYISVYSVEKRVR

SEQ ID NO: 4490 - protein, 347 aa, Homo sapiens
MAQSRDGGNPFAEPSELDNPFQDPAVIQHRPSRQYATLDVYNPFETREPPPAYEPPAPAPLPPPSAPSLQPSRKLSPTEPKNYGSYSTQASAAAATAELLKKQEELNRKAEELDRRERELQHAALGGTATRQNNWPPLPSFCPVQPCFFQDISMEIPQEFQKTVSTMYYLWMCSTLALLLNFLACLASFCVETNNGAGFGLSILWVLLFTPCSFVCWYRPMYKAFRSDSSFNFFVFFFIFFVQDVLFVLQAIGIPGWGFSGWISALVVPKGNTAVSVLMLLVALLFTGIAVLGIVMLKRIHSLYRRTGASFQKAQQEFAAGVFSNPAVRTAAANAAAGAAENAFRAP

SEQ ID NO: 4491 - protein, 719 aa, Homo sapiens
MALKDYALEKEKVKKFLQEFYQDDELGKKQFKYGNQLVRLAHREQVALYVDLDDVAEDDPELVDSICENARRYAKLFADAVQELLPQYKEREVVNKDVLDVYIEHRLMMEQRSRDPGMVRSPQNQYPAELMRRFELYFQGPSSNKPRVIREVRADSVGKLVTVRGIVTRVSEVKPKMVVATYTCDQCGAETYQPIQSPTFMPLIMCPSQECQTNRSGGRLYLQTRGSRFIKFQEMKMQEHSDQVPVGNIPRSITVLVEGENTRIAQPGDHVSVTGIFLPILRTGFRQVVQGLLSETYLEAHRIVKMNKSEDDESGAGELTREELRQIAEEDFYEKLAASIAPEIYGHEDVKKALLLLLVGGVDQSPRGMKIRGNINICLMGDPGVAKSQLLSYIDRLAPRSQYTTGRGSSGVGLTAAVLRDSVSGELTLEGGALVLADQGVCCIDEFDKMAEADRTAIHEVMEQQTISIAKAGILTTLNARCSILAAANPAYGRYNPRRSLEQNIQLPAALLSRFDLLWLIQDRPDRDNDLRLAQHITYVHQHSRQPPSQFEPLDMKLMRRYIAMCREKQPMVPESLADYITAAYVEMRREAWASKDATYTSARTLLAILRLSTALARLRMVDVVEKEDVNEAIRLMEMSKDSLLGDKGQTARTQRPADVIFATVRELVSGGRSVRFSEAEQRCVSRGFTPAQFQAALDEYEELNVWQVNASRTRITFV

SEQ ID NO: 4492 - protein, 261 aa, Homo sapiens
MRESALERGPVPEAPAGGPVHAVTVVTLLEKLASMLETLRERQGGLARRQGGLAGSVRRIQSGLGALSRSHDTTSNTLAQLLAKAERVSSHANAAQERAVRRAAQVQRLEANHGLLVARGKLHVLLFKEEGEVPASAFQKAPEPLGPADQSELGPEQLEAEVGESSDEEPVESRAQRLRRTGLQKVQSLRRALSGRKGPAAPPPTPVKPPRLGPGRSAEAQPEAQPALEPTLEPEPPQDTEEDPGRPGAAEEALLQMESVA

SEQ ID NO: 4493 - protein, 376 aa, Homo sapiens
MFPRPLTPLAAPNGAEPLGRALRRAPLGRARAGLGGPPLLLPSMLMFAVIVASSGLLLMIERGILAEMKPLPLHPPGREGTAWRGKAPKPGGLSLRAGDADLQVRQDVRNRTLRAVCGQPGMPRDPWDLPVGQRRTLLRHILVSDRYRFLYCYVPKVACSNWKRVMKVLAGVLDSVDVRLKMDHRSDLVFLADLRPEEIRYRLQHYFKFLFVREPLERLLSAYRNKFGEIREYQQRYGAEIVRRYRAGAGPSPAGDDVTFPEFLRYLVDEDPERMNEHWMPVYHLCQPCAVHYDFVGSYERLEADANQVLEWVRAPPHVRFPARQAWYRPASPESLHYHLCSAPRALLQDVLPKYILDFSLFAYPLPNVTKEACQQ

SEQ ID NO: 4494 - protein, 627 aa, Homo sapiens
MEGLAGYVYKAASEGKVLTLAALLLNRSESDIRYLLGYVSQQGGQRSTPLIIAARNGHAKVVRLLLEHYRVQTQQTGTVRFDGYVIDGATALWCAAGAGHFEVVKLLVSHGANVNHTTVTNSTPLRAACFDGRLDIVKYLVENNANISIANKYDNTCLMIAAYKGHTDVVRYLLEQRADPNAKAHCGATALHFAAEAGHIDIVKELIKWRAAIVVNGHGMTPLKVAAESCKADVVELLLSHADCDRRSRIEALELLGASFANDRENYDIIKTYHYLYLAMLERFQDGDNILEKEVLPPIHAYGNRTECRNPQELESIRQDRDALHMEGLIVRERILGADNIDVSHPIIYRGAVYADNMEFEQCIKLWLHALHLRQKGNRNTHKDLLRFAQVFSQMIHLNETVKAPDIECVLRCSVLEIEQSMNRVKNISDADVHNAMDNYECNLYTFLYLVCISTKTQCSEEDQCKINKQIYNLIHLDPRTREGFTLLHLAVNSNTPVDDFHTNDVCSFPNALVTKLLLDCGAEVNAVDNEGNSALHIIVQYNRPISDFLTLHSIIISLVEAGAHTDMTNKQNKTPLDKSTTGVSEILLKTQMKMSLKCLAARAVRANDINYQDQIPRTLEEFVGFH

SEQ ID NO: 4495 - protein, 232 aa, Homo sapiens
MPSLWDRFSSSSTSSSPSSLPRTPTPDRPPRSAWGSATREEGFDRSTSLESSDCESLDSSNSGFGPEEDTAYLDGVSLPDFELLSDPEDEHLCANLMQLLQESLAQARLGSRRPARLLMPSQLVSQVGKELLRLAYSEPCGLRGALLDVCVEQGKSCHSVGQLALDPSLVPTFQLTLVLRLDSRLWPKIQGLFSSANSPFLPGFSQSLTLSTGFRVIKKKLYSSEQLLIEEC

SEQ ID NO: 4496 - protein, 534 aa, Homo sapiens
MIWYILIIGILLPQSLAHPGFFTSIGQMTDLIHTEKDLVTSLKDYIKAEEDKLEQIKKWAEKLDRLTSTATKDPEGFVGHPVNAFKLMKRLNTEWSELENLVLKDMSDGFISNLTIQRQYFPNDEDQVGAAKALLRLQDTYNLDTDTISKGNLPGVKHKSFLTAEDCFELGKVAYTEADYYHTELWMEQALRQLDEGEISTIDKVSVLDYLSYAVYQQGDLDKALLLTKKLLELDPEHQRANGNLKYFEYIMAKEKDVNKSASDDQSDQKTTPKKKGVAVDYLPERQKYEMLCRGEGIKMTPRRQKKLFCRYHDGNRNPKFILAPAKQEDEWDKPRIIRFHDIISDAEIEIVKDLAKPRLRRATISNPITGDLETVHYRISKSAWLSGYENPVVSRINMRIQDLTGLDVSTAEELQVANYGVGGQYEPHFDFARKDEPDAFKELGTGNRIATWLFYMSDVSAGGATVFPEVGASVWPKKGTAVFWYNLFASGEGDYSTRHAACPVLVGNKWVSNKWLHERGQEFRRPCTLSELE

SEQ ID NO: 4497 - protein, 868 aa, Homo sapiens
MATFISVQLKKTSEVDLAKPLVKFIQQTYPSGGEEQAQYCRAAEELSKLRRAAVGRPLDKHEGALETLLRYYDQICSIEPKFPFSENQICLTFTWKDAFDKGSLFGGSVKLALASLGYEKSCVLFNCAALASQIAAEQNLDNDEGLKIAAKHYQFASGAFLHIKETVLSALSREPTVDISPDTVGTLSLIMLAQAQEVFFLKATRDKMKDAIIAKLANQAADYFGDAFKQCQYKDTLPKEVFPVLAAKHCIMQANAEYHQSILAKQQKKFGEEIARLQHAAELIKTVASRYDEYVNVKDFSDKINRALAAAKKDNDFIYHDRVPDLKDLDPIGKATLVKSTPVNVPISQKFTDLFEKMVPVSVQQSLAAYNQRKADLVNRSIAQMREATTLANGVLASLNLPAAIEDVSGDTVPQSILTKSRSVIEQGGIQTVDQLIKELPELLQRNREILDESLRLLDEEEATDNDLRAKFKERWQRTPSNELYKPLRAEGTNFRTVLDKAVQADGQVKECYQSHRDTIVLLCKPEPELNAAIPSANPAKTMQGSEVVNVLKSLLSNLDEVKKEREGLENDLKSVNFDMTSKFLTALAQDGVINEEALSVTELDRVYGGLTTKVQESLKKQEGLLKNIQVSHQEFSKMKQSNNEANLREEVLKNLATAYDNFVELVANLKEGTKFYNELTEILVRFQNKCSDIVFARKTERDELLKDLQQSIAREPSAPSIPTPAYQSSPAGGHAPTPPTPAPRTMPPTKPQPPARPPPPVLPANRAPSATAPSPVGAGTAAPAPSQTPGSAPPPQAQGPPYPTYPGYPGYCQMPMPMGYNPYAYGQYNMPYPPVYHQSPGQAPYPGPQQPSYPFPQPPQQSYYPQQ

SEQ ID NO: 4498 - protein, 960 aa, Homo sapiens
MLVVEAKFDGEQLATDPVDHTDQPEFATELAWEIDRKALHQHRLQRTPIKLQCFALDPVTSAKETIGYIVLDLRTAQETKQAPKWYQLLSNKYTKFKSEIQISIALETDTKPPVDSFKAKGAPPRDGKVPAILAGLDPRDIVAVLNEEGGYHQIGPAEYCTDSFIMSVTIAFATQLEQLIPCTMKLPERQPEFFFYYSLLGNDVTNEPFNDLINPNFEPERASVRIRSSVEILRVYLALQSKLQIHLCCGDQSLGSTEIPLTGLLKKGSTEINQHPVTVEGAFTLDPPNRAKQKLAPIPVELAPTVGVSVALQREGIDSQSLIELKTQNEHEPEHSKKKVLTPIKEKTLTGPKSPTVSPVPSHNQSPPTKDDATESEVESLQYDKDTKPNPKASSSVPASLAQLVTTSNASEVASGQKIAVPATSHHFCFSIDLRSIHALEIGFPINCILRYSYPFFGSAAPIMTNPPVEVRKNMEVFLPQSYCAFDFATMPHQLQDTFLRIPLLVELWHKDKMSKDLLLGIARIQLSNILSSEKTRFLGSNGEQCWRQTYSESVPVIAAQGSNNRIADLSYTVTLEDYGLVKMREIFISDSSQGVSAVQQKPSSLPPAPCPSEIQTEPRETLEYKAALELEMWKEMQEDIFENQLKQKELAHMQALAEEWKKRDRERESLVKKKVAEYTILEGKLQKTLIDLEKREQQLASVESELQREKKELQSERQRNLQELQDSIRRAKEDCIHQVELERLKIKQLEEDKHRLQQQLNDAENKYKILEKEFQQFKDQQNNKPEIRLQSEINLLTLEKVELERKLESATKSKLHYKQQWGRALKELARLKQREQESQMARLKKQQEELEQMRLRYLAAEEKDTVKTERQELLDIRNELNRLRQQEQKQYQDSTEIASGKKDGPHGSVLEEGLDDYLTRLIEERDTLMRTGVYNHEDRIISELDRQIREILAKSNASN

SEQ ID NO: 4499 - protein, 447 aa, Homo sapiens
MRFRIYKRKVLILTLVVAACGFVLWSSNGRQRKNEALAPPLLDAEPARGAGGRGGDHPSVAVGIRRVSNVSAASLVPAVPQPEADNLTLRYRSLVYQLNFDQTLRNVDKAGTWAPRELVLVVQVHNRPEYLRLLLDSLRKAQGIDNVLVIFSHDFWSTEINQLIAGVNFCPVLQVFFPFSIQLYPNEFPGSDPRDCPRDLPKNAALKLGCINAEYPDSFGHYREAKFSQTKHHWWWKLHFVWERVKILRDYAGLILFLEEDHYLAPDFYHVFKKMWKLKQQECPECDVLSLGTYSASRSFYGMADKVDVKTWKSTEHNMGLALTRNAYQKLIECTDTFCTYDDYNWDWTLQYLTVSCLPKFWKVLVPQIPRIFHAGDCGMHHKKTCRPSTQSAQIESLLNNNKQYMFPETLTISEKFTVVAISPPRKNGGWGDIRDHELCKSYRRLQ

SEQ ID NO: 4500 - protein, 432 aa, Homo sapiens
MASPVAAQAGKLLRALALRPRFLAAGSQAVQLTSRRWLNLQEYQSKKLMSDNGVRVQRFFVADTANEALEAAKRLNAKEIVLKAQILAGGRGKGVFNSGLKGGVHLTKDPNVVGQLAKQMIGYNLATKQTPKEGVKVNKVMVAEALDISRETYLAILMDRSCNGPVLVGSPQGGVDIEEVAASNPELIFKEQIDIFEGIKDSQAQRMAENLGFVGPLKSQAADQITKLYNLFLKIDATQVEVNPFGETPEGQVVCFDAKINFDDNAEFRQKDIFAMDDKSENEPIENEAAKYDLKYIGLDGNIACFVNGAGLAMATCDIIFLNGGKPANFLDLGGGVKEAQVYQAFKLLTADPKVEAILVNIFGGIVNCAIIANGITKACRELELKVPLVVRLEGTNVQEAQKILNNSGLPITSAIDLEDAAKKAVASVAKK

SEQ ID NO: 4501 - protein, 439 aa, Homo sapiens
MRGEQGAAGARVLQFTNCRILRGGKLLREDLWVRGGRILDPEKLFFEERRVADERRDCGGRILAPGFIDVQINGGFGVDFSQATEDVGSGVALVARRILSHGVTSFCPTLVTSPPEVYHKVVPQIPVKSGGPHGAGVLGLHLEGPFISREKRGAHPEAHLRSFEADAFQDLLATYGPLDNVRIVTLAPELGRSHEVIRALTARGICVSLGHSVADLRAAEDAVWSGATFITHLFNAMLPFHHRDPGIVGLLTSDRLPAGRCIFYGMIADGTHTNPAALRIAHRAHPQGLVLVTDAIPALGLGNGRHTLGQQEVEVDGLTAYVAGERPDPLGPRSQPACQVAHDPPRACPLCSQGTKTLSGSIAPMDVCVRHFLQATGCSMESALEAASLHPAQLLGLEKSKGTLDFGADADFVVLDDSLHVQATYISGELVWQADAARQ

SEQ ID NO: 4502 - protein, 677 aa, Homo sapiens
MAAHHRQNTAGRRKVQVSYVIRDEVEKYNRNGVNALQLDPALNRLFTAGRDSIIRIWSVNQHKQDPYIASMEHHTDWVNDIVLCCNGKTLISASSDTTVKVWNAHKGFCMSTLRTHKDYVKALAYAKDKELVASAGLDRQIFLWDVNTLTALTASNNTVTTSSLSGNKDSIYSLAMNQLGTIIVSGSTEKVLRVWDPRTCAKLMKLKGHTDNVKALLLNRDGTQCLSGSSDGTIRLWSLGQQRCIATYRVHDEGVWALQVNDAFTHVYSGGRDRKIYCTDLRNPDIRVLICEEKAPVLKMELDRSADPPPAIWVATTKSTVNKWTLKGIHNFRASGDYDNDCTNPITPLCTQPDQVIKGGASIIQCHILNDKRHILTKDTNNNVAYWDVLKACKVEDLGKVDFEDEIKKRFKMVYVPNWFSVDLKTGMLTITLDESDCFAAWVSAKDAGFSSPDGSDPKLNLGGLLLQALLEYWPRTHVNPMDEEENEVNHVNGEQENRVQKGNGYFQVPPHTPVIFGEAGGRTLFRLLCRDSGGETESMLLNETVPQWVIDITVDKNMPKFNKIPFYLQPHASSGAKTLKKDRLSASDMLQVRKVMEHVYEKIINLDNESQTTSSSNNEKPGEQEKEEDIAVLAEEKIELLCQDQVLDPNMDLRTVKHFIWKSGGDLTLHYRQKST

SEQ ID NO: 4503 - protein, 1479 aa, Homo sapiens
MGPGRPAPAPWPRHLLRCVLLLGCLHLGRPGAPGDAALPEPNVFLIFSHGLQGCLEAQGGQVRVTPACNTSLPAQRWKWVSRNRLFNLGTMQCLGTGWPGTNTTASLGMYECDREALNLRWHCRTLGDQLSLLLGARTSNISKPGTLERGDQTRSGQWRIYGSEEDLCALPYHEVYTIQGNSHGKPCTIPFKYDNQWFHGCTSTGREDGHLWCATTQDYGKDERWGFCPIKSNDCETFWDKDQLTDSCYQFNFQSTLSWREAWASCEQQGADLLSITEIHEQTYINGLLTGYSSTLWIGLNDLDTSGGWQWSDNSPLKYLNWESDQPDNPSEENCGVIRTESSGGWQNRDCSIALPYVCKKKPNATAEPTPPDRWANVKVECEPSWQPFQGHCYRLQAEKRSWQESKKACLRGGGDLVSIHSMAELEFITKQIKQEVEELWIGLNDLKLQMNFEWSDGSLVSFTHWHPFEPNNFRDSLEDCVTIWGPEGRWNDSPCNQSLPSICKKAGQLSQGAAEEDHGCRKGWTWHSPSCYWLGEDQVTYSEARRLCTDHGSQLVTITNRFEQAFVSSLIYNWEGEYFWTALQDLNSTGSFFWLSGDEVMYTHWNRDQPGYSRGGCVALATGSAMGLWEVKNCTSFRARYICRQSLGTPVTPELPGPDPTPSLTGSCPQGWASDTKLRYCYKVFSSERLQDKKSWVQAQGACQELGAQLLSLASYEEEHFVANMLNKIFGESEPEIHEQHWFWIGLNRRDPRGGQSWRWSDGVGFSYHNFDRSRHDDDDIRGCAVLDLASLQWVAMQCDTQLDWICKIPRGTDVREPDDSPQGRREWLRFQEAEYKFFEHHSTWAQAQRICTWFQAELTSVHSQAELDFLSHNLQKFSRAQEQHWWIGLHTSESDGRFRWTDGSIINFISWAPGKPRPVGKDKKCVYMTASREDWGDQRCLTALPYICKRSNVTKETQPPDLPTTALGGCPSDWIQFLNKCFQVQGQEPQSRVKWSEAQFSCEQQEAQLVTITNPLEQAFITASLPNVTFDLWIGLHASQRDFQWVEQEPLMYANWAPGEPSGPSPAPSGNKPTSCAVVLHSPSAHFTGRWDDRSCTEETHGFICQKGTDPSLSPSPAALPPAPGTELSYLNGTFRLLQKPLRWHDALLLCESRNASLAYVPDPYTQAFLTQAARGLRTPLWIGLAGEEGSRRYSWVSEEPLNYVGWQDGEPQQPGGCTYVDVDGAWRTTSCDTKLQGAVCGVSSGPPPPRRISYHGSCPQGLADSAWIPFREHCYSFHMELLLGHKEARQRCQRAGGAVLSILDEMENVFVWEHLQSYEGQSRGAWLGMNFNPKGGTLVWQDNTAVNYSNWGPPGLGPSMLSHNSCYWIQSNSGLWRPGACTNITMGVVCKLPRAEQSSFSPSALPENPAALVVVLMAVLLLLALLTAALILYRRRQSIERGAFEGARYSRSSSSPTEATEKNILVSDMEMNEQQE

SEQ ID NO: 4504 - protein, 503 aa, Homo sapiens
MEYMAESTDRSPGHILCCECGVPISPNPANICVACLRSKVDISQGIPKQVSISFCKQCQRYFQPPGTWIQCALESRELLALCLKKIKAPLSKVRLVDAGFVWTEPHSKRLKVKLTIQKEVMNGAILQQVFVVDYVVQSQMCGDCHRVEAKDFWKAVIQVRQKTLHKKTFYYLEQLILKYGMHQNTLRIKEIHDGLDFYYSSKQHAQKMVEFLQCTVPCRYKASQRLISQDIHSNTYNYKSTFSVEIVPICKDNVVCLSPKLAQSLGNMNQICVCIRVTSAIHLIDPNTLQVADIDGSTFWSHPFNSLCHPKQLEEFIVMECSIVQDIKRAAGAGMISKKHTLGEVWVQKTSEMNTDKQYFCRTHLGHLLNPGDLVLGFDLANCNLNDEHVNKMNSDRVPDVVLIKKSYDRTKRQRRRNWKLKELARERENMDTDDERQYQDFLEDLEEDEAIRKNVNIYRDSAIPVESDTDDEGAPRISLAEMLEDLHISQDATGEEGASMLT

SEQ ID NO: 4505 - protein, 141 aa, Homo sapiens
MAWPLCTLLLLLATQAVALAWSPQEEDRIIEGGIYDADLNDERVQRALHFVISEYNKATEDEYYRRLLRVLRAREQIVGGVNYFFDIEVGRTICTKSQPNLDTCAFHEQPELQKKQLCSFQIYEVPWEDRMSLVNSRCQEA

SEQ ID NO: 4506 - protein, 432 aa, Homo sapiens
MPAGRAARTCALLALCLLGAGAQDFGPTRFICTSVPVDADMCAASVAAGGAEELRSSVLQLRETVLQQKETILSQKETIRELTAKLGRCESQSTLDPGAGEARAGGGRKQPGSGKNTMGDLSRTPAAETLSQLGQTLQSLKTRLENLEQYSRLNSSSQTNSLKDLLQSKIDELERQVLSRVNTLEEGKGGPRNDTEERVKIETALTSLHQRISELEKGQKDNRPGDKFQLTFPLRTNYMYAKVKKSLPEMYAFTVCMWLKSSATPGVGTPFSYAVPGQANELVLIEWGNNPMEILINDKVAKLPFVINDGKWHHICVTWTTRDGVWEAYQDGTQGGSGENLAPYHPIKPQGVLVLGQEQDTLGGGFDATQAFVGELAHFNIWDRKLTPGEVYNLATCSTKALSGNVIAWAESHIEIYGGATKWTFEACRQIN

SEQ ID NO: 4507 - protein, 775 aa, Homo sapiens
MAALDSLSLFTSLGLSEQKARETLKNSALSAQLREAATQAQQTLGSTIDKATGILLYGLASRLRDTRRLSFLVSYIASKKIHTEPQLSAALEYVRSHPLDPIDTVDFERECGVGVIVTPEQIEEAVEAAINRHRPQLLVERYHFNMGLLMGEARAVLKWADGKMIKNEVDMQVLHLLGPKLEADLEKKFKVAKARLEETDRRTAKDVVENGETADQTLSLMEQLRGEALKFHKPGENYKTPGYVVTPHTMNLLKQHLEITGGQVRTRFPPEPNGILHIGHAKAINFNFGYAKANNGICFLRFDDTNPEKEEAKFFTAICDMVAWLGYTPYKVTYASDYFDQLYAWAVELIRRGLAYVCHQRGEELKGHNTLPSPWRDRPMEESLLLFEAMRKGKFSEGEATLRMKLVMEDGKMDPVAYRVKYTPHHRTGDKWCIYPTYDYTHCLCDSIEHITHSLCTKEFQARRSSYFWLCNALDVYCPVQWEYGRLNLHYAVVSKRKILQLVATGAVRDWDDPRLFTLTALRRRGFPPEAINNFCARVGVTVAQTTMEPHLLEACVRDVLNDTAPRAMAVLESLRVIITNFPAAKSLDIQVPNFPADETKGFHQVPFAPIVFIERTDFKEEPEPGFKRLAWGQPVGLRHTGYVIELQHVVKGPSGCVESLEVTCRRADAGEKPKAFIHWVSQPLMCEVRLYERLFQHKNPEDPTEVPGGFLSDLNLASLHVVDAALVDCSVALAKPFDKFQFERLGYFSVDPDSHQGKLVFNRTVTLKEDPGKV

SEQ ID NO: 4508 - protein, 677 aa, Homo sapiens
MDFPGHFEQIFQQLNYQRLHGQLCDCVIVVGNRHFKAHRSVLAACSTHFRALFSVAEGDQTMNMIQLDSEVVTAEAFAALIDMMYTSTLMLGESNVMDVLLAASHLHLNSVVKACKHYLTTRTLPMSPPSERVQEQSARMQRSFMLQQLGLSIVSSALNSSQNGEEQPAPMSSSMRSNLDQRTPFPMRRLHKRKQSAEERARQRLRPSIDESAISDVTPENGPSGVHSREEFFSPDSLKIVDNPKADGMTDNQEDSAIMFDQSFGTQEDAQVPSQSDNSAGNMAQLSMASRATQVETSFDQEAAPEKSSFQCENPEVGLGEKEHMRVVVKSEPLSSPEPQDEVSDVTSQAEGSESVEVEGVVVSAEKIDLSPESSDRSFSDPQSSTDRVGDIHILEVTNNLEHKSTFSISNFLNKSRGNNFTANQNNDDNIPNTTSDCRLESEAPYLLSPEAGPAGGPSSAPGSHVENPFSEPADSHFVRPMQEVMGLPCVQTSGYQGGEQFGMDFSRSGLGLHSSFSRVMIGSPRGGASNFPYYRRIAPKMPVVTSVRSSQIPENSTSSQLMMNGATSSFENGHPSQPGPPQLTRASADVLSKCKKALSEHNVLVVEGARKYACKICCKTFLTLTDCKKHIRVHTGEKPYACLKCGKRFSQSSHLYKHSKTTCLRWQSSNLPSTLL

SEQ ID NO: 4509 - protein, 189 aa, Homo sapiens
MGTPNDQAVLQAIFNPDTPFGDIVGLDLGEEAEKEEREEDEVFPQAQLEQSKALELQGVMAAEAGDLSTALERFGQAICLLPERASAYNNRAQARRLQGDVAGALEDLERAVELSGGRGRAARQSFVQRGLLARLQGRDDDARRDFERAARLGSPFARRQLVLLNPYAALCNRMLADMMGQLRRPRDSR

SEQ ID NO: 4510 - protein, 964 aa, Homo sapiens
MQKIKSLMTRQGLKSPQESLSDLGAIESLRVPGKEEFRELREQPSDPQAEQELINSIEQVYFSVDSFDIVKYELEKLPPVLNLQELEAYRDKLKQQQAAVSKKVADLILEKQPAYVKELERVTSLQTGLQLAAVICTNGRRHLNIAKEGFTQASLGLLANQRKRQLLIGLLKSLRTIKTLQRTDVRLSEMLEEEDYPGAIQLCLECQKAASTFKHYSCISELNSKLQDTLEQIEEQLDVALSKICKNFDINHYTKVQQAYRLLGKTQTAMDQLHMHFTQAIHNTVFQVVLGYVELCAGNTDTKFQKLQYKDLCTHVTPDSYIPCLADLCKALWEVMLSYYRTMEWHEKHDNEDTASASEGSNMIGTEETNFDRGYIKKKLEHGLTRIWQDVQLKVKTYLLGTDLSIFKYDDFIFVLDIISRLMQVGEEFCGSKSEVLQESIRKQSVNYFKNYHRTRLDELRMFLENETWELCPVKSNFSILQLHEFKFMEQSRSPSVSPSKQPVSTSSKTVTLFEQYCSGGNPFEIQANHKDEETEDVLASNGYESDEQEKSAYQEYDSDSDVPEELKRDYVDEQTGDGPVKSVSRETLKSRKKSDYSLNKVNAPILTNTTLNVIRLVGKYMQMMNILKPIAFDVIHFMSQLFDYYLYAIYTFFGRNDSLESTGLGLSSSRLRTTLNRIQESLIDLEVSADPTATLTAAEERKEKVPSPHLSHLVVLTSGDTLYGLAERVVATESLVFLAEQFEFLQPHLDAVMPAVKKPFLQQFYSQTVSTASELRKPIYWIVAGKALDYEQMLLLMANVKWDVKEIMSQHNIYVDALLKEFEQFNRRLNEVSKRVRIPLPVSNILWEHCIRLANRTIVEGYANVKKCSNEGRALMQLDFQQFLMKLEKLTDIRPIPDKEFVETYIKAYYLTENDMERWIKEHREYSTKQLTNLVNVCLGSHINKKARQKLLAAIDDIDRPKR

SEQ ID NO: 4511 - protein, 401 aa, Homo sapiens
MPVQLSEHPEWNESMHSLRISVGGLPVLASMTKAADPRFRPRWKVILTFFVGAAILWLLCSHRPAPGRPPTHNAHNWRLGQAPANWYNDTYPLSPPQRTPAGIRYRIAVIADLDTESRAQEENTWFSYLKKGYLTLSDSGDKVAVEWDKDHGVLESHLAEKGRGMELSDLIVFNGKLYSVDDRTGVVYQIEGSKAVPWVILSDGDGTVEKGFKAEWLAVKDERLYVGGLGKEWTTTTGDVVNENPEWVKVVGYKGSVDHENWVSNYNALRAAAGIQPPGYLIHESACWSDTLQRWFFLPRRASQERYSEKDDERKGANLLLSASPDFGDIAVSHVGAVVPTHGFSSFKFIPNTDDQIIVALKSEEDSGRVASYIMAFTLDGRFLLPETKIGSVKYEGIEFI

SEQ ID NO: 4512 - protein, 432 aa, Homo sapiens
MSELKDCPLQFHDFKSVDHLKVCPRYTAVLARSEDDGIGIEELDTLQLELETLLSSASRRLRVLEAETQILTDWQDKKGDRRFLKLGRDHELGAPPKHGKPKKQKLEGKAGHGPGPGPGRPKSKNLQPKIQEYEFTDDPIDVPRIPKNDAPNRFWASVEPYCADITSEEVRTLEELLKPPEDEAEHYKIPPLGKHYSQRWAQEDLLEEQKDGARAAAVADKKKGLMGPLTELDTKDVDALLKKSEAQHEQPEDGCPFGALTQRLLQALVEENIISPMEDSPIPDMSGKESGADGASTSPRNQNKPFSVPHTKSLESRIKEELIAQGLLESEDRPAEDSEDEVLAELRKRQAELKALSAHNRTKKHDLLRLAKEEVSRQELRQRVRMADNEVMDAFRKIMAARQKKRTPTKKEKDQAWKTLKERESILKLLDG

SEQ ID NO: 4513 - protein, 681 aa, Homo sapiens
MGSPVHRVSLGDTWSRQMHPDIESERYMQSFDVERLTNILDGGAQNTALRRKVESIIHSYPEFSCKDNYFMTQNERYKAAMRRAFHIRLIARRLGWLEDGRELGYAYRALSGDVALNIHRVFVRALRSLGSEEQIAKWDPLCKNIQIIATYAQTELGHGTYLQGLETEATYDAATQEFVIHSPTLTATKWWPGDLGRSATHALVQAQLICSGARRGMHAFIVPIRSLQDHTPLPGIIIGDIGPKMDFDQTDNGFLQLNHVRVPRENMLSRFAQVLPDGTYVKLGTAQSNYLPMVVVRVELLSGEILPILQKACVIAMRYSVIRRQSRLRPSDPEAKVLDYQTQQQKLFPQLAISYAFHFLAVSLLEFFQHSYTAILNQDFSFLPELHALSTGMKAMMSEFCTQGAEMCRRACGGHGYSKLSGLPSLVTKLSASCTYEGENTVLYLQVARFLVKSYLQTQMSPGSTPQRSLSPSVAYLTAPDLARCPAQRAADFLCPELYTTAWAHVAVRLIKDSVQHLQTLTQSGADQHEAWNQTTVIHLQAAKVHCYYVTVKGFTEALEKLENEPAIQQVLKRLCDLHAIHGILTNSGDFLHDAFLSGAQVDMARTAYLDLLRLIRKDAILLTDAFDFTDQCLNSALGCYDGNVYERLFQWAQKSPTNTQENPAYEEYIRPLLQSWRSKL

SEQ ID NO: 4514 - protein, 747 aa, Homo sapiens
MASKVTDAIVWYQKKIGAYDQQIWEKSVEQREIKGLRNKPKKTAHVKPDLIDVDLVRGSAFAKAKPESPWTSLTRKGIVRVVFFPFFFRWWLQVTSKVIFFWLLVLYLLQVAAIVLFCSTSSPHSIPLTEVIGPIWLMLLLGTVHCQIVSTRTPKPPLSTGGKRRRKLRKAAHLEVHREGDGSSTTDNTQEGAVQNHGTSTSHSVGTVFRDLWHAAFFLSGSKKAKNSIDKSTETDNGYVSLDGKKTVKSGEDGIQNHEPQCETIRPEETAWNTGTLRNGPSKDTQRTITNVSDEVSSEEGPETGYSLRRHVDRTSEGVLRNRKSHHYKKHYPNEDAPKSGTSCSSRCSSSRQDSESARPESETEDVLWEDLLHCAECHSSCTSETDVENHQINPCVKKEYRDDPFHQSHLPWLHSSHPGLEKISAIVWEGNDCKKADMSVLEISGMIMNRVNSHIPGIGYQIFGNAVSLILGLTPFVFRLSQATDLEQLTAHSASELYVIAFGSNEDVIVLSMVIISFVVRVSLVWIFFFLLCVAERTYKQRLLFAKLFGHLTSARRARKSEVPHFRLKKVQNIKMWLSLRSYLKRRGPQRSVDVIVSSAFLLTISVVFICCAQLLHVHEIFLDCHYNWELVIWCISLTLFLLRFVTLGSETSKKYSNTSILLTEQINLYLKMEKKPNKKEELTLVNNVLKLATKLLKELDSPFRLYGLTMNPLLYNITQVVILSAVSGVISDLLGFNLKLWKIKS

SEQ ID NO: 4515 - protein, 219 aa, Homo sapiens
MSETAPAAPAAPAPAEKTPVKKKARKSAGAAKRKASGPPVSELITKAVAASKERSGVSLAALKKALAAAGYDVEKNNSRIKLGLKSLVSKGTLVQTKGTGASGSFKLNKKAASGEAKPKAKKAGAAKAKKPAGAAKKPKKATGAATPKKSAKKTPKKAKKPAAAAGAKKAKSPKKAKAAKPKKAPKSPAKAKAVKPKAAKPKTAKPKAAKPKKAAAKKK

SEQ ID NO: 4516 - protein, 61 aa, Homo sapiens
MDPNCSCATGGSCTCAGSCKCKECKCTSCKKSCCSCCPVGCAKCAQGCVCKGASEKCSCCA

SEQ ID NO: 4517 - protein, 187 aa, Homo sapiens
MYLQVETRTSSRLHLKRAPGIRSWSLLVGILSIGLAAAYYSGDSLGWKLFYVTGCLFVAVQNLEDWEEAIFDKSTGKVVLKTFSLYKKLLTLFRAGHDQVVVLLHDVRDVSVEEEKVRYFGKGYMVVLRLATGFSHPLTQSAVMGHRSDVEAIAKLITSFLELHCLESPTELSQSSDSEAGDPASQS

SEQ ID NO: 4518 - protein, 105 aa, Homo sapiens
MGDVEKGKKIFIMKCSQCHTVEKGGKHKTGPNLHGLFGRKTGQAPGYSYTAANKNKGIIWGEDTLMEYLENPKKYIPGTKMIFVGIKKKEERADLIAYLKKATNE

SEQ ID NO: 4519 - protein, 1079 aa, Homo sapiens
MVCSAAPLLLLATTLPLLGSPVAQASQPVSETGVRPREGLQRRQWGPLIGRDKAWNERIDRPFPACPIPLSSSFGRWPKGQTMWAQTSTLTLTEEELGQSQAGGESGSGQLLDQENGAGESALVSVYVHLDFPDKTWPPELSRTLTLPAASASSSPRPLLTGLRLTTECNVNHKGNFYCACLSGYQWNTSICLHYPPCQSLHNHQPCGCLVFSHPEPGYCQLLPPGSPVTCLPAVPGILNLNSQLQMPGDTLSLTLHLSQEATNLSWFLRHPGSPSPILLQPGTQVSVTSSHGQAALSVSNMSHHWAGEYMSCFEAQGFKWNLYEVVRVPLKATDVARLPYQLSISCATSPGFQLSCCIPSTNLAYTAAWSPGEGSKASSFNESGSQCFVLAVQRCPMADTTYACDLQSLGLAPLRVPISITIIQDGDITCPEDASVLTWNVTKAGHVAQAPCPESKRGIVRRLCGADGVWGPVHSSCTDARLLALFTRTKLLQAGQGSPAEEVPQILAQLPGQAAEASSPSDLLTLLSTMKYVAKVVAEARIQLDRRALKNLLIATDKVLDMDTRSLWTLAQARKPWAGSTLLLAVETLACSLCPQDHPFAFSLPNVLLQSQLFGPTFPADYSISFPTRPPLQAQIPRHSLAPLVRNGTEISITSLVLRKLDHLLPSNYGQGLGDSLYATPGLVLVISIMAGDRAFSQGEVIMDFGNTDGSPHCVFWDHSLFQGRGGWSKEGCQAQVASASPTAQCLCQHLTAFSVLMSPHTVPEEPALALLTQVGLGASILALLVCLGVYWLVWRVVVRNKISYFRHAALLNMVFCLLAADTCFLGAPFLSPGPRSPLCLAAAFLCHFLYLATFFWMLAQALVLAHQLLFVFHQLAKHRVLPLMVLLGYLCPLGLAGVTLGLYLPQGQYLREGECWLDGKGGALYTFVGPVLAIIGVNGLVLAMAMLKLLRPSLSEGPPAEKRQALLGVIKALLILTPIFGLTWGLGLATLLEEVSTVPHYIFTILNTLQGVFILLFGCLMDRKIQEALRKRFCRAQAPSSTISLVSCCLQILSCASKSMSEGIPWPSSEDMGTARS

SEQ ID NO: 4520 - protein, 403 aa, Homo sapiens
MEPVGCCGECRGSSVDPRSTFVLSNLAEVVERVLTFLPAKALLRVACVCRLWRECVRRVLRTHRSVTWISAGLAEAGHLEGHCLVRVVAEELENVRILPHTVLYMADSETFISLEECRGHKRARKRTSMETALALEKLFPKQCQVLGIVTPGIVVTPMGSGSNRPQEIEIGESGFALLFPQIEGIKIQPFHFIKDPKNLTLERHQLTEVGLLDNPELRVVLVFGYNCCKVGASNYLQQVVSTFSDMNIILAGGQVDNLSSLTSEKNPLDIDASGVVGLSFSGHRIQSATVLLNEDVSDEKTAEAAMQRLKAANIPEHNTIGFMFACVGRGFQYYRAKGNVEADAFRKFFPSVPLFGFFGNGEIGCDRIVTGNFILRKCNEVKDDDLFHSYTTIMALIHLGSSK

SEQ ID NO: 4521 - protein, 273 aa, Homo sapiens
MRGSQEVLLMWLLVLAVGGTEHAYRPGRRVCAVRAHGDPVSESFVQRVYQPFLTTCDGHRACSTYRTIYRTAYRRSPGLAPARPRYACCPGWKRTSGLPGACGAAICQPPCRNGGSCVQPGRCRCPAGWRGDTCQSDVDECSARRGGCPQRCVNTAGSYWCQCWEGHSLSADGTLCVPKGGPPRVAPNPTGVDSAMKEEVQRLQSRVDLLEEKLQLVLAPLHSLASQALEHGLPDPGSLLVHSFQQLGRIDSLSEQISFLEEQLGSCSCKKDS

SEQ ID NO: 4522 - protein, 205 aa, Homo sapiens
MPSKKKKYNARFPPARIKKIMQTDEEIGKVAAAVPVIISRALELFLESLLKKACQVTQSRNAKTMTTSHLKQCIELEQQFDFLKDLVASVPDMQGDGEDNHMDGDKGARRGRKPGSGGRKNGGMGTKSKDKKLSGTDSEQEDESEDTDTDGEEETSQPPPQASHPSAHFQSPPTPFLPFASTLPLPPAPPGPSAPDEEDEEDYDS

SEQ ID NO: 4523 - protein, 1013 aa, Homo sapiens
MPPPAEVTDPSHAPAVLRQLNEQRLRGLFCDVTLIAGDTKFPAHRSVLAASSPFFREALLTSAPLPLPPATGGAAPNPATTTAASSSSSSSSSSSSSSSSASSSSSSSSSSPPPASPPASSPPRVLELPGVPAAAFSDVLNFIYSARLALPGGGGDGAAVAEIGALGRRLGISRLQGLGEGGDAWVPPTPAPMATSQPEEDSFGPGPRPAGEWEGDRAEAQAPDLQCSLPRRPLPCPQCGKSFIHPKRLQTHEAQCRRGASTRGSTGLGAGGAGPGGPAGVDASALPPPVGFRGGPEHVVKVVGGHVLYVCAACERSYVTLSSLKRHSNVHSWRRKYPCRYCEKVFALAEYRTKHEVWHTGERRYQCIFCWETFVTYYNLKTHQRAFHGISPGLLASEKTPNGGYKPKLNTLKLYRLLPMRAAKRPYKTYSQGAPEAPLSPTLNTPAPVAMPASPPPGPPPAPEPGPPPSVITFAHPAPSVIVHGGSSSGGGGSGTASTGGSQAASVITYTAPPRPPKKREYPPPPPEPAATPTSPATAVSPATAAGPAMATTTEEAKGRNPRAGRTLTYTAKPVGGIGGGGGPPTGAGRGPSQLQAPPPLCQITVRIGEEAIVKRRISETDLRPGELSGEEMEESEEDEEEEDEEEEEEDEEESKAGGEDQLWRPYYSYKPKRKAGAAGGASVGGSGLPRGRRPPRWRQKLERRSWEETPAAESPAGRARTERRHRCGDCAQTFTTLRKLRKHQEAHGGGSHSSRAGRRPSTRFTCPHCAKVCKTAAALSRHGQRHAAERPGGTPTPVIAYSKGSAGTRPGDVKEEAPQEMQVSSSSGEAGGGSTAAEEASETASLQDPIISGGEEPPVVASGGSYVYPPVQEFPLALIGGGREPGGGRGKSGSEGPVGAGEGDRMEGIGAAKVTFYPEPYPLVYGPQLLAAYPYNFSNLAALPVALNMVLPDEKGAGALPFLPGVFGYAVNPQAAPPAPPTPPPPTLPPPIPPKGEGERAGVERTQKGDVG

SEQ ID NO: 4524 - protein, 475 aa, Homo sapiens
MSDFDEFERQLNENKQERDKENRHRKRSHSRSRSRDRKRRSRSRDRRNRDQRSASRDRRRRSKPLTRGAKEEHGGLIRSPRHEKKKKVRKYWDVPPPGFEHITPMQYKAMQAAGQIPATALLPTMTPDGLAVTPTPVPVVGSQMTRQARRLYVGNIPFGITEEAMMDFFNAQMRLGGLTQAPGNPVLAVQINQDKNFAFLEFRSVDETTQAMAFDGIIFQGQSLKIRRPHDYQPLPGMSENPSVYVPGVVSTVVPDSAHKLFIGGLPNYLNDDQVKELLTSFGPLKAFNLVKDSATGLSKGYAFCEYVDINVTDQAIAGLNGMQLGDKKLLVQRASVGAKNATLVSPPSTINQTPVTLQVPGLMSSQVQMGGHPTEVLCLMNMVLPEELLDDEEYEEIVEDVRDECSKYGLVKSIEIPRPVDGVEVPGCGKIFVEFTSVFDCQKAMQGLTGRKFANRVVVTKYCDPDSYHRRDFW

SEQ ID NO: 4525 - protein, 255 aa, Homo sapiens
MTCQSCVDAVRKSLQGVAGVQDVEVHLEDQMVLVHTTLPSQEVQALLEGTGRQAVLKGMGSGQLQNLGAAVAILGGPGTVQGVVRFLQLTPERCLIEGTIDGLEPGLHGLHVHQYGDLTNNCNSCGNHFNPDGASHGGPQDSDRHRGDLGNVRADADGRAIFRMEDEQLKVWDVIGRSLIIDEGEDDLGRGGHPLSKITGNSGERLACGIIARSAGLFQNPKQICSCDGLTIWEERGRPIAGKGRKESAQPPAHL

SEQ ID NO: 4526 - protein, 442 aa, Homo sapiens
MALPSRILLWKLVLLQSSAVLLHSGSSVPAAAGSSVVSESAVSWEAGARAVLRCQSPRMVWTQDRLHDRQRVLHWDLRGPGGGPARRLLDLYSAGEQRVYEARDRGRLELSASAFDDGNFSLLIRAVEETDAGLYTCNLHHHYCHLYESLAVRLEVTDGPPATPAYWDGEKEVLAVARGAPALLTCVNRGHVWTDRHVEEAQQVVHWDRQPPGVPHDRADRLLDLYASGERRAYGPLFLRDRVAVGADAFERGDFSLRIEPLEVADEGTYSCHLHHHYCGLHERRVFHLTVAEPHAEPPPRGSPGNGSSHSGAPGPDPTLARGHNVINVIVPESRAHFFQQLGYVLATLLLFILLLVTVLLAARRRRGGYEYSDQKSGKSKGKDVNLAEFAVAAGDQMLYRSEDIQLDYKNNILKERAELAHSPLPAKYIDLDKGFRKENCK

SEQ ID NO: 4527 - protein, 211 aa, Homo sapiens [sequence omitted]

SEQ ID NO: 4528 - protein, 373 aa, Homo sapiens
MTTSASSHLNKGIKQVYMSLPQGEKVQAMYIWIDGTGEGLRCKTRTLDSEPKCVEELPEWNFDGSSTLQSEGSNSDMYLVPAAMFRDPFRKDPNKLVLCEVFKYNRRPAETNLRHTCKRIMDMVSNQHPWFGMEQEYTLMGTDGHPFGWPSNGFPGPQGPYYCGVGADRAYGRDIVEAHYRACLYAGVKIAGTNAEVMPAQWEFQIGPCEGISMGDHLWVARFILHRVCEDFGVIATFDPKPIPGNWNGAGCHTNFSTKAMREENGLKYIEEAIEKLSKRHQYHIRAYDPKGGLDNARRLTGFHETSNINDFSAGVANRSASIRIPRTVGQEKKGYFEDRRPSANCDPFSVTEALIRTCLLNETGDEPFQYKN

SEQ ID NO: 4529 - protein, 1684 aa, Homo sapiens
MEDLVQDGVASPATPGTGKSKLETLPKEDLIKFAKKQMMLIQKAKSRCTELEKEIEELRSKPVTEGTGDIIKALTERLDALLLEKAETEQQCLSLKKENIKMKQEVEDSVTKMGDAHKELEQSHINYVKEIENLKNELMAVRSKYSEDKANLQKQLEEAMNTQLELSEQLKFQNNSEDNVKKLQEEIEKIRPGFEEQILYLQKQLDATTDEKKETVTQLQNIIEANSQHYQKNINSLQEELLQLKAIHQEEVKELMCQIEASAKEHEAEINKLNELKENLVKQCEASEKNIQKKYECELENLRKATSNANQDNQICSILLQENTFVEQVVNEKVKHLEDTLKELESQHSILKDEVTYMNNLKLKLEMDAQHIKDEFFHEREDLEFKINELLLAKEEQGCVIEKLKSELAGLNKQFCYTVEQHNREVQSLKEQHQKEISELNETFLSDSEKEKLTLMFEIQGLKEQCENLQQEKQEAILNYESLREIMEILQTELGESAGKISQEFESMKQQQASDVHELQQKLRTAFTEKDALLETVNRLQGENEKLLSQQELVPELENTIKNLQEKNGVYLLSLSQRDTMLKELEGKINSLTEEKDDFINKLKNSHEEMDNFHKKCEREERLILELGKKVEQTIQYNSELEQKVNELTGGLEETLKEKDQNDQKLEKLMVQMKVLSEDKEVLSAEVKSLYEENNKLSSEKKQLSRDLEVFLSQKEDVILKEHITQLEKKLQLMVEEQDNLNKLLENEQVQKLFVKTQLYGFLKEMGSEVSEDSEEKDVVNVLQAVGESLAKINEEKCNLAFQRDEKVLELEKEIKCLQEESVVQCEELKSLLRDYEQEKVLLRKELEEIQSEKEALQSDLLEMKNANEKTRLENQNLLIQVEEVSQTCSKSEIHNEKEKCFIKEHENLKPLLEQKELRDRRAELILLKDSLAKSPSVKNDPLSSVKELEEKIENLEKECKEKEEKINKIKLVAVKAKKELDSSRKETQTVKEELESLRSEKDQLSASMRDLIQGAESYKNLLLEYEKQSEQLDVEKERANNFEHRIEDLTRQLRNSTLQCETINSDNEDLLARIETLQSNAKLLEVQILEVQRAKAMVDKELEAEKLQKEQKIKEHATTVNELEELQVQLQKQKKQLQKTMQELELVKKDAQQTTLMNMEIADYERLMKELNQKLTNKNNKIEDLEQEIKIQKQKQETLQEEITSLQSSVQQYEEKNTKIKQLLVKTKKELADSKQAETDHLILQASLKGELEASQQQVEVYKIQLAEITSEKHKIHEHLKTSAEQHQRTLSAYQQRVTALQEECRAAKAEQATVTSEFESYKVRVHNVLKQQKNKSMSQAETEGAKQEREHLEMLIDQLKIKLQDSQNNLQINVSELQTLQSEHDTLLERHNKMLQETVSKEAELREKLCSIQSENMMMKSEHTQTVSQLTSQNEVLRNSFRDQVRHLQEEHRKTVETLQQQLSKMEAQLFQLKNEPTTRSPVSSQQSLKNLRERRNTDLPLLDMHTVTREEGEGMETTDTESVSSASTYTQSLEQLLNSPETKLEPPLWHAEFTKEELVQKLSSTTKSADHLNGLLRETEATNAILMEQIKLLKSEIRRLERNQEREKSAANLEYLKNVLLQFIFLKPGSERERLLPVINTMLQLSPEEKGKLAAVAQGEEENASRSSGWASYLHSWSGLR

SEQ ID NO: 4530 - protein, 858 aa, Homo sapiens
MVNFTVDQIRAIMDKKANIRNMSVIAHVDHGKSTLTDSLVCKAGIIASARAGETRFTDTRKDEQERCITIKSTAISLFYELSENDLNFIKQSKDGAGFLINLIDSPGHVDFSSEVTAALRVTDGALVVVDCVSGVCVQTETVLRQAIAERIKPVLMMNKMDRALLELQLEPEELYQTFQRIVENVNVIISTYGEGESGPMGNIMIDPVLGTVGFGSGLHGWAFTLKQFAEMYVAKFAAKGEGQLGPAERAKKVEDMMKKLWGDRYFDPANGKFSKSATSPEGKKLPRTFCQLILDPIFKVFDAIMNFKKEETAKLIEKLDIKLDSEDKDKEGKPLLKAVMRRWLPAGDALLQMITIHLPSPVTAQKYRCELLYEGPPDDEAAMGIKSCDPKGPLMMYISKMVPTSDKGRFYAFGRVFSGLVSTGLKVRIMGPNYTPGKKEDLYLKPIQRTILMMGRYVEPIEDVPCGNIVGLVGVDQFLVKTGTITTFEHAHNMRVMKFSVSPVVRVAVEAKNPADLPKLVEGLKRLAKSDPMVQCIIEESGEHIIAGAGELHLEICLKDLEEDHACIPIKKSDPVVSYRETVSEESNVLCLSKSPNKHNRLYMKARPFPDGLAEDIDKGEVSARQELKQRARYLAEKYEWDVAEARKIWCFGPDGTGPNILTDITKGVQYLNEIKDSVVAGFQWATKEGALCEENMRGVRFDVHDVTLHADAIHRGGGQIIPTARRCLYASVLTAQPRLMEPIYLVEIQCPEQVVGGIYGVLNRKRGHVFEESQVAGTPMFVVKAYLPVNESFGFTADLRSNTGGQAFPQCVFDHWQILPGDPFDNSSRPSQVVAETRKRKGLKEGIPALDNFLDKL

SEQ ID NO: 4531 - protein, 190 aa, Homo sapiens
MKASQCCCCLSHLLASVLLLLLLPELSGPLAVLLQAAEAAPGLGPPDPRPRTLPPLPPGPTPAQQPGRGLAEAAGPRGSEGGNGSNPVAGLETDDHGGKAGEGSVGGGLAVSPNPGDKPMTQRALTVLMVVSGAVLVYFVVRTVRMRRRNRKTRRYGVLDTNIENMELTPLEQDDEDDDNTLFDANHPRR

SEQ ID NO: 4532 - protein, 5537 aa, Homo sapiens
MSSGNASYRCSMSSSADFSDEDDFSQKSGSASPAPGDTLPWNLPKHERSKRKIQGGSVLDPAERAVLRIADERDKVQKKTFTKWINQHLMKVRKHVNDLYEDLRDGHNLISLLEVLSGDTLPREKGRMRFHRLQNVQIALDYLKRRQVKLVNIRNDDITDGNPKLTLGLIWTIILHFQISDIHVTGESEDMSAKERLLLWTQQATEGYAGIRCENFTTCWRDGKLFNAIIHKYRPDLIDMNTVAVQSNLANLEHAFYVAEKIGVIRLLDPEDVDVSSPDEKSVITYVSSLYDAFPKVPEGGEGIGANDVEVKWIEYQNMVNYLIQWIRHHVTTMSERTFPNNPVELKALYNQYLQFKETEIPPKETEKSKIKRLYKLLEIWIEFGRIKLLQGYHPNDIEKEWGKLIIAMLEREKALRPEVERLEMLQQIANRVQRDSVICEDKLILAGNALQSDSKRLESGVQFQNEAEIAGYILECENLLRQHVIDVQILIDGKYYQADQLVQRVAKLRDEIMALRNECSSVYSKGRILTTEQTKLMISGITQSLNSGFAQTLHPSLTSGLTQSLTPSLTSSSMTSGLSSGMTSRLTPSVTPAYTPGFPSGLVPNFSSGVEPNSLQTLKLMQIRKPLLKSSLLDQNLTEEEINMKFVQDLLNWVDEMQVQLDRTEWGSDLPSVESHLENHKNVHRAIEEFESSLKEAKISEIQMTAPLKLTYAEKLHRLESQYAKLLNTSRNQERHLDTLHNFVSRATNELIWLNEKEEEEVAYDWSERNTNIARKKDYHAELMRELDQKEENIKSVQEIAEQLLLENHPARLTIEAYRAAMQTQWSWILQLCQCVEQHIKENTAYFEFFNDAKEATDYLRNLKDAIQRKYSCDRSSSIHKLEDLVQESMEEKEELLQYKSTIANLMGKAKTIIQLKPRNSDCPLKTSIPIKAICDYRQIEITIYKDDECVLANNSHRAKWKVISPTGNEAMVPSVCFTVPPPNKEAVDLANRIEQQYQNVLTLWHESHINMKSVVSWHYLINEIDRIRASNVASIKTMLPGEHQQVLSNLQSRFEDFLEDSQESQVFSGSDITQLEKEVNVCKQYYQELLKSAEREEQEESVYNLYISEVRNIRLRLENCEDRLIRQIRTPLERDDLHESVFRITEQEKLKKELERLKDDLGTITNKCEEFFSQAAASSSVPTLRSELNVVLQNMNQVYSMSSTYIDKLKTVNLVLKNTQAAEALVKLYETKLCEEEAVIADKNNIENLISTLKQWRSEVDEKRQVFHALEDELQKAKAISDEMFKTYKERDLDFDWHKEKADQLVERWQNVHVQIDNRLRDLEGIGKSLKYYRDTYHPLDDWIQQVETTQRKIQENQPENSKTLATQLNQQKMLVSEIEMKQSKMDECQKYAEQYSATVKDYELQTMTYRAMVDSQQKSPVKRRRMQSSADLIIQEFMDLRTRYTALVTLMTQYIKFAGDSLKRLEEEEKSLEEEKKEHVEKAKELQKWVSNISKTLKDAEKAGKPPFSKQKISSEEISTKKEQLSEALQTIQLFLAKHGDKMTDEERNELEKQVKTLQESYNLLFSESLKQLQESQTSGDVKVEEKIVAERQQEYKEKLQGICDLLTQTENRLIGHQEAFMIGDGTVELKKYQSKQEELQKDMQGSAQALAEVVKNTENFLKENGEKLSQEDKALIEQKLNEAKIKCEQLNLKAEQSKKELDKVVTTAIKEETEKVAAVKQLEESKTKIENLLDWLSNVDKDSERAGTKHKQVIEQNGTHFQEGDGKSAIGEEDEVNGNLLETDVDGQVGTTQENLNQQYQKVKAQHEKIISQHQAVIIATQSAQVLLEKQGQYLSPEEKEKLQKNMKELKVHYETALAESEKKMKLTHSLQEELEKFDADYTEFEHWLQQSEQELENLEAGADDINGLMTKLKRQKSFSEDVISHKGDLRYITISGNRVLEAAKSCSKRDGGKVDTSATHREVQRKLDHATDRFRSLYSKCNVLGNNLKDLVDKYQHYEDASCGLLAGLQACEATASKHLSEPIAVDPKNLQRQLEETKALQGQISSQQVAVEKLKKTAEVLLDARGSLLPAKNDIQKTLDDIVGRYEDLSKSVNERNEKLQITLTRSLSVQDGLDEMLDWMGNVESSLKEQGQVPLNSTALQDIISKNIMLEQDIAGRQSSINAMNEKVKKFMETTDPSTASSLQAKMKDLSARFSEASHKHKETLAKMEELKTKVELFENLSEKLQTFLETKTQALTEVDVPGKDVTELSQYMQESTSEFLEHKKHLEVLHSLLKEISSHGLPSDKALVLEKTNNLSKKFKEMEDTIKEKKEAVTSCQEQLDAFQVLVKSLKSWIKETTKKVPIVQPSFGAEDLGKSLEDTKKLQEKWSLKTPEIQKVNNSGISLCNLISAVTTPAKAIAAVKSGGAVLNGEGTATNTEEFWANKGLTSIKKDMTDISHGYEDLGLLLKDKIAELNTKLSKLQKAQEESSAMMQWLQKMNKTATKWQQTPAPTDTEAVKTQVEQNKSFEAELKQNVNKVQELKDKLTELLEENPDTPEAPRWKQMLTEIDSKWQELNQLTIDRQQKLEESSNNLTQFQTVEAQLKQWLVEKELMVSVLGPLSIDPNMLNTQRQQVQILLQEFATRKPQYEQLTAAGQGILSRPGEDPSLRGIVKEQLAAVTQKWDSLTGQLSDRCDWIDQAIVKSTQYQSLLRSLSDKLSDLDNKLSSSLAVSTHPDAMNQQLETAQKMKQEIQQEKKQIKVAQALCEDLSALVKEEYLKAELSRQLEGILKSFKDVEQKAENHVQHLQSACASSHQFQQMSRDFQAWLDTKKEEQNKSHPISAKLDVLESLIKDHKDFSKTLTAQSHMYEKTIAEGENLLLKTQGSEKAALQLQLNTIKTNWDTFNKQVKERENKLKESLEKALKYKEQVETLWPWIDKCQNNLEEIKFCLDPAEGENSIAKLKSLQKEMDQHFGMVELLNNTANSLLSVCEIDKEVVTDENKSLIQKVDMVTEQLHSKKFCLENMTQKFKEFQEVSKESKRQLQCAKEQLDIHDSLGSQAYSNKYLTMLQTQQKSLQALKHQVDLAKRLAQDLVVEASDSKGTSDVLLQVETIAQEHSTLSQQVDEKCSFLETKLQGIGHFQNTIREMFSQFAEFDDELDSMAPVGRDAETLQKQKETIKAFLKKLEALMASNDNANKTCKMMLATEETSPDLVGIKRDLEALSKQCNKLLDRAQAREEQVEGTIKRLEEFYSKLKEFSILLQKAEEHEESQGPVGMETETINQQLNMFKVFQKEEIEPLQGKQQDVNWLGQGLIQSAAKSTSTQGLEHDLDDVNARWKTLNKKVAQRAAQLQEALLHCGRFQDALESLLSWMVDTEELVANQKPPSAEFKVVKAQIQEQKLLQRLLDDRKSTVEVIKREGEKIATTAEPADKVKILKQLSLLDSRWEALLNKAETRNRQLEGISVVAQQFHETLEPLNEWLTTIEKRLVNCEPIGTQASKLEEQIAQHKALEDDIINHNKHLHQAVSIGQSLKVLSSREDKDMVQSKLDFSQVWYIEIQEKSHSRSELLQQALCNAKIFGEDEVELMNWLNEVHDKLSKLSVQDYSTEGLWKQQSELRVLQEDILLRKQNVDQALLNGLELLKQTTGDEVLIIQDKLEAIKARYKDITKLSTDVAKTLEQALQLARRLHSTHEELCTWLDKVEVELLSYETQVLKGEEASQAQMRPKELKKEAKNNKALLDSLNEVSSALLELVPWRAREGLEKMVAEDNERYRLVSDTITQKVEEIDAAILRSQQFDQAADAELSWITETEKKLMSLGDIRLEQDQTSAQLQVQKTFTMEILRHKDIIDDLVKSGHKIMTACSEEEKQSMKKKLDKVLKNYDTICQINSERYLQLERAQSLVNQFWETYEELWPWLTETQSIISQLPAPALEYETLRQQQEEHRQLRELIAEHKPHIDKMNKTGPQLLELSPGEGFSIQEKYVAADTLYSQIKEDVKKRAVALDEAISQSTQFHDKIDQILESLERIVERLRQPPSISAEVEKIKEQISENKNVSVDMEKLQPLYETLKQRGEEMIARSGGTDKDISAKAVQDKLDQMVFIWENIHTLVEEREAKLLDVMELAEKFWCDHMSLIVTIKDTQDFIRDLEDPGIDPSVVKQQQEAAETIREEIDGLQEELDIVINLGSELIAACGEPDKPIVKKSIDELNSAWDSLNKAWKDRIDKLEEAMQAAVQYQDGLQAVFDWVDIAGGKLASMSPIGTDLETVKQQIEELKQFKSEAYQQQIEMERLNHQAELLLKKVTEESDKHTVQDPLMELKLIWDSLEERIINRQHKLEGALLALGQFQHALDELLAWLTHTEGLLSEQKPVGGDPKAIEIELAKHHVLQNDVLAHQSTVEAVNKAGNDLIESSAGEEASNLQNKLEVLNQRWQNVLEKTEQRKQQLDGALRQAKGFHGEIEDLQQWLTDTERHLLASKPLGGLPETAKEQLNVHMEVCAAFEAKEETYKSLMQKGQQMLARCPKSAETNIDQDINNLKEKWESVETKLNERKTKLEEALNLAMEFHNSLQDFINWLTQAEQTLNVASRPSLILDTVLFQIDEHKVFANEVNSHREQIIELDKTGTHLKYFSQKQDVVLIKNLLISVQSRWEKVVQRLVERGRSLDDARKRAKQFHEAWSKLMEWLEESEKSLDSELEIANDPDKIKTQLAQHKEFQKSLGAKHSVYDTTNRTGRSLKEKTSLADDNLKLDDMLSELRDKWDTICGKSVERQNKLEEALLFSGQFTDALQALIDWLYRVEPQLAEDQPVHGDIDLVMNLIDNHKAFQKELGKRTSSVQALKRSARELIEGSRDDSSWVKVQMQELSTRWETVCALSISKQTRLEAALRQAEEFHSVVHALLEWLAEAEQTLRFHGVLPDDEDALRTLIDQHKEFMKKLEEKRAELNKATTMGDTVLAICHPDSITTIKHWITIIRARFEEVLAWAKQHQQRLASALAGLIAKQELLEALLAWLQWAETTLTDKDKEVIPQEIEEVKALIAEHQTFMEEMTRKQPDVDKVTKTYKRRAADPSSLQSHIPVLDKGRAGRKRFPASSLYPSGSQTQIETKNPRVNLLVSKWQQVWLLALERRRKLNDALDRLEELREFANFDFDIWRKKYMRWMNHKKSRVMDFFRRIDKDQDGKITRQEFIDGILSSKFPTSRLEMSAVADIFDRDGDGYIDYYEFVAALHPNKDAYKPITDADKIEDEVTRQVAKCKCAKRFQVEQIGDNKYRFFLGNQFGDSQQLRLVRILRSTVMVRVGGGWMALDEFLVKNDPCRAKGRTNMELREKFILADGASQGMAAFRPRGRRSRPSSRGASPNRSTSVSSQAAQAASPQVPATTTPKILHPLTRNYGKPWLTNSKMSTPCKAAECSDFPVPSAEGTPIQGSKLRLPGYLSGKGFHSGEDSGLITTAAARVRTQFADSKKTPSRPGSRAGSKAGSRASSRRGSDASDFDISEIQSVCSDVETVPQTHRPTPRAGSRPSTAKPSKIPTPQRKSPASKLDKSSKR

SEQ ID NO: 4533 - protein, 134 aa, Homo sapiens
MNRVNDPLIFIRDIKPGLKNLNVVFIVLEIGRVTKTKDGHEVRSCKVADKTGSITISVWDEIGGLIQPGDIIRLTRGYASMWKGCLTLYTGRGGELQKIGDLGAVQAAAMRDSIHYYPGNDLHPDLEEPSSLGV

SEQ ID NO: 4534 - protein, 331 aa, Homo sapiens
MSRARGALCRACLALAAALAALLLLPLPLPRAPAPARTPAPAPRAPPSRPAAPSLRPDDVFIAVKTTRKNHGPRLRLLLRTWISRARQQTFIFTDGDDPELELQGGDRVINTNCSAVRTRQALCCKMSVEYDKFIESGRKWFCHVDDDNYVNARSLLHLLSSFSPSQDVYLGRPSLDHPIEATERVQGGRTVTTVKFWFATGGAGFCLSRGLALKMSPWASLGSFMSTAEQVRLPDDCTVGYIVEGLLGARLLHSPLFHSHLENLQRLPPDTLLQQVTLSHGGPENPHNVVNVAGGFSLHQDPTRFKSIHCLLYPDTDWCPRQKQGAPTSR

SEQ ID NO: 4535 - protein, 420 aa, Homo sapiens
MAELGKKYCVYCLAEVSPLRFRCTECQDIELCPECFSAGAEIGHHRRYHGYQLVDGGRFTLWGPEAEGGWTSREEQLLLDAIEQFGFGNWEDMAAHVGASRTPQEVMEHYVSMYIHGNLGKACIPDTIPNRVTDHTCPSGGPLSPSLTTPLPPLDISVAEQQQLGYMPLRDDYEIEYDQDAETLISGLSVNYDDDDVEIELKRAHVDMYVRKLKERQRRKNIARDYNLVPAFLGKDKKEKEKALKRKITKEEKELRLKLRPLYQFMSCKEFDDLFENMHKEKMLRAKIRELQRYRRNGITKMEESAEYEAARHKREKRKENKNLAGSKRGKEDGKDSEFAAIENLPGFELLSDREKVLCSSLNLSPARYVTVKTIIIKDHLQKRQGIPSKSRLPSYLDKVLKKRILNFLTESGWISRDAS

SEQ ID NO: 4536 - protein, 753 aa, Homo sapiens
MERRAWSLQCTAFVLFCAWCALNSAKAKRQFVNEWAAEIPGGPEAASAIAEELGYDLLGQIGSLENHYLFKHKNHPRRSRRSAFHITKRLSDDDRVIWAEQQYEKERSKRSALRDSALNLFNDPMWNQQWYLQDTRMTAALPKLDLHVIPVWQKGITGKGVVITVLDDGLEWNHTDIYANYDPEASYDFNDNDHDPFPRYDPTNENKHGTRCAGEIAMQANNHKCGVGVAYNSKVGGIRMLDGIVTDAIEASSIGFNPGHVDIYSASWGPNDDGKTVEGPGRLAQKAFEYGVKQGRQGKGSIFVWASGNGGRQGDNCDCDGYTDSIYTISISSASQQGLSPWYAEKCSSTLATSYSSGDYTDQRITSADLHNDCTETHTGTSASAPLAAGIFALALEANPNLTWRDMQHLVVWTSEYDPLANNPGWKKNGAGLMVNSRFGFGLLNAKALVDLADPRTWRSVPEKKECVVKDNDFEPRALKANGEVIIEIPTRACEGQENAIKSLEHVQFEATIEYSRRGDLHVTLTSAAGTSTVLLAERERDTSPNGFKNWDFMSVHTWGENPIGTWTLRITDMSGRIQNEGRIVNWKLILHGTSSQPEHMKQPRVYTSYNTVQNDRRGVEKMVDPGEEQPTQENPKENTLVSKSPSSSSVGGRRDELEEGAPSQAMLRLLQSAFSKNSPPKQSPKKSPSAKLNIPYENFYEALEKLNKPSQLKDSEDSLYNDYVDVFYNTKPYKHRDDRLLQALVDILNEEN

SEQ ID NO: 4537 - protein, 543 aa, Homo sapiens
MLLRSKPALPPPLMLLLLGPLGPLSPGALPRPAQAQDVVDLDFFTQEPLHLVSPSFLSVTIDANLATDPRFLILLGSPKLRTLARGLSPAYLRFGGTKTDFLIFDPKKESTFEERSYWQSQVNQDICKYGSIPPDVEEKLRLEWPYQEQLLLREHYQKKFKNSTYSRSSVDVLYTFANCSGLDLIFGLNALLRTADLQWNSSNAQLLLDYCSSKGYNISWELGNEPNSFLKKADIFINGSQLGEDFIQLHKLLRKSTFKNAKLYGPDVGQPRRKTAKMLKSFLKAGGEVIDSVTWHHYYLNGRTATKEDFLNPDVLDIFISSVQKVFQVVESTRPGKKVWLGETSSAYGGGAPLLSDTFAAGFMWLDKLGLSARMGIEVVMRQVFFGAGNYHLVDENFDPLPDYWLSLLFKKLVGTKVLMASVQGSKRRKLRVYLHCTNTDNPRYKEGDLTLYAINLHNVTKYLRLPYPFSNKQVDKYLLRPLGPHGLLSKSVQLNGLTLKMVDDQTLPPLMEKPLRPGSSLGLPAFSYSFFVIRNAKVAACI

SEQ ID NO: 4538 - protein, 757 aa, Homo sapiens
MLLRLLLAWAAAGPTLGQDPWAAEPRAACGPSSCYALFPRRRTFLEAWRACRELGGDLATPRTPEEAQRVDSLVGAGPASRLLWIGLQRQARQCQLQRPLRGFTWTTGDQDTAFTNWAQPASGGPCPAQRCVALEASGEHRWLEGSCTLAVDGYLCQFGFEGACPALQDEAGQAGPAVYTTPFHLVSTEFEWLPFGSVAAVQCQAGRGASLLCVKQPEGGVGWSRAGPLCLGTGCSPDNGGCEHECVEEVDGHVSCRCTEGFRLAADGRSCEDPCAQAPCEQQCEPGGPQGYSCHCRLGFRPAEDDPHRCVDTDECQIAGVCQQMCVNYVGGFECYCSEGHELEADGISCSPAGAMGAQASQDLGDELLDDGEDEEDEDEAWKAFNGGWTEMPGILWMEPTQPPDFALAYRPSFPEDREPQIPYPEPTWPPPLSAPRVPYHSSVLSVTRPVVVSATHPTLPSAHQPPVIPATHPALSRDHQIPVIAANYPDLPSAYQPGILSVSHSAQPPAHQPPMISTKYPELFPAHQSPMFPDTRVAGTQTTTHLPGIPPNHAPLVTTLGAQLPPQAPDALVLRTQATQLPIIPTAQPSLTTTSRSPVSPAHQISVPAATQPAALPTLLPSQSPTNQTSPISPTHPHSKAPQIPREDGPSPKLALWLPSPAPTAAPTALGEAGLAEHSQRDDRWLLVALLVPTCVFLVVLLALGIVYCTRCGPHAPNKRITDCYRWVIHAGSKSPTEPMPPRGSLTGVQTCRTSV

SEQ ID NO: 4539 - protein, 257 aa, Homo sapiens
MAQRMTTQLLLLLVWVAVVGEAQTRIAWARTELLNVCMNAKHHKEKPGPEDKLHEQCRPWRKNACCSTNTSQEAHKDVSYLYRFNWNHCGEMAPACKRHFIQDTCLYECSPNLGPWIQQVDQSWRKERVLNVPLCKEDCEQWWEDCRTSYTCKSNWHKGWNWTSGFNKCAVGAACQPFHFYFPTPTVLCNEIWTHSYKVSNYSRGSGRCIQMWFDPAQGNPNEEVARFYAAAMSGAGPWAAWPFLLSLALMLLWLLS

SEQ ID NO: 4540 - protein, 472 aa, Homo sapiens
MGCDRNCGLIAGAVIGAVLAVFGGILMPVGDLLIQKTIKKQVVLEEGTIAFKNWVKTGTEVYRQFWIFDVQNPQEVMMNSSNIQVKQRGPYTYRVRFLAKENVTQDAEDNTVSFLQPNGAIFEPSLSVGTEADNFTVLNLAVAAASHIYQNQFVQMILNSLINKSKSSMFQVRTLRELLWGYRDPFLSLVPYPVTTTVGLFYPYNNTADGVYKVFNGKDNISKVAIIDTYKGKRNLSYWESHCDMINGTDAASFPPFVEKSQVLQFFSSDICRSIYAVFESDVNLKGIPVYRFVLPSKAFASPVENPDNYCFCTEKIISKNCTSYGVLDISKCKEGRPVYISLPHFLYASPDVSEPIDGLNPNEEEHRTYLDIEPITGFTLQFAKRLQVNLLVKPSEKIQVLKNLKRNYIVPILWLNETGTIGDEKANMFRSQVTGKINLLGLIEMILLSVGVVMFVAFMISYCACRSKTIK

SEQ ID NO: 4541 - protein, 943 aa, Homo sapiens
MGLTKQYLRYVASAVFGVIGSQKGNIVFVTLRGEKGRYVAVPACEHVFIWDLRKGEKILILQGLKQEVTCLCPSPDGLHLAVGYEDGSIRIFSLLSGEGNVTFNGHKAAITTLKYDQLGGRLASGSKDTDIIVWDVINESGLYRLKGHKDAITQALFLREKNLLVTSGKDTMVKWWDLDTQHCFKTMVGHRTEVWGLVLLSEEKRLITGASDSELRVWDIAYLQEIEDPEEPDPKKIKGSSPGIQDTLEAEDGAFETDEAPEDRILSCRKAGSIMREGRDRVVNLAVDKTGRILACHGTDSVLELFCILSKKEIQKKMDKKMKKARKKAKLHSSKGEEEDPEVNVEMSLQDEIQRVTNIKTSAKIKSFDLIHSPHGELKAVFLLQNNLVELYSLNPSLPTPQPVRTSRITIGGHRSDVRTLSFSSDNIAVLSAAADSIKIWNRSTLQCIRTMTCEYALCSFFVPGDRQVVIGTKTGKLQLYDLASGNLLETIDAHDGALWSMSLSPDQRGFVTGGADKSVKFWDFELVKDENSTQKRLSVKQTRTLQLDEDVLCVSYSPNQKLLAVSLLDCTVKIFYVDTLKFFLSLYGHKLPVICMDISHDGALIATGSADRNVKIWGLDFGDCHKSLFAHDDSVMYLQFVPKSHLFFTAGKDHKIKQWDADKFEHIQTLEGHHQEIWCLAVSPSGDYVVSSSHDKSLRLWERTREPLILEEEREMEREAEYEESVAKEDQPAVPGETQGDSYFTGKKTIETVKAAERIMEAIELYREETAKMKEHKAICKAAGKEVPLPSNPILMAYGSISPSAYVLEIFKGIKSSELEESLLVLPFSYVPDILKLFNEFIQLGSDVELICRCLFFLLRIHFGQITSNQMLVPVIEKLRETTISKVSQVRDVIGFNMAGLDYLKRECEAKSEVMFFADATSHLEEKKRKRKKREKLILTLT

SEQ ID NO: 4542 - protein, 582 aa, Homo sapiens
MSPAPRPPRCLLLPLLTLGTALASLGSAQSSSFSPEAWLQQYGYLPPGDLRTHTQRSPQSLSAAIAAMQKFYGLQVTGKADADTMKAMRRPRCGVPDKFGAEIKANVRRKRYAIQGLKWQHNEITFCIQNYTPKVGEYATYEAIRKAFRVWESATPLRFREVPYAYIREGHEKQADIMIFFAEGFHGDSTPFDGEGGFLAHAYFPGPNIGGDTHFDSAEPWTVRNEDLNGNDIFLVAVHELGHALGLEHSSDPSAIMAPFYQWMDTENFVLPDDDRRGIQQLYGGESGFPTKMPPQPRTTSRPSVPDKPKNPTYGPNICDGNFDTVAMLRGEMFVFKERWFWRVRNNQVMDGYPMPIGQFWRGLPASINTAYERKDGKFVFFKGDKHWVFDEASLEPGYPKHIKELGRGLPTDKIDAALFWMPNGKTYFFRGNKYYRFNEELRAVDSEYPKNIKVWEGIPESPRGSFMGSDEVFTYFYKGNKYWKFNNQKLKVEPGYPKSALRDWMGCPSGGRPDEGTEEETEVIIIEVDEEGGGAVSAAAVVLPVLLLLLVLAVGLAVFFFRRHGTPRRLLYCQRSLLDKV

SEQ ID NO: 4543 - protein, 478 aa, Homo sapiens
MIRKKRKRSAPPGPCRSHGPRPATAPAPPPSPEPTRPAWTGMGLRAAPSSAAAAAAEVEQRRSPGLCPPPLELLLLLLFSLGLLHAGDCQQPAQCRIQKCTTDFVSLTSHLNSAVDGFDSEFCKALRAYAGCTQRTSKACRGNLVYHSAVLGISDLMSQRNCSKDGPTSSTNPEVTHDPCNYHSHAGAREHRRGDQNPPSYLFCGLFGDPHLRTFKDNFQTCKVEGAWPLIDNNYLSVQVTNVPVVPGSSATATNKITIIFKAHHECTDQKVYQAVTDDLPAAFVDGTTSGGDSDAKSLRIVERESGHYVEMHARYIGTTVFVRQVGRYLTLAIRMPEDLAMSYEESQDLQLCVNGCPLSERIDDGQGQVSAILGHSLPRTSLVQAWPGYTLETANTQCHEKMPVKDIYFQSCVFDLLTTGDANFTAAAHSALEDVEALHPRKERWHIFPSSGNGTPRGGSDLSVSLGLTCLILIVFL

SEQ ID NO: 4544 - protein, 107 aa, Homo sapiens
MSESSSKSSQPLASKQEKDGTEKRGRGRPRKQPPVSPGTALVGSQKEPSEVPTPKRPRGRPKGSKNKGAAKTRKTTTTPGRKPRGRPKKLEKEEEEGISQESSEEEQ

SEQ ID NO: 4545 - protein, 190 aa, Homo sapiens
MAAGELEGGKPLSGLLNALAQDTFHGYPGITEELLRSQLYPEVPPEEFRPFLAKMRGILKSIASADMDFNQLEAFLTAQTKKQGGITSDQAAVISKFWKSHKTKIRESLMNQSRWNSGLRGLSWRVDGKSQSRHSAQIHTPVAIIELELGKYGQESEFLCLEFDEVKVNQILKTLSEVEESISTLISQPN

SEQ ID NO: 4546 - protein, 487 aa, Homo sapiens
MRRGERRDAGGPRPESPVPAGRASLEEPPDGPSAGQATGPGEGRRSTESEVYDDGTNTFFWRAHTLTVLFILTCTLGYVTLLEETPQDTAYNTKRGIVASILVFLCFGVTQAKDGPFSRPHPAYWRFWLCVSVVYELFLIFILFQTVQDGRQFLKYVDPKLGVPLPERDYGGNCLIYDPDNETDPFHNIWDKLDGFVPAHFLGWYLKTLMIRDWWMCMIISVMFEFLEYSLEHQLPNFSECWWDHWIMDVLVCNGLGIYCGMKTLEWLSLKTYKWQGLWNIPTYKGKMKRIAFQFTPYSWVRFEWKPASSLRRWLAVCGIILVFLLAELNTFYLKFVLWMPPEHYLVLLRLVFFVNVGGVAMREIYDFMDDPKPHKKLGPQAWLVAAITATELLIVVKYDPHTLTLSLPFYISQCWTLGSVLALTWTVWRFFLRDITLRYKETRWQKWQNKDDQGSTVGNGDQHPLGLDEDLLGPGVAEGEGAPTPN

SEQ ID NO: 4547 - protein, 380 aa, Homo sapiens [sequence omitted]

SEQ ID NO: 4548 - protein, 613 aa, Homo sapiens
MAQSRVLLLLLLLPPQLHLGPVLAVRAPGFGRSGGHSLSPEENEFAEEEPVLVLSPEEPGPGPAAVSCPRDCACSQEGVVDCGGIDLREFPGDLPEHTNHLSLQNNQLEKIYPEELSRLHRLETLNLQNNRLTSRGLPEKAFEHLTNLNYLYLANNKLTLAPRFLPNALISVDFAANYLTKIYGLTFGQKPNLRSVYLHNNKLADAGLPDNMFNGSSNVEVLILSSNFLRHVPKHLPPALYKLHLKNNKLEKIPPGAFSELSSLRELYLQNNYLTDEGLDNETFWKLSSLEYLDLSSNNLSRVPAGLPRSLVLLHLEKNAIRSVDANVLTPIRSLEYLLLHSNQLREQGIHPLAFQGLKRLHTVHLYNNALERVPSGLPRRVRTLMILHNQITGIGREDFATTYFLEELNLSYNRITSPQVHRDAFRKLRLLRSLDLSGNRLHTLPPGLPRNVHVLKVKRNELAALARGALVGMAQLRELYLTSNRLRSRALGPRAWVDLAHLQLLDIAGNQLTEIPEGLPESLEYLYLQNNKISAVPANAFDSTPNLKGIFLRFNKLAVGSVVDSAFRRLKHLQVLDIEGNLEFGDISKDRGRLGKEKEEEEEEEEEEEETR

SEQ ID NO: 4549 - protein, 249 aa, Homo sapiens
MKITRQKHAKKHLGFFRNNFGVREPYQILLDGTFCQAALRGRIQLREQLPRYLMGETQLCTTRCVLKELETLGKDLYGAKLIAQKCQVRNCPHFKNAVSGSECLLSMVEEGNPHHYFVATQDQNLSVKVKKKPGVPLMFIIQNTMVLDKPSPKTIAFVKAVESGQLVSVHEKESIKHLKEEQGLVKNTEQSRRKKRKKISGPNPLSCLKKKKKAPDTQSSASEKKRKRKRIRNRSNPKVLSEKQNAEGE

SEQ ID NO: 4550 - protein, 471 aa, Homo sapiens
MENLKHIITLGQVIHKRCEEMKYCKKQCRRLGHRVLGLIKPLEMLQDQGKRSVPSEKLTTAMNRFKAALEEANGEIEKFSNRSNICRFLTASQDKILFKDVNRKLSDVWKELSLLLQVEQRMPVSPISQGASWAQEDQQDADEDRRAFQMLRRDNEKIEASLRRLEINMKEIKETLRQYLPPKCMQEIPQEQIKEIKKEQLSGSPWILLRENEVSTLYKGEYHRAPVAIKVFKKLQAGSIAIVRQTFNKEIKTMKKFESPNILRIFGICIDETVTPPQFSIVMEYCELGTLRELLDREKDLTLGKRMVLVLGAARGLYRLHHSEAPELHGKIRSSNFLVTQGYQVKLAGFELRKTQTSMSLGTTREKTDRVKSTAYLSPQELEDVFYQYDVKSEIYSFGIVLWEIATGDIPFQGCNSEKIRKLVAVKRQQEPLGEDCPSELREIIDECRAHDPSVRPSVDEILKKLSTFSK

SEQ ID NO: 4551 - protein, 911 aa, Homo sapiens
MAAAAASAPQQLSDEELFSQLRRYGLSPGPVTESTRPVYLKKLKKLREEEQQQHRSGGRGNKTRNSNNNNTAAATVAAAGPAAAAAAGMGVRPVSGDLSYLRTPGGLCRISASGPESLLGGPGGASAAPAAGSKVLLGFSSDESDVEASPRDQAGGGGRKDRASLQYRGLKAPPAPLAASEVTNSNSAERRKPHSWWGARRPAGPELQTPPGKDGAVEDEEGEGEDGEERDPETEEPLWASRTVNGSRLVPYSCRENYSDSEEEDDDDVASSRQVLKDDSLSRHRPRRTHSKPLPPLTAKSAGGRLETSVQGGGGLAMNDRAAAAGSLDRSRNLEEAAAAEQGGGCDQVDSSPVPRYRVNAKKLTPLLPPPLTDMDSTLDSSTGSLLKTNNHIGGGAFSVDSPRIYSNSLPPSAAVAASSSLRINHANHTGSNHTYLKNTYNKPKLSEPEEELLQQFKREEVSPTGSFSAHYLSMFLLTAACLFFLILGLTYLGMRGTGVSEDGELSIENPFGETFGKIQESEKTLMMNTLYKLHDRLAQLAGDHECGSSSQRTLSVQEAAAYLKDLGPEYEGIFNTSLQWILENGKDVGIRCVGFGPEEELTNITDVQFLQSTRPLMSFWCRFRRAFVTVTHRLLLLCLGVVMVCVVLRYMKYRWTKEEEETRQMYDMVVKIIDVLRSHNEACQENKDLQPYMPIPHVRDSLIQPHDRKKMKKVWDRAVDFLAANESRVRTETRRIGGADFLVWRWIQPSASCDKILVIPSKVWQGQAFHLDRRNSPPNSLTPCLKIRNMFDPVMEIGDQWHLAIQEAILEKCSDNDGIVHIAVDKNSREGCVYVKCLSPEYAGKAFKALHGSWFDGKLVTVKYLRLDRYHHRFPQALTSNTPLKPSNKHMNSMSHLRLRTGLTNSQGSS

SEQ ID NO: 4552 - protein, 482 aa, Homo sapiens
MNGTLDHPDQPDLDAIKMFVGQVPRTWSEKDLRELFEQYGAVYEINVLRDRSQNPPQSKGCCFVTFYTRKAALEAQNALHNMKVLPGMHHPIQMKPADSEKNNAVEDRKLFIGMISKKCTENDIRVMFSSFGQIEECRILRGPDGLSRGCAFVTFTTRAMAQTAIKAMHQAQTMEGCSSPMVVKFADTQKDKEQKRMAQQLQQQMQQISAASVWGNLAGLNTLGPQYLALLQQTASSGNLNTLSSLHPMGGLNAMQLQNLAALAAAASAAQNTPSGTNALTTSSSPLSVLTSSGSSPSSSSSNSVNPIASLGALQTLAGATAGLNVGSLAGMAALNGGLGSSGLSNGTGSTMEALTQAYSGIQQYAAAALPTLYNQNLLTQQSIGAAGSQKEGPEGANLFIYHLPQEFGDQDLLQMFMPFGNVVSAKVFIDKQTNLSKCFGFVSYDNPVSAQAAIQSMNGFQIGMKRLKVQLKRSKNDSKPY

SEQ ID NO: 4553 - protein, 122 aa, Homo sapiens
MAAGSRTSLLLAFALLCLPWLQEAGAVQTVPLSRLFDHAMLQAHRAHQLAIDTYQEFRLEDGSRRTGQILKQTYSKFDTNSHNHDALLKNYGLLYCFRKDMDKVETFLRMVQCRSVEGSCGF

SEQ ID NO: 4554 - protein, 128 aa, Homo sapiens
MAGGKAGKDSGKAKAKAVSRSQRAGLQFPVGRIHRHLKTRTTSHGRVGATAAVYSAAILEYLTAEVLELAGNASKDLKVKRITPRHLQLAIRGDEELDSLIKATIAGGGVIPHIHKSLIGKKGQQKTA

SEQ ID NO: 4555 - protein, 482 aa, Homo sapiens
MAAVFDLDLETEEGSEGEGEPELSPADACPLAELRAAGLEPVGHYEEVELTETSVNVGPERIGPHCFELLRVLGKGGYGKVFQVRKVQGTNLGKIYAMKVLRKAKIVRNAKDTAHTRAERNILESVKHPFIVELAYAFQTGGKLYLILECLSGGELFTHLEREGIFLEDTACFYLAEITLALGHLHSQGIIYRDLKPENIMLSSQGHIKLTDFGLCKESIHEGAVTHTFCGTIEYMAPEILVRSGHNRAVDWWSLGALMYDMLTGSPPFTAENRKKTMDKIIRGKLALPPYLTPDARDLVKKFLKRNPSQRIGGGPGDAADVQRHPFFRHMNWDDLLAWRVDPPFRPCLQSEEDVSQFDTRFTRQTPVDSPDDTALSESANQAFLGFTYVAPSVLDSIKEGFSFQPKLRSPRRLNSSPRAPVSPLKFSPFEGFRPSPSLPEPTELPLPPLLPPPPPSTTAPLPIRPPSGTKKSKRGRGRPGR

SEQ ID NO: 4556 - protein, 150 aa, Homo sapiens
MSGSMATAEASGSDGKGQEVETSVTYYRLEEVAKRNSLKELWLVIHGRVYDVTRFLNEHPGGEEVLLEQAGVDASESFEDVGHSSDAREMLKQYYIGDIHPSDLKPESGSKDPSKNDTCKSCWAYWILPIIGAVLLGFLYRYYTSESKSS

SEQ ID NO: 4557 - protein, 68 aa, Homo sapiens
MLSRLQELRKEEETLLRLKAALHDQLNRLKMLVHVDNEASINQTTLELSTKSHVTEEEEEEEEEESDS

SEQ ID NO: 4558 - protein, 288 aa, Homo sapiens
MKLPIFIADAFTARAFRGNPAAVCLLENELDEDMHQKIAREMNLSETAFIRKLHPTDNFAQSSCFGLRWFTPASEVPLCGHATLASAAVLFHKIKNMNSTLTFVTLSGELRARRAEDGIVLDLPLYPAHPQDFHEVEDLIKTAIGNTLVQDICYSPDTQKLLVRLSDVYNRSFLENLKVNTENLLQVENTGKVKGLILTLKGEPGGQTQAFDFYSRYFAPWVGVAEDPVTGSAHAVLSSYWSQHLGKKEMHAFQCSHRGGELGISLRPDGRVDIRGGAAVVLEGTLTA

SEQ ID NO: 4559 - protein, 100 aa, Homo sapiens
MSTSTSCPIPGGRDQLPDCYSTTPGGTLYATTPGGTRIIYDRKFLLECKNSPIARTPPCCLPQIPGVTTPPTAPLSKLEELKEQETEEEIPDDAQFEMDI

SEQ ID NO: 4560 - protein, 696 aa, Homo sapiens
MATPGSEPQPFVPALSVATLHPLHHPHHHHHHHQHHGGTGAPGGAGGGGGGSGGFNLPLNRGLERALEEAANSGGLNLSARKLKEFPRTAAPGHDLSDTVQADLSKNRLVEVPMELCHFVSLEILNLYHNCIRVIPEAIVNLQMLTYLNLSRNQLSALPACLCGLPLKVLIASNNKLGSLPEEIGQLKQLMELDVSCNEITALPQQIGQLKSLRELNVRRNYLKVLPQELVDLSLVKFDFSCNKVLVIPICFREMKQLQVLLLENNPLQSPPAQICTKGKVHIFKYLSIQACQIKTADSLYLHTMERPHLHQHVEDGKKDSDSGVGSDNGDKRLSATEPSDEDTVSLNVPMSNIMEEEQIIKEDSCHRLSPVKGEFHQEFQPEPSLLGDSTNSGEERDQFTDRADGLHSEFMNYKARAEDCEELLRIEEDVHWQTEGIISSSKDQDMDIAMIEQLREAVDLLQDPNGLSTDITERSVLNLYPMGSAEALELQDSALNGQIQLETSPVCEVQSDLTLQSNGSQYSPNEIRENSPAVSPTTNSTAPFGLKPRSVFLRPQRNLESIDPQFTIRRKMEQMREEKELVEQLRESIEMRLKVSLHEDLGAALMDGVVLCHLVNHIRPRSVASIHVPSPAVPKLSMAKCRRNVENFLEACRKLGVPEEKLCLPHHILEEKGLVKVGITIQALLDITVTKALFT

SEQ ID NO: 4561 - protein, 244 aa, Homo sapiens
MAPRPLGPLVLALGGAAAVLGSVLFILWKTYFGRGRERRWDRGEAWWGAEAARLPEWDEWDPEDEEDEEPALEELEQREVLVLGLDGAGKSTFLRVLSGKPPLEGHIPTWGFNSVRLPTKDFEVDLLEIGGSQNLRFYWKEFVSEVDVLVFVVDSADRLRLPWARQELHKLLDKDPDLPVVVVANKQDLSEAMSMGELQRELGLQAIDNQREVFLLAASIAPAGPTFEEPGTVHIWKLLLELLS

SEQ ID NO: 4562 - protein, 231 aa, Homo sapiens
MFLVGLTGGIASGKSSVIQVFQQLGCAVIDVDVMARHVVQPGYPAHRRIVEVFGTEVLLENGDINRKVLGDLIFNQPDRRQLLNAITHPEIRKEMMKETFKYFLRGYRYVILDIPLLFETKKLLKYMKHTVVVYCDRDTQLARLMRRNSLNRKDAEARINAQLPLTDKARMARHVLDNSGEWSVTKRQVILLHTELERSLEYLPLRFGVLTGLAAIASLLYLLTHYLLPYA

SEQ ID NO: 4563 - protein, 649 aa, Homo sapiens
MAGVSFSGHRLELLAAYEEVIREESAADWALYTYEDGSDDLKLAASGEGGLQELSGHFENQKVMYGFCSVKDSQAALPKYVLINWVGEDVPDARKCACASHVAKVAEFFQGVDVIVNASSVEDIDAGAIGQRLSNGLARLSSPVLHRLRLREDENAEPVGTTYQKTDAAVEMKRINREQFWEQAKKEEELRKEEERKKALDERLRFEQERMEQERQEQEERERRYREREQQIEEHRRKQQTLEAEEAKRRLKEQSIFGDHRDEEEETHMKKSESEVEEAAAIIAQRPDNPREFFKQQERVASASAGSCDVPSPFNHRPGSHLDSHRRMAPTPIPTRSPSDSSTASTPVAEQIERALDEVTSSQPPPLPPPPPPAQETQEPSPILDSEETRAAAPQAWAGPMEEPPQAQAPPRGPGSPAEDLMFMESAEQAVLAAPVEPATADATEIHDAADTIETDTATADTTVANNVPPAATSLIDLWPGNGEGASTLQGEPRAPTPPSGTEVTLAEVPLLDEVAPEPLLPAGEGCATLLNFDELPEPPATFCDPEEVEGESLAAPQTPTLPSALEELEQEQEPEPHLLTNGETTQKEGTQASEGYFSQSQEEEFAQSEELCAKAPPPVFYNKPPEIDITCWDADPVPEEEEGFEGGD

SEQ ID NO: 4564 - protein, 622 aa, Homo sapiens
MAHVRGLQLPGCLALAALCSLVHSQHVFLAPQQARSLLQRVRRANTFLEEVRKGNLERECVEETCSYEEAFEALESSTATDVFWAKYTACETARTPRDKLAACLEGNCAEGLGTNYRGHVNITRSGIECQLWRSRYPHKPEINSTTHPGADLQENFCRNPDSSTTGPWCYTTDPTVRRQECSIPVCGQDQVTVAMTPRSEGSSVNLSPPLEQCVPDRGQQYQGRLAVTTHGLPCLAWASAQAKALSKHQDFNSAVQLVENFCRNPDGDEEGVWCYVAGKPGDFGYCDLNYCEEAVEEETGDGLDEDSDRAIEGRTATSEYQTFFNPRTFGSGEADCGLRPLFEKKSLEDKTERELLESYIDGRIVEGSDAEIGMSPWQVMLFRKSPQELLCGASLISDRWVLTAAHCLLYPPWDKNFTENDLLVRIGKHSRTRYERNIEKISMLEKIYIHPRYNWRENLDRDIALMKLKKPVAFSDYIHPVCLPDRETAASLLQAGYKGRVTGWGNLKETWTANVGKGQPSVLQVVNLPIVERPVCKDSTRIRITDNMFCAGYKPDEGKRGDACEGDSGGPFVMKSPFNNRWYQMGIVSWGEGCDRDGKYGFYTHVFRLKKWIQKVIDQFGE

SEQ ID NO: 4565 - protein, 689 aa, Homo sapiens
MIEMAAEKEPFLVPAPPPPLKDESGGGGGPTVPPHQEAASGELRGGTERGPGRCAPSAGSPAAAVGRESPGAAATSSSGPQAQQHRGGGPQAQSHGEARLSDPPGRAAPPDVGEERRGGGGTELGPPAPPRPRNGYQPHRPPGGGGGKRRNSCNVGGGGGGFKHPAFKRRRRVNSDCDSVLPSNFLLGGNIFDPLNLNSLLDEEVSRTLNAETPKSSPLPAKGRDPVEILIPKDITDPLSLNTCTDEGHVVLASPLKTGRKRHRHRGQHHQQQQAAGGSESHPVPPTAPLTPLLHGEGASQQPRHRGQNRDAPQPYELNTAINCRDEVVSPLPSALQGPSGSLSAPPAASVISAPPSSSSRHRKRRRTSSKSEAGARGGGQGSKEKGRGSWGGRHHHHHPLPAAGFKKQQRKFQYGNYCKYYGYRNPSCEDGRLRVLKPEWFRGRDVLDLGCNVGHLTLSIACKWGPSRMVGLDIDSRLIHSARQNIRHYLSEELRLPPQTLEGDPGAEGEEGTTTVRKRSCFPASLTASRGPIAAPQVPLDGADTSVFPNNVVFVTGNYVLDRDDLVEAQTPEYDVVLCLSLTKWVHLNWGDEGLKRMFRRIYRHLRPGGILVLEPQPWSSYGKRKTLTETIYKNYYRIQLKPEQFSSYLTSPDVGFSSYELVATPHNTSKGFQRPVYLFHKARSPSH

SEQ ID NO: 4566 - protein, 210 aa, Homo sapiens
MTAAQAAGEEAPPGVRSVKVVLVGDGGCGKTSLLMVFADGAFPESYTPTVFERYMVNLQVKGKPVHLHIWDTAGQDDYDRLRPLFYPDASVLLLCFDVTSPNSFDNIFNRWYPEVNHFCKKVPIIVVGCKTDLRKDKSLVNKLRRNGLEPVTYHRGQEMARSVGAVAYLECSARLHDNVHAVFQEAAEVALSSRGRNFWRRITQGFCVVT

SEQ ID NO: 4567 - protein, 166 aa, Homo sapiens
MMLHSALGLCLLLVTVSSNLAIAIKKEKRPPQTLSRGWGDDITWVQTYEEGLFYAQKSKKPLMVIHHLEDCQYSQALKKVFAQNEEIQEMAQNKFIMLNLMHETTDKNLSPDGQYVPRIMFVDPSLTVRADIAGRYSNRLYTYEPRDLPLLIENMKKALRLIQSEL

SEQ ID NO: 4568 - protein, 727 aa, Homo sapiens
MAFQKAVKGTILVGGGALATVLGLSQFAHYRRKQMNLAYVKAADCISEPVNREPPSREAQLLTLQNTSEFDILVIGGGATGSGCALDAVTRGLKTALVERDDFSSGTSSRSTKLIHGGVRYLQKAIMKLDIEQYRMVKEALHERANLLEIAPHLSAPLPIMLPVYKWWQLPYYWVGIKLYDLVAGSNCLKSSYVLSKSRALEHFPMLQKDKLVGAIVYYDGQHNDARMNLAIALTAARYGAATANYMEVVSLLKKTDPQTGKVRVSGARCKDVLTGQEFDVRAKCVINATGPFTDSVRKMDDKDAAAICQPSAGVHIVMPGYYSPESMGLLDPATSDGRVIFFLPWQKMTIAGTTDTPTDVTHHPIPSEEDINFILNEVRNYLSCDVEVRRGDVLAAWSGIRPLVTDPKSADTQSISRNHVVDISESGLITIAGGKWTTYRSMAEDTINAAVKTHNLKAGPSRTVGLFLQGGKDWSPTLYIRLVQDYGLESEVAQHLAATYGDKAFEVAKMASVTGKRWPIVGVRLVSEFPYIEAEVKYGIKEYACTAVDMISRRTRLAFLNVQAAEEALPRIVELMGRELNWDDYKKQEQLETARKFLYYEMGYKSRSEQLTDRSEISLLPSDIDRYKKRFHKFDADQKGFITIVDVQRVLESINVQMDENTLHEILNEVDLNKNGQVELNEFLQLMSAIQKGRVSGSRLAILMKTAEENLDRRVPIPVDRSCGGL

SEQ ID NO: 4569 - protein, 698 aa, Homo sapiens
MPSEGRCWETLKALRSSDKGRLCYYRDWLLRREDVLEECMSLPKLSSYSGWVVEHVLPHMQENQPLSETSPSSTSASALDQPSFVPKSPDASSAFSPASPATPNGTKGKDESQHTESMVLQSSRGIKVEGCVRMYELVHRMKGTEGLRLWQEEQERKVQALSEMASEQLKRFDEWKELKQHKEFQDLREVMEKSSREALGHQEKLKAEHRHRAKILNLKLREAEQQRVKQAEQERLRKEEGQIRLRALYALQEEMLQLSQQLDASEQHKALLKVDLAAFQTRGNQLCSLISGIIRASSESSYPTAESQAEAERALREMRDLLMNLGQEITRACEDKRRQDEEEAQVKLQEAQMQQGPEAHKEPPAPSQGPGGKQNEDLQVKVQDITMQWYQQLQDASMQCVLTFEGLTNSKDSQAKKIKMDLQKAATIPVSQISTIAGSKLKEIFDKIHSLLSGKPVQSGGRSVSVTLNPQGLDFVQYKLAEKFVKQGEEEVASHHEAAFPIAVVASGIWELHPRVGDLILAHLHKKCPYSVPFYPTFKEGMALEDYQRMLGYQVKDSKVEQQDNFLKRMSGMIRLYAAIIQLRWPYGNRQEIHPHGLNHGWRWLAQILNMEPLSDVTATLLFDFLEVCGNALMKQYQVQFWKMLILIKEDYFPRIEAITSSGQMGSFIRLKQFLEKCLQHKDIPVPKGFLTSSFWRS

SEQ ID NO: 4570 - protein, 462 aa, Homo sapiens
MATDDKTSPTLDSANDLPRSPTSPSHLTHFKPLTPDQDEPPFKSAYSSFVNLFRFNKERAEGGQGEQQPLSGSWTSPQLPSRTQSVRSPTPYKKQLNEELQRRSSALDNSLQHPQENTGDLRACTYCRKIALSYAHSTDSNSIGEDLNALSDSACSVSVLDPSEPRTPVGSRKASRNIFLEDDLAWQSLIHPDSSNTPLSTRLVSVQEDAGKSPARNRSASITNLSLDRSGSPMVPSYETSVSPQANRTYVRTETTEDERKILLDSVQLKDLWKKICHHSSGMEFQDHRYWLRTHPNCIVGKELVNWLIRNGHIATRAQAIAIGQAMVDGRWLDCVSHHDQLFRDEYALYRPLQSTEFSETPSPDSDSVNSVEGHSEPSWFKDIKFDDSDTEQIAEEGDDNLANSASPSKRTSVSSFQSTVDSDSAASISLNVELDNVNFHIKKPSKYPHVPPHPADQKGRR

SEQ ID NO: 4571 - protein, 352 aa, Homo sapiens
MTSSLLLAFLLLAPTTVATPRAGGQCPACGGPTLELESQRELLLDLAKRSILDKLHLTQRPTLNRPVSRAALRTALQHLHGVPQGALLEDNREQECEIISFAETGLSTINQTRLDFHFSSDRTAGDREVQQASLMFFVQLPSNTTWTLKVRVLVLGPHNTNLTLATQYLLEVDASGWHQLPLGPEAQAACSQGHLTLELVLEGQVAQSSVILGGAAHRPFVAARVRVGGKHQIHRRGIDCQGGSRMCCRQEFFVDFREIGWHDWIIQPEGYAMNFCIGQCPLHIAGMPGIAASFHTAVLNLLKANTAAGTTGGGSCCVPTARRPLSLLYYDRDSNIVKTDIPDMVVEACGCS

SEQ ID NO: 4572 - protein, 212 aa, Homo sapiens [sequence omitted]

SEQ ID NO: 4573 - protein, 247 aa, Homo sapiens
MNPLLILTFVAAALAAPFDDDDKIVGGYNCEENSVPYQVSLNSGYHFCGGSLINEQWVVSAGHCYKSRIQVRLGEHNIEVLEGNEQFINAAKIIRHPQYDRKTLNNDIMLIKLSSRAVINARVSTISLPTAPPATGTKCLISGWGNTASSGADYPDELQCLDAPVLSQAKCEASYPGKITSNMFCVGFLEGGKDSCQGDSGGPVVCNGQLQGVVSWGDGCAQKNKPGVYTKVYNYVKWIKNTIAANS

SEQ ID NO: 4574 - protein, 473 aa, Homo sapiens [sequence omitted]

SEQ ID NO: 4575 - protein, 629 aa, Homo sapiens
MTAEGPSPPARWHRRLPGLWAAALLLLGLPRLSVRADGKFFVLESQNGSQGLQLEAARLSCKSRGAHLASADELRRVVQDCSFAVCTTGWLADGTLGTTVCSKGSGEQQIMRAVDVRIESNPVPGGTYSALCIKDEEKPCGDPPSFPHTILQGRTGLEMGDELLYVCAPGHIMGHRETAFTLLCNSCGEWYGLVQACGKDEAEAHIDYEDNFPDDRSVSFRELMEDSRTEADEDRGQGDSSEEAPKQDRLVSISVGRENIARDKVFVPTTGLPGAGSSVPADSPGSRLLQKHLFWFPAEAFHKPGLEKEVDDDTKKQFSAGDNHSGVKLVPGEPETKVIYGNTDGPSGPFVGKNDSKAGDPVVSSSDESWLDGYPVTEGAWRKTEAEEEEDGDRGDGSVGLDENVLVTPDQPILVEVKKPKSSTLTPSEGMTHSSVLPSQMLDVEALALRPVNASETEGIGDGDLTKYQSTLPWRFITEESPMATLSYELTSSTLEILTVNTVKQTPNHIPSTIMATTQPPVETTVPEIQDSFPYLLSEDFFGQEGPGPGASEELHPTLESCVGDGCPGLSRGPVIATIVTVLCLLLLLAGVGMVWGYRKCQHKSSVYKLNVGQRQARHYHQQIEMEKV

SEQ ID NO: 4576 - protein, 846 aa, Homo sapiens
MLFTVSCSKMSSIVDRDDSSIFDGLVEEDDKDKAKRVSRNKSEKKRRDQFNVLIKELGSMLPGNARKMDKSTVLQKSIDFLRKHKEITAQSDASEIRQDWKPTFLSNEEFTQLMLEALDGFFLAIMTDGSIIYVSESVTSLLEHLPSDLVDQSIFNFIPEGEHSEVYKILSTHLLESDSLTPEYLKSKNQLEFCCHMLRGTIDPKEPSTYEYVKFIGNFKSLNSVSSSAHNGFEGTIQRTHRPSYEDRVCFVATVRLATPQFIKEMCTVEEPNEEFTSRHSLEWKFLFLDHRAPPIIGYLPFEVLGTSGYDYYHVDDLENLAKCHEHLMQYGKGKSCYYRFLTKGQQWIWLQTHYYITYHQWNSRPEFIVCTHTVVSYAEVRAERRRELGIEESLPETAADKSQDSGSDNRINTVSLKEALERFDHSPTPSASSRSSRKSSHTAVSDPSSTPTKIPTDTSTPPRQHLPAHEKMVQRRSSFSSQSINSQSVGSSLTQPVMSQATNLPIPQGMSQFQFSAQLGAMQHLKDQLEQRTRMIEANIHRQQEELRKIQEQLQMVHGQGLQMFLQQSNPGLNFGSVQLSSGNSSNIQQLAPINMQGQVVPTNQIQSGMNTGHIGTTQHMIQQQTLQSTSTQSQQNVLSGHSQQTSLPSQTQSTLTAPLYNTMVISQPAAGSMVQIPSSMPQNSTQSAAVTTFTQDRQIRFSQGQQLVTKLVTAPVACGAVMVPSTMLMGQVVTAYPTFATQQQQSQTLSVTQQQQQQSSQEQQLTSVQQPSQAQLTQPPQQFLQTSRLLHGNPSTQLILSAAFPLQQSTFPQSHHQQHQSQQQQQLSRHRTDSLPDPSKVQPQ

SEQ ID NO: 4577 - protein, 352 aa, Homo sapiens
MALPFRKDLEKYKDLDEDELLGNLSETELKQLETVLDDLDPENALLPAGFRQKNQTSKSTTGPFDREHLLSYLEKEALEHKDREDYVPYTGEKKGKIFIPKQKPVQTFTEEKVSLDPELEEALTSASDTELCDLAAILGMHNLITNTKFCNIMGSSNGVDQEHFSNVVKGEKILPVFDEPPNPTNVEESLKRTKENDAHLVEVNLNNIKNIPIPTLKDFAKALETNTHVKCFSLAATRSNDPVATAFAEMLKVNKTLKSLNVESNFITGVGILALIDALRDNETLAELKIDNQRQQLGTAVELEMAKMLEENTNILKFGYQFTQQGPRTRAANAITKNNDLVRKRRVEGDHQ

SEQ ID NO: 4578 - protein, 1066 aa, Homo sapiens
MEGLLHYINPAHAISLLSALNEERLKGQLCDVLLIVGDQKFRAHKNVLAASSEYFQSLFTNKENESQTVFQLDFCEPDAFDNVLNYIYSSSLFVEKSSLAAVQELGYSLGISFLTNIVSKTPQAPFPTCPNRKKVFVEDDENSSQKRSVIVCQSRNEAQGKTVSQNQPDVSHTSRPSPSIAVKANTNKPHVPKPIEPLHNLSLTEKSWPKDSSVVYAKSLEHSGSLDDPNRISLVKRNAVLPSKPLQDREAMDDKPGVSGQLPKGKALELALKRPRPPVLSVCSSSETPYLLKETNKGNGQGEDRNLLYYSKLGLVIPSSGSGSGNQSIDRSGPLVKSLLRRSLSMDSQVPVYSPSIDLKSSQGSSSVSSDAPGNVLCALSQKSSLKDCSEKTALDDRPQVLQPHRLRSFSASQSTDREGASPVTEVRIKTEPSSPLSDPSDIIRVTVGDAATTAAASSSSVTRDLSLKTEDDQKDMSRLPAKRRFQADRRLPFKKLKVNEHGSPVSEDNFEEGSSPTLLDADFPDSDLNKDEFGELEGTRPNKKFKCKHCLKIFRSTAGLHRHVNMYHNPEKPYACDICHKRFHTNFKVWTHCQTQHGIVKNPSPASSSHAVLDEKFQRKLIDIVREREIKKALIIKLRRGKPGFQGQSSSQAQQVIKRNLRSRAKGAYICTYCGKAYRFLSQFKQHIKMHPGEKPLGVNKVAKPKEHAPLASPVENKEVYQCRLCNAKLSSLLEQGSHERLCRNAAVCPYCSLRFFSPELKQEHESKCEYKKLTCLECMRTFKSSFSIWRHQVEVHNQNNMAPTENFSLPVLDHNGDVTGSSRPQSQPEPNKVNHIVTTKDDNVFSDSSEQVNFDSEDSSCLPEDLSLSKQLKIQVKEEPVEEAEEEAPEASTAPKEAGPSKEASLWPCEKCGKMFTVHKQLERHQELLCSVKPFICHVCNKAFRTNFRLWSHFQSHMSQASEESAHKESEVCPVPTNSPSPPPLPPPPPLPKIQPLEPDSPTGLSENPTPATEKLFVPQESDTLFYHAPPLSAITFKRQFMCKLCHRTFKTAFSLWSHEQTHN

SEQ ID NO: 4579 - protein, 647 aa, Homo sapiens
MEFSIKQSPLSVQSVVKCIKMKQAPEILGSANGKTPSCEVNRECSVFLSKAQLSSSLQEGVMQKFNGHDALPFIPADKLKDLTSRVFNGEPGAHDAKLRFESQEMKGIGTPPNTTPIKNGSPEIKLKITKTYMNGKPLFESSICGDSAADVSQSEENGQKPENKARRNRKRSIKYDSLLEQGLVEAALVSKISSPSDKKIPAKKESCPNTGRDKDHLLKYNVGDLVWSKVSGYPWWPCMVSADPLLHSYTKLKGQKKSARQYHVQFFGDAPERAWIFEKSLVAFEGEGQFEKLCQESAKQAPTKAEKIKLLKPISGKLRAQWEMGIVQAEEAASMSVEERKAKFTFLYVGDQLHLNPQVAKEAGIAAESLGEMAESSGVSEEAAENPKSVREECIPMKRRRRAKLCSSAETLESHPDIGKSTPQKTAEADPRRGVGSPPGRKKTTVSMPRSRKGDAASQFLVFCQKHRDEVVAEHPDASGEEIEELLRSQWSLLSEKQRARYNTKFALVAPVQAEEDSGNVNGKKRNHTKRIQDPTEDAEAEDTPRKRLRTDKHSLRKRDTITDKTARTSSYKAMEAASSLKSQAATKNLSDACKPLKKRNRASTAASSALGFSKSSSPSASLTENELLWEPTPVKLDLNPAALYCT

SEQ ID NO: 4580 - protein, 98 aa, Homo sapiens
MALLLALSLLVLWTSPAPTLSGTNDAEDCCLSVTQKPIPGYIVRNFHYLLIKDGCRVPAVVFTTLRGRQLCAPPDQPWVERIIQRLQRTSAKMKRRSS

SEQ ID NO: 4581 - protein, 369 aa, Homo sapiens
MAYSTVQRVALASGLVLALSLLLPKAFLSRGKRQEPPPTPEGKLGRFPPMMHHHQAPSDGQTPGARFQRSHLAEAFAKAKGSGGGAGGGGSGRGLMGQIIPIYGFGIFLYILYILFKLSKGKTTAEDGKCYTAMPGNTHRKITSFELAQLQEKLKETEAAMEKLINRVGPNGESRAQTVTSDQEKRLLHQLREITRVMKEGKFIDRFSPEKEAEEAPYMEDWEGYPEETYPIYDLSDCIKRRQETILVDYPDPKELSAEEIAERMGMIEEEESDHLGWESLPTDPRAQEDNSVTSCDPKPETCSCCFHEDEDPAVLAENAGFSADSYPEQEETTKEEWSQDFKDEGLGISTDKAYTGSMLRKRNPQGLE

SEQ ID NO: 4582 - protein, 359 aa, Homo sapiens
MPSLLLLFTAALLSSWAQLLTDANSWWSLALNPVQRPEMFIIGAQPVCSQLPGLSPGQRKLCQLYQEHMAYIGEGAKTGIKECQHQFRQRRWNCSTADNASVFGRVMQIGSRETAFTHAVSAAGVVNAISRACREGELSTCGCSRTARPKDLPRDWLWGGCGDNVEYGYRFAKEFVDAREREKNFAKGSEEQGRVLMNLQNNEAGRRAVYKMADVACKCHGVSGSCSLKTCWLQLAEFRKVGDRLKEKYDSAAAMRVTRKGRLELVNSRFTQPTPEDLVYVDPSPDYCLRNESTGSLGTQGRLCNKTSEGMDGCELMCCGRGYNQFKSVQVERCHCKFHWCCFVRCKKCTEIVDQYICK

SEQ ID NO: 4583 - protein, 1413 aa, Homo sapiens
MRHGVAWALLVAAALGLGARGVRGAVALADFYPFGAERGDAVTPKQDDGGSGLRPLSVPFPFFGAEHSGLYVNNNGIISFLKEVSQFTPVAFPIAKDRCVVAAFWADVDNRRAGDVYYREATDPAMLRRATEDVRHYFPELLDFNATWVFVATWYRVTFFGGSSSSPVNTFQTVLITDGKLSFTIFNYESIVWTTGTHASSGGNATGLGGIAAQAGFNAGDGQRYFSIPGSRTADMAEVETTTNVGVPGRWAFRIDDAQVRVGGCGHTTSVCLALRPCLNGGKCIDDCVTGNPSYTCSCLSGFTGRRCHLDVNECASQPCQNGGTCTHGINSFRCQCPAGFGGPTCETAQSPCDTKECQHGGQCQVENGSAVCVCQAGYTGAACEMDVDDCSPDPCLNGGSCVDLVGNYTCLCAEPFKGLRCETGDHPVPDACLSAPCHNGGTCVDADQGYVCECPEGFMGLDCRERVPDDCECRNGGRCLGANTTLCQCPLGFFGLLCEFEITAMPCNMNTQCPDGGYCMEHGGSYLCVCHTDHNASHSLPSPCDSDPCFNGGSCDAHDDSYTCECPRGFHGKHCEKARPHLCSSGPCRNGGTCKEAGGEYHCSCPYRFTGRHCEIGKPDSCASGPCHNGGTCFHYIGKYKCDCPPGFSGRHCEIAPSPCFRSPCVNGGTCEDRDTDFFCHCQAGYMGRRCQAEVDCGPPEEVKHATLRFNGTRLGAVALYACDRGYSLSAPSRIRVCQPHGVWSEPPQCLEIDECRSQPCLHGGSCQDRVAGYLCLCSTGYEGAHCELERDECRAHPCRNGGSCRNLPGAYVCRCPAGFVGVHCETEVDACDSSPCQHGGRCESGGGAYLCVCPESFFGYHCETVSDPCFSSPCGGRGYCLASNGSHSCTCKVGYTGEDCAKELFPPTALKMERVEESGVSISWNPPNGPAARQMLDGYAVTYVSSDGSYRRTDFVDRTRSSHQLQALAAGRAYNISVFSVKRNSNNKNDISRPAVLLARTRPRPVEGFEVTNVTASTISVQWALHRIRHATVSGVRVSIRHPEALRDQATDVDRSVDRFTFRALLPGKRYTIQLTTLSGLRGEEHPTESLATAPTHVWTRPLPPANLTAARVTATSAHVVWDAPTPGSLLEAYVINVTTSQSTKSRYVPNGKLASYTVRDLLPGRRYQLSVIAVQSTELGPQHSEPAHLYIITSPRDGADRRWHQGGHHPRVLKNRPPPARLPELRLLNDHSAPETPTQPPRFSELVDGRGRVSARFGGSPSKAATVRSQPTASAQLENMEEAPKRVSLALQLPEHGSKDIGNVPGNCSENPCQNGGTCVPGADAHSCDCGPGFKGRRCELACIKVSRPCTRLFSETKAFPVWEGGVCHHVYKRVYRVHQDICFKESCESTSLKKTPNRKQSKSQTLEKS

SEQ ID NO: 4584 - protein, 591 aa, Homo sapiens
MVPSSPAVEKQVPVEPGPDPELRSWRHLVCYLCFYGFMAQIRPGESFITPYLLGPDKNFTREQVTNEITPVLSYSYLAVLVPVFLLTDYLRYTPVLLLQGLSFVSVWLLLLLGHSVAHMQLMELFYSVTMAARIAYSSYIFSLVRPARYQRVAGYSRAAVLLGVFTSSVLGQLLVTVGRVSFSTLNYISLAFLTFSVVLALFLKRPKRSLFFNRDDRGRCETSASELERMNPGPGGKLGHALRVACGDSVLARMLRELGDSLRRPQLRLWSLWWVFNSAGYYLVVYYVHILWNEVDPTTNSARVYNGAADAASTLLGAITSFAAGFVKIRWARWSKLLIAGVTATQAGLVFLLAHTRHPSSIWLCYAAFVLFRGSYQFLVPIATFQIASSLSKELCALVFGVNTFFATIVKTIITFIVSDVRGLGLPVRKQFQLYSVYFLILSIIYFLGAMLDGLRHCQRGHHPRQPPAQGLRSAAEEKAAQALSVQDKGLGGLQPAQSPPLSPEDSLGAVGPASLEQRQSDPYLAQAPAPQAAEFLSPVTTPSPCTLCSAQASGPEAADETCPQLAVHPPGVSKLGLQCLPSDGVQNVNQ

SEQ ID NO: 4585 - protein, 192 aa, Homo sapiens [sequence omitted]

SEQ ID NO: 4586 - protein, 811 aa, Homo sapiens
MRLIRNIYIFCSIVMTAEGDAPELPEERELMTNCSNMSLRKVPADLTPATTTLDLSYNLLFQLQSSDFHSVSKLRVLILCHNRIQQLDLKTFEFNKELRYLDLSNNRLKSVTWYLLAGLRYLDLSFNDFDTMPICEEAGNMSHLEILGLSGAKIQKSDFQKIAHLHLNTVFLGFRTLPHYEEGSLPILNTTKLHIVLPMDTNFWVLLRDGIKTSKILEMTNIDGKSQFVSYEMQRNLSLENAKTSVLLLNKVDLLWDDLFLILQFVWHTSVEHFQIRNVTFGGKAYLDHNSFDYSNTVMRTIKLEHVHFRVFYIQQDKIYLLLTKMDIENLTISNAQMPHMLFPNYPTKFQYLNFANNILTDELFKRTIQLPHLKTLILNGNKLETLSLVSCFANNTPLEHLDLSQNLLQHKNDENCSWPETVVNMNLSYNKLSDSVFRCLPKSIQILDLNNNQIQTVPKETIHLMALRELNIAFNFLTDLPGCSHFSRLSVLNIEMNFILSPSLDFVQSCQEVKTLNAGRNPFRCTCELKNFIQLETYSEVMMVGWSDSYTCEYPLNLRGTRLKDVHLHELSCNTALLIVTIVVIMLVLGLAVAFCCLHFDLPWYLRMLGQCTQTWHRVRKTTQEQLKRNVRFHAFISYSEHDSLWVKNELIPNLEKEDGSILICLYESYFDPGKSISENIVSFIEKSYKSIFVLSPNFVQNEWCHYEFYFAHHNLFHENSDHIILILLEPIPFYCIPTRYHKLKALLEKKAYLEWPKDRRKCGLFWANLRAAINVNVLATREMYELQTFTELNEESRGSTISLMRTDCL

SEQ ID NO: 4587 - protein, 160 aa, Homo sapiens
MLLLLLSIIVLHVAVLVLLFVSTIVSQWIVGNGHATDLWQNCSTSSSGNVHHCFSSSPNEWLQSVQATMILSIIFSILSLFLFFCQLFTLTKGGRFYITGIFQILAGLCVMSAAAIYTVRHPEWHLNSDYSYGFAYILAWVAFPLALLSGVIYVILRKRE

SEQ ID NO: 4588 - protein, 810 aa, Homo sapiens
MEHKEVVLLLLLFLKSGQGEPLDDYVNTQGASLFSVTKKQLGAGSIEECAAKCEEDEEFTCRAFQYHSKEQQCVIMAENRKSSIIIRMRDVVLFEKKVYLSECKTGNGKNYRGTMSKTKNGITCQKWSSTSPHRPRFSPATHPSEGLEENYCRNPDNDPQGPWCYTTDPEKRYDYCDILECEEECMHCSGENYDGKISKTMSGLECQAWDSQSPHAHGYIPSKFPNKNLKKNYCRNPDRELRPWCFTTDPNKRWELCDIPRCTTPPPSSGPTYQCLKGTGENYRGNVAVTVSGHTCQHWSAQTPHTHNRTPENFPCKNLDENYCRNPDGKRAPWCHTTNSQVRWEYCKIPSCDSSPVSTEQLAPTAPPELTPVVQDCYHGDGQSYRGTSSTTTTGKKCQSWSSMTPHRHQKTPENYPNAGLTMNYCRNPDADKGPWCFTTDPSVRWEYCNLKKCSGTEASVVAPPPVVLLPDVETPSEEDCMFGNGKGYRGKRATTVTGTPCQDWAAQEPHRHSIFTPETNPRAGLEKNYCRNPDGDVGGPWCYTTNPRKLYDYCDVPQCAAPSFDCGKPQVEPKKCPGRVVGGCVAHPHSWPWQVSLRTRFGMHFCGGTLISPEWVLTAAHCLEKSPRPSSYKVILGAHQEVNLEPHVQEIEVSRLFLEPTRKDIALLKLSSPAVITDKVIPACLPSPNYVVADRTECFITGWGETQGTFGAGLLKEAQLPVIENKVCNRYEFLNGRVQSTELCAGHLAGGTDSCQGDSGGPLVCFEKDKYILQGVTSWGLGCARPNKPGVYVRVSRFVTWIEGVMRNN

SEQ ID NO: 4589 - protein, 1009 aa, Homo sapiens
MSWMFKRDPVWKYLQTVQYGVHGNFPRLSYPTFFPRFEFQDVIPPDDFLTSDEEVDSVLFGSLRGHVVGLRYYTGVVNNNEMVALQRDPNNPYDKNAIKVNNVNGNQVGHLKKELAGALAYIMDNKLAQIEGVVPFGANNAFTMPLHMTFWGKEENRKAVSDQLKKHGFKLGPAPKTLGFNLESGWGSGRAGPSYSMPVHAAVQMTTEQLKTEFDKLFEDLKEDDKTHEMEPAEAIETPLLPHQKQALAWMVSRENSKELPPFWEQRNDLYYNTITNFSEKDRPENVHGGILADDMGLGKTLTAIAVILTNFHDGRPLPIERVKKNLLKKEYNVNDDSMKLGGNNTSEKADGLSKDASRCSEQPSISDIKEKSKFRMSELSSSRPKRRKTAVQYIESSDSEEIETSELPQKMKGKLKNVQSETKGRAKAGSSKVIEDVAFACALTSSVPTTKKKMLKKGACAVEGSKKTDVEERPRTTLIICPLSVLSNWIDQFGQHIKSDVHLNFYVYYGPDRIREPALLSKQDIVLTTYNILTHDYGTKGDSPLHSIRWLRVILDEGHAIRNPNAQQTKAVLDLESERRWVLTGTPIQNSLKDLWSLLSFLKLKPFIDREWWHRTIQRPVTMGDEGGLRRLQSLIKNITLRRTKTSKIKGKPVLELPERKVFIQHITLSDEERKIYQSVKNEGRATIGRYFNEGTVLAHYADVLGLLLRLRQICCHTYLLTNAVSSNGPSGNDTPEELRKKLIRKMKLILSSGSDEECAICLDSLTVPVITHCAHVFCKPCICQVIQNEQPHAKCPLCRNDIHEDNLLECPPEELARDSEKKSDMEWTSSSKINALMHALTDLRKKNPNIKSLVVSQFTTFLSLIEIPLKASGFVFTRLDGSMAQKKRVESIQCFQNTEAGSPTIMLLSLKAGGVGLNLSAASRVFLMDPAWNPAAEDQCFDRCHRLGQKQEVIITKFIVKDSVEENMLKIQNKKRELAAGAFGTKKPNADEMKQAKINEIRTLIDL

SEQ ID NO: 4590 - protein, 610 aa, Homo sapiens
MGLKAAQKTLFPLRSIDDVVRLFAAELGREEPDLVLLSLVLGFVEHFLAVNRVIPTNVPELTFQPSPAPDPPGGLTYFPVADLSIIAALYARFTAQIRGAVDLSLYPREGGVSSRELVKKVSDVIWNSLSRSYFKDRAHIQSLFSFITGTKLDSSGVAFAVVGACQALGLRDVHLALSEDHAWVVFGPNGEQTAEVTWHGKGNEDRRGQTVNAGVAERSWLYLKGSYMRCDRKMEVAFMVCAINPSIDLHTDSLELLQLQQKLLWLLYDLGHLERYPMALGNLADLEELEPTPGRPDPLTLYHKGIASAKTYYRDEHIYPYMYLAGYHCRNRNVREALQAWADTATVIQDYNYCREDEEIYKEFFEVANDVIPNLLKEAASLLEAGEERPGEQSQGTQSQGSALQDPECFAHLLRFYDGICKWEEGSPTPVLHVGWATFLVQSLGRFEGQVRQKVRIVSREAEAAEAEEPWGEEAREGRRRGPRRESKPEEPPPPKKPALDKGLGTGQGAVSGPPRKPPGTVAGTARGPEGGSTAQVPAPTASPPPEGPVLTFQSEKMKGMKELLVATKINSSAIKLQLTAQSQVQMKKQKVSTPSDYTLSFLKRQRKGL

SEQ ID NO: 4591 - protein, 222 aa, Homo sapiens
MALHIHEACILLLVIPGLVTSAAISHEDYPADEGDQISSNDNLIFDDYRGKGCVDDSGFVYKLGERFFPGHSNCPCVCALDGPVCDQPECPKIHPKCTKVEHNGCCPECKEVKNFCEYHGKNYKILEEFKPSPCEWCRCEPSNEVHCVVADCAVPECVNPVYEPEQCCPVCKNGPNCFAGTTIIPAGIEVKVDECNICHCHNGDWWKPAQCSKRECQGKQTV

SEQ ID NO: 4592 - protein, 349 aa, Homo sapiens
MKENVASATVFTLLLFLNTCLLNGQLPPGKPEIFKCRSPNKETFTCWWRPGTDGGLPTNYSLTYHREGETLMHECPDYITGGPNSCHFGKQYTSMWRTYIMMVNATNQMGSSFSDELYVDVTYIVQPDPPLELAVEVKQPEDRKPYLWIKWSPPTLIDLKTGWFTLLYEIRLKPEKAAEWEIHFAGQQTEFKILSLHPGQKYLVQVRCKPDHGYWSAWSPATFIQIPSDFTMNDTTVWISVAVLSAVICLIIVWAVALKGYSMVTCIFPPVPGPKIKGFDAHLLEKGKSEELLSALGCQDFPPTSDYEDLLVEYLEVDDSEDQHLMSVHSKEHPSQEREQRQAQEARDS

SEQ ID NO: 4593 - protein, 1222 aa, Homo sapiens
MSQPPPPPPPLPPPPPPPEAPQTPSSLASAAASGGLLKRRDRRILSGSCPDPKCQARLFFPASGSVSIECTECGQRHEQQQLLGVEEVTDPDVVLHNLLRNALLGVTGAPKKNTELVKVMGLSNYHCKLLSPILARYGMDKQTGRAKLLRDMNQGELFDCALLGDRAFLIEPEHVNTVGYGKDRSGSLLYLHDTLEDIKRANKSQECLIPVHVDGDGHCLVHAVSRALVGRELFWHALRENLKQHFQQHLARYQALFHDFIDAAEWEDIINECDPLFVPPEGVPLGLRNIHIFGLANVLHRPIILLDSLSGMRSSGDYSATFLPGLIPAEKCTGKDGHLNKPICIAWSSSGRNHYIPLVGIKGAALPKLPMNLLPKAWGVPQDLIKKYIKLEEDGGCVIGGDRSLQDKYLLRLVAAMEEVFMDKHGIHPSLVADVHQYFYRRTGVIGVQPEEVTAAAKKAVMDNRLHKCLLCGALSELHVPPEWLAPGGKLYNLAKSTHGQLRTDKNYSFPLNNLVCSYDSVKDVLVPDYGMSNLTACNWCHGTSVRKVRGDGSIVYLDGDRTNSRSTGGKCGCGFKHFWDGKEYDNLPEAFPITLEWGGRVVRETVYWFQYESDSSLNSNVYDVAMKLVTKHFPGEFGSEILVQKVVHTILHQTAKKNPDDYTPVNIDGAHAQRVGDVQGQESESQLPTKIILTGQKTKTLHKEELNMSKTERTIQQNITEQASVMQKRKTEKLKQEQKGQPRTVSPSTIRDGPSSAPATPTKAPYSPTTSKEKKIRITTNDGRQSMVTLKSSTTFFELQESIAREFNIPPYLQCIRYGFPPKELMPPQAGMEKEPVPLQHGDRITIEILKSKAEGGQSAAAHSAHTVKQEDIAVTGKLSSKELQEQAEKEMYSLCLLATLMGEDVWSYAKGLPHMFQQGGVFYSIMKKTMGMADGKHCTFPHLPGKTFVYNASEDRLELCVDAAGHFPIGPDVEDLVKEAVSQVRAEATTRSRESSPSHGLLKLGSGGVVKKKSEQLHNVTAFQGKGHSLGTASGNPHLDPRARETSVVRKHNTGTDFSNSSTKTEPSVFTASSSNSELIRIAPGVVTMRDGRQLDPDLVEAQRKKLQEMVSSIQASMDRHLRDQSTEQSPSDLPQRKTEVVSSSAKSGSLQTGLPESFPLTGGTENLNTETTDGCVADALGAAFATRSKAQRGNSVEELEEMDSQDAEMTNTTEPMDHS

SEQ ID NO: 4594 - protein, 1106 aa, Homo sapiens
MKLKEVDRTAMQAWSPAQNHPIYLATGTSAQQLDATFSTNASLEIFELDLSDPSLDMKSCATFSSSHRYHKLIWGPYKMDSKGDVSGVLIAGGENGNIILYDPSKIIAGDKEVVIAQNDKHTGPVRALDVNIFQTNLVASGANESEIYIWDLNNFATPMTPGAKTQPPEDISCIAWNRQVQHILASASPSGRATVWDLRKNEPIIKVSDHSNRMHCSGLAWHPDVATQMVLASEDDRLPVIQMWDLRFASSPLRVLENHARGILAIAWSMADPELLLSCGKDAKILCSNPNTGEVLYELPTNTQWCFDIQWCPRNPAVLSAASFDGRISVYSIMGGSTDGLRQKQVDKLSSSFGNLDPFGTGQPLPPLQIPQQTAQHSIVLPLKKPPKWIRRPVGASFSFGGKLVTFENVRMPSHQGAEQQQQQHHVFISQVVTEKEFLSRSDQLQQAVQSQGFINYCQKKIDASQTEFEKNVWSFLKVNFEDDSRGKYLELLGYRKEDLGKKIALALNKVDGANVALKDSDQVAQSDGEESPAAEEQLLGEHIKEEKEESEFLPSSGGTFNISVSGDIDGLITQALLTGNFESAVDLCLHDNRMADAIILAIAGGQELLARTQKKYFAKSQSKITRLITAVVMKNWKEIVESCDLKNWREALAAVLTYAKPDEFSALCDLLGTRLENEGDSLLQTQACLCYICAGNVEKLVACWTKAQDGSHPLSLQDLIEKVVILRKAVQLTQAMDTSTVGVLLAAKMSQYANLLAAQGSIAAALAFLPDNTNQPNIMQLRDRLCRAQGEPVAGHESPKIPYEKQQLPKGRPGPVAGHHQMPRVQTQQYYPHGENPPPPGFIMHGNVNPNAAGQLPTSPGHMHTQVPPYPQPQRPQNGWNDPPALNRVPKKKKMPENFMPPVPITSPIMNPLGDPQSQMLQQQPSAPVPLSSQSSFPQPHLPGGQPFHGVQQPLGQTGMPPSFSKPNIEGAPGAPIGNTFQHVQSLPTKKITKKPIPDEHLILKTTFEDLIQRCLSSATDPQTKRKLDDASKRLEFLYDKLREQTLSPTITSGLHNIARSIETRNYSEGLTMHTHIVSTSNFSETSAFMPVLKVVLTQANKLGV

SEQ ID NO: 4595 - protein, 609 aa, Homo sapiens
MWRLPGARAALRVIRTAVEKLSRAEAGSQTAAGAMERAVVRCVPSEPKLSLSFALADGSHKNMQRDQSEPLGRVLSRIATNALKGHAKAAAAKKSRKSRPNASGGAACSGPGPEPAVFCEPVVKLYYREEAVAEDVLNVDAWQDGAVLQIGDVKYKVERNPPAFTELQLPRYIMAGFPVCPKLSLEFGDPASSLFRWYKEAKPGAAEPEVGVPSSLSPSSPSSSWTETDVEERVYTPSNADIGLRLKLHCTPGDGQRFGHSRELESVCVVEAGPGTCTFDHRHLYTKKVTEDALIRTVSYNILADTYAQTEFSRTVLYPYCAPYALELDYRQNLIQKELTGYNADVICLQEVDRAVFSDSLVPALEAFGLEGVFRIKQHEGLATFYRKSKFSLLSQHDISFYEALESDPLHKELLEKLVLYPSAQEKVLQRSSVLQVSVLQSTKDSSKRICVANTHLYWHPKGGYIRLIQMAVALAHIRHVSCDLYPGIPVIFCGDFNSTPSTGMYHFVINGSIPEDHEDWASNGEEERCNMSLTHFFKLKSACGEPAYTNYVGGFHGCLDYIFIDLNALEVEQVIPLPSHEEVTTHQALPSVSHPSDHIALVCDLKWK

SEQ ID NO: 4596 - protein, 244 aa, Homo sapiens
MKKLMVVLSLIAAAWAEEQNKLVHGGPCDKTSHPYQAALYTSGHLLCGGVLIHPLWVLTAAHCKKPNLQVFLGKHNLRQRESSQEQSSVVRAVIHPDYDAASHDQDIMLLRLARPAKLSELIQPLPLERDCSANTTSCHILGWGKTADGDFPDTIQCAYIHLVSREECEHAYPGQITQNMLCAGDEKYGKDSCQGDSGGPLVCGDHLRGLVSWGNIPCGSKEKPGVYTNVCRYTNWIQKTIQAK

SEQ ID NO: 4597 - protein, 329 aa, Homo sapiens
MAALGGDGLRLLSVSRPERPPESAALGGLGPGLCCWVSVFSCLSLACSYVGSLYVWKSELPRDHPAVIKRRFTSVLVVSSLSPLCVLLWRELTGIQPGTSLLTLMGFRLEGIFPAALLPLLLTMILFLGPLMQLSMDCPCDLADGLKVVLAPRSWARCLTDMRWLRNQVIAPLTEELVFRACMLPMLAPCMGLGPAVFTCPLFFGVAHFHHIIEQLRFRQSSVGNIFLSAAFQFSYTAVFGAYTAFLFIRTGHLIGPVLCHSFCNYMGFPAVCAALEHPQRRPLLAGYALGVGLFLLLLQPLTDPKLYGSLPLCVLLERAGDSEAPLCS

SEQ ID NO: 4598 - protein, 364 aa, Homo sapiens
MVKLFIGNLPREATEQEIRSLFEQYGKVLECDIIKNYGFVHIEDKTAAEDAIRNLHHYKLHGVNINVEASKNKSKTSTKLHVGNISPTCTNKELRAKFEEYGPVIECDIVKDYAFVHMERAEDAVEAIRGLDNTEFQGKRMHVQLSTSRLRTAPGMGDQSGCYRCGKEGHWSKECPIDRSGRVADLTEQYNEQYGAVRTPYTMSYGDSLYYNNAYGALDAYYKRCRAARSYEAVAAAAASVYNYAEQTLSQLPQVQNTAMASHLTSTSLDPYDRHLLPTSGAAATAAAAAAAAAAVTAASTSYYGRDRSPLRRATAPVPTVGEGYGYGHESELSQASAAARNSLYDMARYEREQYADRARYSAF

SEQ ID NO: 4599 - protein, 165 aa, Homo sapiens
MSQATKRKHVVKEVLGEHIVPSDQQQIVRVLRTPGNNLHEVETAQGQRFLVSMPSKYRKNIWIKRGDFLIVDPIEEGEKVKAEISFVLCKDHVRSLQKEGFWPEAFSEVAEKHNNRNRQTQPELPAEPQLSGEESSSEDDSDLFVNTNRRQYHESEEESEEEEAA

SEQ ID NO: 4600 - protein, 882 aa, Homo sapiens
MLLGASWLCASKAAAAAAQSEGDEDRPGERRRRRAAATAAGAGEDMDESSLLDLLECSVCLERLDTTAKVLPCQHTFCRRCLESIVCSRHELRCPECRILVGCGVDELPANILLVRLLDGIRQRPRAGTSPGGSPPARPIPGQSAAPTLAGGGGGAAGSTPGSPVFLSAAAGSTAGSLRELATSRTAPAAKNPCLLPYGKALYSYEGKEPGDLKFNKGDIIVLRRKVDEQWYHGELHGTQGFLPASYIQCIQPLPHAPPQGKALYDFEMKDKDQDKDCLTFTKDEILTVLRRVDENWAEGMLGDKIGIFPLLYVELNDSAKQLIEMDKPCPAAASSCNASLPSDSGAVASVAPSPTLSSSGAVSAFQRRVDGKKNTKKRHSFTALSVTHRSSQAASHRHSMEISAPVLISSSDPRAAARIGDLAHLSCAAPTQDVSSSAGSTPTAVPRAASVSGEQGTPPKVQLPLNVYLALYAYKPQKSDELELHKGEMYRVLEKCQDGWFKGASLRTGVSGVFPGNYVTPVSRVPAGGAGPPRNNVVGGSPLAKGITTTMHPGSGSLSSLATATRPALPITTPQAHAQHPTASPPTGSCLRHSAQPTASQARSTISTAAHSAAQAQDRPTATVSPLRTQNSPSRLPATSLRPHSVVSPQHSHQPPVQMCPRPAIPLTSAASAITPPNVSAANLNGEAGGGPIGVLSTSSPTNTGCKLDEKKSEKKEKKSGLLKLLAGASTKKKSRSPPSVSPTHDPQVAVDALLQGAVGPEVSSLSIHGRAGSCPIESEMQGAMGMEPLHRKAGSLDLNFTSPSRQAPLSMAAIRPEPKLLPRERYRVVVSYPPQSEAEIELKEGDIVFVHKKREDGWYKGTLQRNGRTGLFPGSFVESF

SEQ ID NO: 4601 - protein, 335 aa, Homo sapiens
MIIVAHVLLILLGATEILQADLLPDEKISLLPPVNFTIKVTGLAQVLLQWKPNPDQEQRNVNLEYQVKINAPKEDDYETRITESKCVTILHKGFSASVRTILQNDHSLLASSWASAELHAPPGSPGTSIVNLTCTTNTTEDNYSRLRSYQVSLHCTWLVGTDAPEDTQYFLYYRYGSWTEECQEYSKDTLGRNIACWFPRTFILSKGRDWLAVLVNGSSKHSAIRPFDQLFALHAIDQINPPLNVTAEIEGTRLSIQWEKPVSAFPIHCFDYEVKIHNTRNGYLQIEKLMTNAFISIIDDLSKYDVQVRAAVSSMCREAGLWSEWSQPIYVGFSR

SEQ ID NO: 4602 - protein, 1746 aa, Homo sapiens
MSACNTFTEHVWKPGECKNCFKPKSLHQLPPDPEKAPITHGNVKTNANHSNNHRIRNTGNFRPPVAKKPTIAVKPTMIVADGQSICGELSIQEHCENKPVIIGWNRNRAALSQKPLNNNNEDDEGISHVPKPYGNNDSAKKMSDNNNGLTEVLKEIAGLDTAPQIRGNETNSRETFLGRINDCYKRSLERKLPPSCMIGGIKETQGKHVILSGSTEVISNEGGRFCYPEFSSGEESEEDVLFSNMEEEHESWDESDEELLAMEIRMRGQPRFANFRANTLSPVRFFVDKKWNTIPLRNKSLQRICAVDYDDSYDEILNGYEENSVVSYGQGSIQSMVSSDSTSPDSSLTEESRSETASSLSQKICNGGLSPGNPGDSKDMKEIEPNYESPSSNNQDKDSSQASKSSIKVPETHKAVLALRLEEKDGKIAVQTEKEESKASTDVAGQAVTINLVPTEEQAKPYRVVNLEQPLCKPYTVVDVSAAMASEHLEGPVNSPKTKSSSSTPNSPVTSSSLTPGQISAHFQKSSAIRYQEVWTSSTSPRQKIPKVELITSGTGPNVPPRKNCHKSAPTSPTATNISSKTIPVKSPNLSEIKFNSYNNAGMPPFPIIIHDEPTYARSSKNAIKVPIVINPNAYDNLAIYKSFLGTSGELSVKEKTTSVISHTYEEIETESKVPDNTTSKTTDCLQTKGFSNSTEHKRGSVAQKVQEFNNCLNRGQSSPQRSYSSSHSSPAKIQRATQEPVAKIEGTQESQMVGSSSTREKASTVLSQIVASIQPPQSPPETPQSGPKACSVEELYAIPPDADVAKSTPKSTPVRPKSLFTSQPSGEAEAPQTTDSPTTKVQKDPSIKPVTPSPSKLVTSPQSEPPAPFPPPRSTSSPYHAGNLLQRHFTNWTKPTSPTRSTEAESVLHSEGSRRAADAKPKRWISFKSFFRRRKTDEEDDKEKEREKGKLVGLDGTVIHMLPPPPVQRHHWFTEAKGESSEKPAIVFMYRCDPAQGQLSVDQSKARTDQAAVMEKGRAENALLQDSEKKRSHSSPSQIPKKILSHMTHEVTEDFSPRDPRTVVGKQDGRGCTSVTTALSLPELEREDGKEDISDPMDPNPCSATYSNLGQSRAAMIPPKQPRQPKGAVDDAIAFGGKTDQEAPNASQPTPPPLPKKMIIRANTEPISKDLQKSMESSLCVMANPTYDIDPNWDASSAGSSISYELKGLDIESYDSLERPLRKERPVPSAANSISSLTTLSIKDRFSNSMESLSSRRGPSCRQGRGIQKPQRQALYRGLENREEVVGKIRSLHTDALKKLAVKCEDLFMAGQKDQLRFGVDSWSDFRLTSDKPCCEAGDAVYYTASYAKDPLNNYAVKICKSKAKESQQYYHSLAVRQSLAVHFNIQQDCGHFLAEVPNRLLPWEDPDDPEKDEDDMEETEEDAKGETDGKNPKPCSEAASSQKENQGVMSKKQRSHVVVITREVPCLTVADFVRDSLAQHGKSPDLYERQVCLLLLQLCSGLEHLKPYHVTHCDLRLENLLLVHYQPGGTAQGFGPAEPSPTSSYPTRLIVSNFSQAKQKSHLVDPEILRDQSRLAPEIITATQYKKCDEFQTGILIYEMLHLPNPFDENPELKEREYTRADLPRIPFRSPYSRGLQQLASCLLNPNPSERILISDAKGILQCLLWGPREDLFQTFTACPSLVQRNTLLQNWLDIKRTLLMIKFAEKSLDREGGISLEDWLCAQYLAFATTDSLSCIVKILQHR

SEQ ID NO: 4603 - protein, 235 aa, Homo sapiens
MAEGGAADLDTQRSDIATLLKTSLRKGDTWYLVDSRWFKQWKKYVGFDSWDKYQMGDQNVYPGPIDNSGLLKDGDAQSLKEHLIDELDYILLPTEGWNKLVSWYTLMEGQEPIARKVVEQGMFVKHCKVEVYLTELKLCENGNMNNVVTRRFSKADTIDTIEKEIRKIFSIPDEKETRLWNKYMSNTFEPLNKPDSTIQDAGLYQGQVLVIEQKNEDGTWPRGPSTPKKPLEQSC

SEQ ID NO: 4604 - protein, 640 aa, Homo sapiens
MESVVRRCPFLSRVPQAFLQKAGKSLLFYAQNCPKMMEVGAKPAPRALSTAAVHYQQIKETPPASEKDKTAKAKVQQTPDGSQQSPDGTQLPSGHPLPATSQGTASKCPFLAAQMNQRGSSVFCKASLELQEDVQEMNAVRKEVAETSAGPSVVSVKTDGGDPSGLLKNFQDIMQKQRPERVSHLLQDNLPKSVSTFQYDRFFEKKIDEKKNDHTYRVFKTVNRRAHIFPMADDYSDSLITKKQVSVWCSNDYLGMSRHPRVCGAVMDTLKQHGAGAGGTRNISGTSKFHVDLERELADLHGKDAALLFSSCFVANDSTLFTLAKMMPGCEIYSDSGNHASMIQGIRNSRVPKYIFRHNDVSHLRELLQRSDPSVPKIVAFETVHSMDGAVCPLEELCDVAHEFGAITFVDEVHAVGLYGARGGGIGDRDGVMPKMDIISGTLGKAFGCVGGYIASTSSLIDTVRSYAAGFIFTTSLPPMLLAGALESVRILKSAEGRVLRRQHQRNVKLMRQMLMDAGLPVVHCPSHIIPVRVADAAKNTEVCDELMSRHNIYVQAINYPTVPRGEELLRIAPTPHHTPQMMNYFLENLLVTWKQVGLELKPHSSAECNFCRRPLHFEVMSEREKSYFSGLSKLVSAQA

SEQ ID NO: 4605 - protein, 1035 aa, Homo sapiens
MAPRLQLEKAAWRWAETVRPEEVSQEHIETAYRIWLEPCIRGVCRRNCKGNPNCLVGIGEHIWLGEIDENSFHNIDDPNCERRKKNSFVGLTNLGATCYVNTFLQVWFLNLELRQALYLCPSTCSDYMLGDGIQEEKDYEPQTICEHLQYLFALLQNSNRRYIDPSGFVKALGLDTGQQQDAQEFSKLFMSLLEDTLSKQKNPDVRNIVQQQFCGEYAYVTVCNQCGRESKLLSKFYELELNIQGHKQLTDCISEFLKEEKLEGDNRYFCENCQSKQNATRKIRLLSLPCTLNLQLMRFVFDRQTGHKKKLNTYIGFSEILDMEPYVEHKGGSYVYELSAVLIHRGVSAYSGHYIAHVKDPQSGEWYKFNDEDIEKMEGKKLQLGIEEDLAEPSKSQTRKPKCGKGTHCSRNAYMLVYRLQTQEKPNTTVQVPAFLQELVDRDNSKFEEWCIEMAEMRKQSVDKGKAKHEEVKELYQRLPAGAEPYEFVSLEWLQKWLDESTPTKPIDNHACLCSHDKLHPDKISIMKRISEYAADIFYSRYGGGPRLTVKALCKECVVERCRILRLKNQLNEDYKTVNNLLKAAVKGSDGFWVGKSSLRSWRQLALEQLDEQDGDAEQSNGKMNGSTLNKDESKEERKEEEELNFNEDILCPHGELCISENERRLVSKEAWSKLQQYFPKAPEFPSYKECCSQCKILEREGEENEALHKMIANEQKTSLPNLFQDKNRPCLSNWPEDTDVLYIVSQFFVEEWRKFVRKPTRCSPVSSVGNSALLCPHGGLMFTFASMTKEDSKLIALIWPSEWQMIQKLFVVDHVIKITRIEVGDVNPSETQYISEPKLCPECREGLLCQQQRDLREYTQATIYVHKVVDNKKVMKDSAPELNVSSSETEEDKEEAKPDGEKDPDFNQSNGGTKRQKISHQNYIAYQKQVIRRSMRHRKVRGEKALLVSANQTLKELKIQIMHAFSVAPFDQNLSIDGKILSDDCATLGTLGVIPESVILLKADEPIADYAAMDDVMQVCMPEEGFKGTGLLGH

SEQ ID NO: 4606 - protein, 1138 aa, Homo sapiens
MAPTLFQKLFSKRTGLGAPGRDARDPDCGFSWPLPEFDPSQIRLIVYQDCERRGRNVLFDSSVKRRNEDISVSKLGSDAQVKVFGKCCQLKPGGDSSSSLDSSVTSSSDIKDQCLKYQGSRCSSDANMLGEMMFGSVAMSYKGSTLKIHQIRSPPQLMLSKVFTARTGSSICGSLNTLQDSLEFINQDNNTLKADNNTVINGLLGNIVHSNPMDMPGRELNEDRDSGIARSASLSSLLITPFPSPNSSLTRSCASSYQRRWRRSQTTSLENGVFPRWSIEESFNLSDESCGPNPGIVRKKKIAIGVIFSLSKDEDENNKFNEFFFSHFPLFESHMNKLKSAIEQAMKMSRRSADASQRSLAYNRIVDALNEFRTTICNLYTMPRIGEPVWLTMMSGTPEKNHLCYRFMKEFTFLMENASKNQFLPALITAVLTNHLAWVPTVMPNGQPPIKIFLEKHSSQSVDMLAKTHPYNPLWAQLGDLYGAIGSPVRLARTVVVGKRQDMVQRLLYFLTYFIRCSELQETHLLENGEDEAIVMPGTVITTTLEKGEIEESEYVLVTMHRNKSSLLFKESEEIRTPNCNCKYCSHPLLGQNVENISQQEREDIQNSSKELLGISDECQMISPSDCQEENAVDVKQYRDKLRTCFDAKLETVVCTGSVPVDKCALSESGLESTEETWQSEKLLDSDSHTGKAMRSTGMVVEKKPPDKIVPASFSCEAAQTKVTFLIGDSMSPDSDTELRSQAVVDQITRHHTKPLKEERGAIDQHQETKQTTKDQSGESDTQNMVSEEPCELPCWNHSDPESMSLFDEYFNDDSIETRTIDDVPFKTSTDSKDHCCMLEFSKILCTKNNKQNNEFCKCIETVPQDSCKTCFPQQDQRDTLSILVPHGDKESSDKKIAVGTEWDIPRNESSDSALGDSESEDTGHDMTRQVSSYYGGEQEDWAEEDEIPFPGSKLIEVSAVQPNIANFGRSLLGGYCSSYVPDFVLQGIGSDERFRQCLMSDLSHAVQHPVLDEPIAEAVCIIADMDKWTVQVASSQRRVTDNKLGKEVLVSSLVSNLLHSTLQLYKHNLSPNFCVMHLEDRLQELYFKSKMLSEYLRGQMRVHVKELGVVLGIESSDLPLLAAVASTHSPYVAQILL

SEQ ID NO: 4607 - protein, 519 aa, Homo sapiens
MDDHVTIRKKHLQRPIFRLRCLVKQLERGDVNVVDLKKNIEYAASVLEAVYIDETRRLLDTEDELSDIQTDSVPSEVRDWLASTFTRKMGMTKKKPEEKPKFRSIVHAVQAGIFVERMYRKTYHMVGLAYPAAVIVTLKDVDKWSFDVFALNEASGEHSLKFMIYELFTRYDLINRFKIPVSCLITFAEALEVGYSKYKNPYHNLIHAADVTQTVHYIMLHTGIMHWLTELEILAMVFAAAIHDYEHTGTTNNFHIQTRSDVAILYNDRSVLENHHVSAAYRLMQEEEMNILINLSKDDWRDLRNLVIEMVLSTDMSGHFQQIKNIRNSLQQPEGIDRAKTMSLILHAADISHPAKSWKLHYRWTMALMEEFFLQGDKEAELGLPFSPLCDRKSTMVAQSQIGFIDFIVEPTFSLLTDSTEKIVIPLIEEASKAETSSYVASSSTTIVGLHIADALRRSNTKGSMSDGSYSPDYSLAAVDLKSFKNNLVDIIQQNKERWKELAAQEARTSSQKCEFIHQ

SEQ ID NO: 4608 - protein, 555 aa, Homo sapiens
MDVSSEHTKDPGGEGGDGESLAARPSKIKASSGPPTSPEPGELESEPEEEEEEQAASQGGTAADEQAEAPKGLTAAEAAGEEGPGEPGRPAEPQPEPEEPAEVGAEEPAQPEPGAGPEELEAEAGAEELEQAAEGKEVRFQASLPLTRIDEEEAAAAPEAETERVEGEEEDKEETQRDGAESKERDGEGRPAKSQEEGKRLYGRDEFEDLEWSEEVQKLQEQQLRSDLLDQYRSLLVERNRSQRYNLYLQHKIFEALRRKKGLEAAEVADRGAEAEAPEKEQAYLRHLGMLEELKKQQADDLQWYHQELGQLKRQCQEKLTRVEKEWRRFQALKKQVVMQAMGSCRMRGGRQAALREVEQIQALEDKKEKEMSAVRLENIQLKQSLVHFETRMRTQEDLTQGLLLIDFEQLKIENQTFNEKIEERNEELLKLRSKVTNSVQVITHVKEKLHFMDMENACKKTQLAEIEAQAALGRDILTKTKQAREGLRTDNIRLNQKCGLLGKDSLLRDLEEKVDKTELLHRRLESLKRHHASLTLSCRGVRQKIREAKAFLPS

SEQ ID NO: 4609 - protein, 1145 aa, Homo sapiens
MRRRYEDDGISDDEIEGKRTFDLEEKLHTNKYNANFVTFMEGKDFNVEYIQRGGLRDPLIFKNSDGLGIKMPDPDFTVNDVKMCVGSRRMVDVMDVNTQKGIEMTMAQWTRYYETPEEEREKLYNVISLEFSHTRLENMVQRPSTVDFIDWVDNMWPRHLKESQTESTNAILEMQYPKVQKYCLMSVRGCYTDFHVDFGGTSVWYHIHQGGKVFWLIPPTAHNLELYENWLLSGKQGDIFLGDRVSDCQRIELKQGYTFVIPSGWIHAVYTPTDTLVFGGNFLHSFNIPMQLKIYNIEDRTRVPNKFRYPFYYEMCWYVLERYVYCITNRSHLTKEFQKESLSMDLELNGLESGNGDEEAVDREPRRLSSRRSVLTSPVANGVNLDYDGLGKTCRSLPSLKKTLAGDSSSDCSRGSHNGQVWDPQCAPRKDRQVHLTHFELEGLRCLVDKLESLPLHKKCVPTGIEDEDALIADVKILLEELANSDPKLALTGVPIVQWPKRDKLKFPTRPKVRVPTIPITKPHTMKPAPRLTPVRPAAASPIVSGARRRRVRCRKCKACVQGECGVCHYCRDMKKFGGPGRMKQSCVLRQCLAPRLPHSVTCSLCGEVDQNEETQDFEKKLMECCICNEIVHPGCLQMDGEGLLNEELPNCWECPKCYQEDSSEKAQKRKMEESDEEAVQAKVLRPLRSCDEPLTPPPHSPTSMLQLIHDPVSPRGMVTRSSPGAGPSDHHSASRDERFKRRQLLRLQATERTMVREKENNPSGKKELSEVEKAKIRGSYLTVTLQRPTKELHGTSIVPKLQAITASSANLRHSPRVLVQHCPARTPQRGDEEGLGGEEEEEEEEEEEDDSAEEGGAARLNGRGSWAQDGDESWMQREVWMSVFRYLSRRELCECMRVCKTWYKWCCDKRLWTKIDLSRCKAIVPQALSGIIKRQPVSLDLSWTNISKKQLTWLVNRLPGLKDLLLAGCSWSAVSALSTSSCPLLRTLDLRWAVGIKDPQIRDLLTPPADKPGQDNRSKLRNMTDFRLAGLDITDATLRLIIRHMPLLSRLDLSHCSHLTDQSSNLLTAVGSSTRYSLTELNMAGCNKLTDQTLIYLRRIANVTLIDLRGCKQITRKACEHFISDLSINSLYCLSDEKLIQKIS

SEQ ID NO: 4610 - protein, 530 aa, Homo sapiens
MPGPPGSLEMGPLTFRDVAIEFSLEEWQCLDTAQRNLYRKVMFENYRNLVFLGIAVSKPHLITCLEQGKEPWNRKRQEMVAKPPVIYSHFTEDLWPEHSIKDSFQKVILRGYGKCGHENLQLRISCKSVDESKVFKEGYNELNQCLRTTQSKIFQCDKYVKVFHKFSNSNSHKKRNTGKKVFKCKECGKSFCMLSHLTQHIRIHTRENSYKCEECGKVLNWFSELIKHKGIHMGEKPYKCEECGKAFNQSSTLIKHKKIHIEEKPFKCEECGKAFSLFSILSKHKIIHTGDKPYKCDECHKAFNWFATLTNHKRIHTGEKPFKCEECGKDFNQFSNLTKHKKIHTGEKPYKCEECGKAFNQFANLTRHKKIHTGEKSYKCEECGKAFIQSSNLTEHMRIHTGEKPYKCEECGKAFNGCSSLTRHKRIHTRENTYKCEECGKGFTLFSTLTNHKVIHTGEKSYKCDECGNVFNWPATLANHKRIHAREKPYKCEECGKAFNRSSHLTRHKKIHTGEKLYKPEKCDNNFDNT

SEQ ID NO: 4611 - protein, 204 aa, Homo sapiens [sequence omitted]

SEQ ID NO: 4612 - protein, 222 aa, Homo sapiens
MSSYVANSFYKQSPNIPAYNMQTCGNYGSASEVQASRYCYGGLDLSITFPPPAPSNSLHGVDMAANPRAHPDRPACSAAAAPGHAPGRDEAAPLNPGMYSQKAARPALEERAKSSGEIKEEQAQTGQPAGLSQPPAPPQIYPWMTKLHMSHETDGKRSRTSYTRYQTLELEKEFHFNRYLTRRRRIEIANNLCLNERQIKIWFQNRRMKWKKDSKMKSKEAL

SEQ ID NO: 4613 - protein, 225 aa, Homo sapiens
MDLRAGDSWGMLACLCTVLWHLPAVPALNRTGDPGPGPSIQKTYDLTRYLEHQLRSLAGTYLNYLGPPFNEPDFNPPRLGAETLPRATVDLEVWRSLNDKLRLTQNYEAYSHLLCYLRGLNRQAATAELRRSLAHFCTSLQGLLGSIAGVMAALGYPLPQPLPGTEPTWTPGPAHSDFLQKMDDFWLLKELQTWLWRSAKDFNRLKKKMQPPAAAVTLHLGAHGF

SEQ ID NO: 4614 - protein, 197 aa, Homo sapiens
MSRLSRSLLWAATCLGVLCVLSADKNTTQHPNVTTLAPISNVTSAPVTSLPLVTTPAPETCEGRNSCVSCFNVSVVNTTCFWIECKDESYCSHNSTVSDCQVGNTTDFCSVSTATPVPTANSTAKPTVQPSPSTTSKTVTTSGTTNNTVTPTSQPVRKSTFDAASFIGGIVLVLGVQAVIFFLYKFCKSKERNYHTL

SEQ ID NO: 4615 - protein, 229 aa, Homo sapiens
MADDFGFFSSSESGAPEAAEEDPAAAFLAQQESEIAGIENDEGFGAPAGSHAAPAQPGPTSGAGSEDMGTTVNGDVFQEANGPADGYAAIAQADRLTQEPESIRKWREEQRKRLQELDAASKVTEQEWREKAKKDLEEWNQRQSEQVEKNKINNRIADKAFYQQPDADIIGYVASEEAFVKESKEETPGTEWEKVAQLCDFNPKSSKQCKDVSRLRSVLMSLKQTPLSR

SEQ ID NO: 4616 - protein, 284 aa, Homo sapiens
MGQPWAAGSTDGAPAQLPLVLTALWAAAVGLELAYVLVLGPGPPPLGPLARALQLALAAFQLLNLLGNVGLFLRSDPSIRGVMLAGRGLGQGWAYCYQCQSQVPPRSGHCSACRVCILRRDHHCRLLGRCVGFGNYRPFLCLLLHAAGVLLHVSVLLGPALSALLRAHTPLHMAALLLLPWLMLLTGRVSLAQFALAFVTDTCVAGALLCGAGLLFHGMLLLRGQTTWEWARGQHSYDLGPCHNLQAALGPRWALVWLWPFLASPLPGDGITFQTTADVGHTAS

SEQ ID NO: 4617 - protein, 555 aa, Homo sapiens
MAAAGAAATHLEVARGKRAALFFAAVAIVLGLPLWWKTTETYRASLPYSQISGLNALQLRLMVPVTVVFTRESVPLDDQEKLPFTVVHEREIPLKYKMKIKCRFQKAYRRALDHEEEALSSGSVQEAEAMLDEPQEQAEGSLTVYVISEHSSLLPQDMMSYIGPKRTAVVRGIMHREAFNIIGRRIVQVAQAMSLTEDVLAAALADHLPEDKWSAEKRRPLKSSLGYEITFSLLNPDPKSHDVYWDIEGAVRRYVQPFLNALGAAGNFSVDSQILYYAMLGVNPRFDSASSSYYLDMHSLPHVINPVESRLGSSAASLYPVLNFLLYVPELAHSPLYIQDKDGAPVATNAFHSPRWGGIMVYNVDSKTYNASVLPVRVEVDMVRVMEVFLAQLRLLFGIAQPQLPPKCLLSGPTSEGLMTWELDRLLWARSVENLATATTTLTSLAQLLGKISNIVIKDDVASEVYKAVAAVQKSAEELASGHLASAFVASQEAVTSSELAFFDPSLLHLLYFPDDQKFAIYIPLFLPMAVPILLSLVKIFLETRKSWRKPEKTD

SEQ ID NO: 4618 - protein, 466 aa, Homo sapiens
MAEAEGVPTTPGPASGSTFRGRRDVSGSWERDQQVEAAQRALVEVLGPYEPLLSRVQAALVWERPARSALWCLGLNAAFWFFALTSLRLVFLLAFGLMIIVCIDQWKNKIWPEIKVPRPDALDNESWGFVHPRLLSVPELCHHVAEVWVSGTIFIRNVLLFKKQNPGKFCLLSCGILTFLAVLGRYVPGLLLSYLMLVTVMMWPLAVYHRLWDRAYVRLKPALQRLDFSVRGYMMSKQRERQLRRRALHPERAMDNHSDSEEELAAFCPQLDDSTVARELAITDSEHSDAEVSCTDNGTFNLSRGQTPLTEGSEDLDGHSDPEESFARDLPDFPSINMDPAGLDDEDDTSIGMPSLMYRSPPGAEEPQAPPASRDEAALPELLLGALPVGSNLTSNLASLVSQGMIQLALSGASQPGPSGAPAQRATRGFLRSPSSDLDTDAEGDDFELLDQSELSQLDPASSRSH

SEQ ID NO: 4619 - protein, 780 aa, Homo sapiens
MTHEEHHAAKTLGIGKAIAVLTSGGDAQGMNAAVRAVVRVGIFTGARVFFVHEGYQGLVDGGDHIKEATWESVSMMLQLGGTVIGSARCKDFREREGRLRAAYNLVKRGITNLCVIGGDGSLTGADTFRSEWSDLLSDLQKAGKITDEEATKSSYLNIVGLVGSIDNDFCGTDMTIGTDSALHRIMEIVDAITTTAQSHQRTFVLEVMGRHCGYLALVTSLSCGADWVFIPECPPDDDWEEHLCRRLSETRTRGSRLNIIIVAEGAIDKNGKPITSEDIKNLVVKRLGYDTRVTVLGHVQRGGTPSAFDRILGSRMGVEAVMALLEGTPDTPACVVSLSGNQAVRLPLMECVQVTKDVTKAMDEKKFDEALKLRGRSFMNNWEVYKLLAHVRPPVSKSGSHTVAVMNVGAPAAGMNAAVRSTVRIGLIQGNRVLVVHDGFEGLAKGQIEEAGWSYVGGWTGQGGSKLGTKRTLPKKSFEQISANITKFNIQGLVIIGGFEAYTGGLELMEGRKQFDELCIPFVVIPATVSNNVPGSDFSVGADTALNTICTTCDRIKQSAAGTKRRVFIIETMGGYCGYLATMAGLAAGADAAYIFEEPFTIRDLQANVEHLVQKMKTTVKRGLVLRNEKCNENYTTDFIFNLYSEEGKGIFDSRKNVLGHMQQGGSPTPFDRNFATKMGAKAMNWMSGKIKESYRNGRIFANTPDSGCVLGMRKRALVFQPVAELKDQTDFEHRIPKEQWWLKLRPILKILAKYEIDLDTSDHAHLEHITRKRSGEAAV

SEQ ID NO: 4620 - protein, 854 aa, Homo sapiens
MAEAEEQETGSLEESTDESEEEESEEEPKLKYERLSNGVTEILQKDAASCMTVHDKFLALGTHYGKVYLLDVQGNITQKFDVSPVKINQISLDESGEHMGVCSEDGKVQVFGLYSGEEFHETFDCPIKIIAVHPHFVRSSCKQFVTGGKKLLLFERSWMNRWKSAVLHEGEGNIRSVKWRGHLIAWANNMGVKIFDIISKQRITNVPRDDISLRPDMYPCSLCWKDNVTLIIGWGTSVKVCSVKERHASEMRDLPSRYVEIVSQFETEFYISGLAPLCDQLVVLSYVKEISEKTEREYCARPRLDIIQPLSETCEEISSDALTVRGFQENECRDYHLEYSEGESLFYIVSPRDVVVAKERDQDDHIDWLLEKKKYEEALMAAEISQKNIKRHKILDIGLAYINHLVERGDYDIAARKCQKILGKNAALWEYEVYKFKEIGQLKAISPYLPRGDPVLKPLIYEMILHEFLESDYEGFATLIREWPGDLYNNSVIVQAVRDHLKKDSQNKTLLKTLAELYTYDKNYGNALEIYLTLRHKDVFQLIHKHNLFSSIKDKIVLLMDFDSEKAVDMLLDNEDKISIKKVVEELEDRPELQHVYLHKLFKRDHHKGQRYHEKQISLYAEYDRPNLLPFLRDSTHCPLEKALEICQQRNFVEETVYLLSRMGNSRSALKMIMEELHDVDKAIEFAKEQDDGELWEDLILYSIDKPPFITGLLNNIGTHVDPILLIHRIKEGMEIPNLRDSLVKILQDYNLQILLREGCKKILVADSLSLLKKMHRTQMKGVLVDEENICESCLSPILPSDAAKPFSVVVFHCRHMFHKECLPMPSMNSAAQFCNICSAKNRGPGSAILEMKK

SEQ ID NO: 4621 - protein, 953 aa, Homo sapiens
MITSAAGIISLLDEDEPQLKEFALHKLNAVVNDFWAEISESVDKIEVLYEDEGFRSRQFAALVASKVFYHLGAFEESLNYALGAGDLFNVNDNSEYVETIIAKCIDHYTKQCVENADLPEGEKKPIDQRLEGIVNKMFQRCLDDHKYKQAIGIALETRRLDVFEKTILESNDVPGMLAYSLKLCMSLMQNKQFRNKVLRVLVKIYMNLEKPDFINVCQCLIFLDDPQAVSDILEKLVKEDNLLMAYQICFDLYESASQQFLSSVIQNLRTVGTPIASVPGSTNTGTVPGSEKDSDSMETEEKTSSAFVGKTPEASPEPKDQTLKMIKILSGEMAIELHLQFLIRNNNTDLMILKNTKDAVRNSVCHTATVIANSFMHCGTTSDQFLRDNLEWLARATNWAKFTATASLGVIHKGHEKEALQLMATYLPKDTSPGSAYQEGGGLYALGLIHANHGGDIIDYLLNQLKNASNDIVRHGGSLGLGLAAMGTARQDVYDLLKTNLYQDDAVTGEAAGLALGLVMLGSKNAQAIEDMVGYAQETQHEKILRGLAVGIALVMYGRMEEADALIESLCRDKDPILRRSGMYTVAMAYCGSGNNKAIRRLLHVAVSDVNDDVRRAAVESLGFILFRTPEQCPSVVSLLSESYNPHVRYGAAMALGICCAGTGNKEAINLLEPMTNDPVNYVRQGALIASALIMIQQTEITCPKVNQFRQLYSKVINDKHDDVMAKFGAILAQGILDAGGHNVTISLQSRTGHTHMPSVVGVLVFTQFWFWFPLSHFLSLAYTPTCVIGLNKDLKMPKVQYKSNCKPSTFAYPAPLEVPKEKEKEKVSTAVLSITAKAKKKEKEKEKKEEEKMEVDEAEKKEEKEKKKEPEPNFQLLDNPARVMPAQLKVLTMPETCRYQPFKPLSIGGIIILKDTSEDIEELVEPVAAHGPKIEEEEQEPEPPEPFEYIDD

SEQ ID NO: 4622 - protein, 889 aa, Homo sapiens
MSNPFAHLAEPLDPVQPGKKFFNLNKLEDSRYGRLPFSIRVLLEAAIRNCDEFLVKKQDIENILHWNVTQHKNIEVPFKPARVILQDFTGVPAVVDFAAMRDAVKKLGGDPEKINPVCPADLVIDHSIQVDFNRRADSLQKNQDLEFERNRERFEFLKWGSQAFHNMRIIPPGSGIIHQVNLEYLARVVFDQDGYYYPDSLVGTDSHTTMIDGLGILGWGVGGIEAEAVMLGQPISMVLPQVIGYRLMGKPHPLVTSTDIVLTITKHLRQVGVVGKFVEFFGPGVAQLSIADRATIANMCPEYGATAAFFPVDEVSITYLVQTGRDEEKLKYIKKYLQAVGMFRDFNDPSQDPDFTQVVELDLKTVVPCCSGPKRPQDKVAVSDMKKDFESCLGAKQGFKGFQVAPEHHNDHKTFIYDNTEFTLAHGSVVIAAITSCTNTSNPSVMLGAGLLAKKAVDAGLNVMPYIKTSLSPGSGVVTYYLQESGVMPYLSQLGFDVVGYGCMTCIGNSGPLPEPVVEAITQGDLVAVGVLSGNRNFEGRVHPNTRANYLASPPLVIAYAIAGTIRIDFEKEPLGVNAKGQQVFLKDIWPTRDEIQAVERQYVIPGMFKEVYQKIETVNESWNALATPSDKLFFWNSKSTYIKSPPFFENLTLDLQPPKSIVDAYVLLNLGDSVTTDHISPAGNIARNSPAARYLTNRGLTPREFNSYGSRRGNDAVMARGTFANIRLLNRFLNKQAPQTIHLPSGEILDVFDAAERYQQAGLPLIVLAGKEYGAGSSRDWAAKGPFLLGIKAVLAESYERIHRSNLVGMGVIPLEYLPGENADALGLTGQERYTIIIPENLKPQMKVQVKLDTGKTFQAVMRFDTDVELTYFLNGGILNYMIRKMAK

SEQ ID NO: 4623 - protein, 335 aa, Homo sapiens
MVRPVRHKKPVNYSQFDHSDSDDDFVSATVPLNKKSRTAPKELKQDKPKPNLNNLRKEEIPVQEKTPKKRMALDDKLYQRDLEVALALSVKELPTVTTNVQNSQDKSIEKHGSSKIETMNKSPHISNCSVASDYLDLDKITVEDDVGGVQGKRKAASKAAAQQRKILLEGSDGDSANDTEPDFAPGEDSEDDSDFCESEDNDEDFSMRKSKVKEIKKKEVKVKSPVEKKEKKSKSKCNALVTSVDSAPAAVKSESQSLPKKVSLSSDTTRKPLEIRSPSAESKKPKWVPPAASGGSRSSSSPLVVVSVKSPNQSLRLGLSRLARVKPLHPNATST

SEQ ID NO: 4624 - protein, 926 aa, Homo sapiens
MAFLIILITCFVIILATSQPCQTPDDFVAATSPGHIIIGGLFAIHEKMLSSEDSPRRPQIQECVGFEISVFLQTLAMIHSIEMINNSTLLPGVKLGYEIYDTCTEVTVAMAATLRFLSKFNCSRETVEFKCDYSSYMPRVKAVIGSGYSEITMAVSRMLNLQLMPQVGYESTAEILSDKIRFPSFLRTVPSDFHQIKAMAHLIQKSGWNWIGIITTDDDYGRLALNTFIIQAEANNVCIAFKEVLPAFLSDNTIEVRINRTLKKIILEAQVNVIVVFLRQFHVFDLFNKAIEMNINKMWIASDNWSTATKITTIPNVKKIGKVVGFAFRRGNISSFHSFLQNLHLLPSDSHKLLHEYAMHLSACAYVKDTDLSQCIFNHSQRTLAYKANKAIERNFVMRNDFLWDYAEPGLIHSIQLAVFALGYAIRDLCQARDCQNPNAFQPWELLGVLKNVTFTDGWNSFHFDAHGDLNTGYDVVLWKEINGHMTVTKMAEYDLQNDVFIIPDQETKNEFRNLKQIQSKCSKECSPGQMKKTTRSQHICCYECQNCPENHYTNQTDMPHCLLCNNKTHWAPVRSTMCFEKEVEYLNWNDSLAILLLILSLLGIIFVLVVGIIFTRNLNTPVVKSSGGLRVCYVILLCHFLNFASTSFFIGEPQDFTCKTRQTMFGVSFTLCISCILTKSLKILLAFSFDPKLQKFLKCLYRPILIIFTCTGIQVVICTLWLIFAAPTVEVNVSLPRVIILECEEGSILAFGTMLGYIAILAFICFIFAFKGKYENYNEAKFITFGMLIYFIAWITFIPIYATTFGKYVPAVEIIVILISNYGILYCTFIPKCYVIICKQEINTKSAFLKMIYSYSSHSVSSIALSPASLDSMSGNVTMTNPSSSGKSATWQKSKDLQAQAFAHICRENATSVSKTLPRKRMSSI

SEQ ID NO: 4625 - protein, 245 aa, Homo sapiens
MDKNELVQKAKLAEQAERYDDMAACMKSVTEQGAELSNEERNLLSVAYKNVVGARRSSWRVVSSIEQKTEGAEKKQQMAREYREKIETELRDICNDVLSLLEKFLIPNASQAESKVFYLKMKGDYYRYLAEVAAGDDKKGIVDQSQQAYQEAFEISKKEMQPTHPIRLGLALNFSVFYYEILNSPEKACSLAKTAFDEAIAELDTLSEESYKDSTLIMQLLRDNLTLWTSDTQGDEAEAGEGGEN

SEQ ID NO: 4626 - protein, 222 aa, Homo sapiens
MAAGSRTSLLLAFALLCLPWLQEAGAVQTVPLSRLFKEAMLQAHRAHQLAIDTYQEFISSWGMEAYITKEQKYSFLHDSQTSFCFSDSIPTSSNMEETQQKSNLELLHISLLLIESRLEPVRFLRSTFTNNLVYDTSDSDDYHLLKDLEEGIQMLMGRLEDGSHLTGQTLKQTYSKFDTNSHNHDALLKNYGLLHCFRKDMDKVETFLRMVQCRSVEGSCGF

SEQ ID NO: 4627 - protein, 189 aa, Homo sapiens
MAAKQPPPLMKKHSQTDLVSRLKTRKILGVGGEDDDGEVHRSKISQVLGNEIKFTIREPLGLRVWQFVSAVLFSGIAIMALAFPDQLYDAVFDGAQVTSKTPIRLYGGALLSISLIMWNALYTAEKVIIRWTLLTEACYFGVQFLVVTATLAETGLMSLGILLLLVSRLLFVVISIYYYYQVGRRPKKA

SEQ ID NO: 4628 - protein, 572 aa, Homo sapiens
MSYQGKKNIPRITSDRLLIKGGKIVNDDQSFYADIYMEDGLIKQIGENLIVPGGVKTIEAHSRMVIPGGIDVHTRFQMPDQGMTSADDFFQGTKAALAGGTTMIIDHVVPEPGTSLLAAFDQWREWADSKSCCDYSLHVDISEWHKGIQEEMEALVKDHGVNSFLVYMAFKDRFQLTDCQIYEVLSVIRDIGAIAQVHAENGDIIAEEQQRILDLGITGPEGHVLSRPEEVEAEAVNRAITIANQTNCPLYITKVMSKSSAEVIAQARKKGTVVYGEPITASLGTDGSHYWSKNWAKAAAFVTSPPLSPDPTTPDFLNSLLSCGDLQVTGSAHCTFNTAQKAVGKDNFTLIPEGTNGTEERMSVIWDKAVVTGKMDENQFVAVTSTNAAKVFNLYPRKGRIAVGSDADLVIWDPDSVKTISAKTHNSSLEYNIFEGMECRGSPLVVISQGKIVLEDGTLHVTEGSGRYIPRKPFPDFVYKRIKARSRLAELRGVPRGLYDGPVCEVSVTPKTVTPASSAKTSPAKQQAPPVRNLHQSGFSLSGAQIDDNIPRRTTQRIVAPPGGRANITSLG

SEQ ID NO: 4629 - protein, 388 aa, Homo sapiens
MKWLLLLGLVALSECIMYKVPLIRKKSLRRTLSERGLLKDFLKKHNLNPARKYFPQWEAPTLVDEQPLENYLDMEYFGTIGIGTPAQDFTVVFDTGSSNLWVPSVYCSSLACTNHNRFNPEDSSTYQSTSETVSITYGTGSMTGILGYDTVQVGGISDTNQIFGLSETEPGSFLYYAPFDGILGLAYPSISSSGATPVFDNIWNQGLVSQDLFSVYLSADDKSGSVVIFGGIDSSYYTGSLNWVPVTVEGYWQITVDSITMNGETIACAEGCQAIVDTGTSLLTGPTSPIANIQSDIGASENSDGDMVVSCSAISSLPDIVFTINGVQYPVPPSAYILQSEGSCISGFQGMNVPTESGELWILGDVFIRQYFTVFDRANNQVGLAPVA

SEQ ID NO: 4630 - protein, 529 aa, Homo sapiens
MSSTVSYWILNSTRNSIATLQGGRRLYSRYVSNRNKLKWRLFSRVPPTLNSSPCGGFTLCKAYRHTSTEEDDFHLQLSPEQINEVLRAGETTHKILDLESRVPNSVLRFESNQLAANSPVEDRRGVASCLQTNGLMFGIFDGHGGHACAQAVSERLFYYVAVSLMSHQTLEHMEGAMESMKPLLPILHWLKHPGDSIYKDVTSVHLDHLRVYWQELLDLHMEMGLSIEEALMYSFQRLDSDISLEIQAPLEDEVTRNLSLQVAFSGATACMAHVDGIHLHVANAGDCRAILGVQEDNGMWSCLPLTRDHNAWNQAELSRLKREHPESEDRTIIMEDRLLGVLIPCRAFGDVQLKWSKELQRSILERGFNTEALNIYQFTPPHYYTPPYLTAEPEVTYHRLRPQDKFLVLASDGLWDMLSNEDVVRLVVGHLAEADWHKTDLAQRPANLGLMQSLLLQRKASGLHEADQNAATRLIRHAIGNNEYGEMEAERLAAMLTLPEDLARMYRDDITVTVVYFNSESIGAYYKGG

SEQ ID NO: 4631 - protein, 2035 aa, Homo sapiens
MASAVSPANLPAVLLQPRWKRVVGWSGPVPRPRHGHRAVAIKELIVVFGGGNEGIVDELHVYNTATNQWFIPAVRGDIPPGCAAYGFVCDGTRLLVFGGMVEYGKYSNDLYELQASRWEWKRLKAKTPKNGPPPCPRLGHSFSLVGNKCYLFGGLANDSEDPKNNIPRYLNDLYILELRPGSGVVAWDIPITYGVLPPPRESHTAVVYTEKDNKKSKLVIYGGMSGCRLGDLWTLDIDTLTWNKPSLSGVAPLPRSLHSATTIGNKMYVFGGWVPLVMDDVKVATHEKEWKCTNTLACLNLDTMAWETILMDTLEDNIPRARAGHCAVAINTRLYIWSGRDGYRKAWNNQVCCKDLWYLETEKPPPPARVQLVRANTNSLEVSWGAVATADSYLLQLQKYDIPATAATATSPTPNPVPSVPANPPKSPAPAAAAPAVQPLTQVGITLLPQAAPAPPTTTTIQVLPTVPGSSISVPTAARTQGVPAVLKVTGPQATTGTPLVTMRPASQAGKAPVTVTSLPAGVRMVVPTQSAQGTVIGSSPQMSGMAALAAAAAATQKIPPSSAPTVLSVPAGTTIVKTMAVTPGTTTLPATVKVASSPVMVSNPATRMLKTAAAQVGTSVSSATNTSTRPIITVHKSGTVTVAQQAQVVTTVVGGVTKTITLVKSPISVPGGSALISNLGKVMSVVQTKPVQTSAVTGQASTGPVTQIIQTKGPLPAGTILKLVTSADGKPTTIITTTQASGAGTKPTILGISSVSPSTTKPGTTTIIKTIPMSAIITQAGATGVTSSPGIKSPITIITTKVMTSGTGAPAKIITAVPKIATGHGQQGVTQVVLKGAPGQPGTILRTVPMGGVRLVTPVTVSAVKPAVTTLVVKGTTGVTTLGTVTGTVSTSLAGAGGHSTSASLATPITTLGTIATLSSQVINPTAITVSAAQTTLTAAGGLTTPTITMQPVSQPTQVTLITAPSGVEAQPVHDLPVSILASPTTEQPTATVTIADSGQGDVQPGTVTLVCSNPPCETHETGTTNTATTTVVANLGGHPQPTQVQFVCDRQEAAASLVTSTVGQQNGSVVRVCSNPPCETHETGTTNTATTATSNMAGQHGCSNPPCETHETGTTNTATTAMSSVGANHQRDARRACAAGTPAVIRISVATGALEAAQGSKSQCQTRQTSATSTTMTVMATGAPCSAGPLLGPSMAREPGGRSPAFVQLAPLSSKVRLSSPSIKDLPAGRHSHAVSTAAMTRSSVGAGEPRMAPVCESLQGGSPSTTVTVTALEALLCPSATVTQVCSNPPCETHETGTTNTATTSNAGSAQRVCSNPPCETHETGTTHTATTATSNGGTGQPEGGQQPPAGRPCETHQTTSTGTTMSVSVGALLPDATSSHRTVESGLEVAAAPSVTPQAGTALLAPFPTQRVCSNPPCETHETGTTHTATTVTSNMSSNQDPPPAASDQGEVESTQGDSVNITSSSAITTTVSSTLTRAVTTVTQSTPVPGPSVPPPEELQVSPGPRQQLPPRQLLQSASTALMGESAEVLSASQTPELPAAVDLSSTGEPSSGQESAGSAVVATVVVQPPPPTQSEVDQLSLPQELMAEAQAGTTTLMVTGLTPEELAVTAAAEAAAQAAATEEAQALAIQAVLQAAQQAVMGTGEPMDTSEAAATVTQAELGHLSAEGQEGQATTIPIVLTQQELAALVQQQQLQEAQAQQQHHHLPTEALAPADSLNDPAIESNCLNELAGTVPSTVALLPSTATESLAPSNTFVAPQPVVVASPAKLQAAATLTEVANGIESLGVKPDLPPPPSKAPMKKENQWFDVGVIKGTNVMVTHYFLPPDDAVPSDDDLGTVPDYNQLKKQELQPGTAYKFRVAGINACGRGPFSEISAFKTCLPGFPGAPCAIKISKSPDGAHLTWEPPSVTSGKIIEYSVYLAIQSSQAGGELKSSTPAQLAFMRVYCGPSPSCLVQSSSLSNAHIDYTTKPAIIFRIAARNEKGYGPATQVRWLQETSKDSSGTKPANKRPMSSPEMKSAPKKSKADGQ

SEQ ID NO: 4632 - protein, 118 aa, Homo sapiens
MVARVWSLMRFLIKGSVAGGAVYLVYDQELLGPSDKSQAALQKAGEVVPPAMYQFSQYVCQQTGLQIPQLPAPPKIYFPIRDSWNAGIMTVMSALSVAPSKAREYSKEGWEYVKARTK

SEQ ID NO: 4633 - protein, 91 aa, Homo sapiens
MGLEDEQKMLTESGDPEEEEEEEEELVDPLTTVREQCEQLEKCVKARERLELCDERVSSRSHTEEDCTEELFDFLHARDHCVAHKLFNNLK

SEQ ID NO: 4634 - protein, 302 aa, Homo sapiens
MDVLASYSIFQELQLVHDTGYFSALPSLEETWQQTCLELERYLQTEPRRISETFGEDLDCFLHASPPPCIEESFRRLDPLLLPVEAAICEKSSAVDILLSRDKLLSETCLSLQPASSSLDSYTAVNQAQLNAVTSLTPPSSPELSRHLVKTSQTLSAVDGTVTLKLVAKKAALSSVKVGGVATAAAAVTAAGAVKSGQSDSDQGGLGAEACPENKKRVHRCQFNGCRKVYTKSSHLKAHQRTHTGEKPYKCSWEGCEWRFARSDELTRHYRKHTGAKPFKCNHCDRCFSRSDHLALHMKRHI

SEQ ID NO: 4635 - protein, 351 aa, Homo sapiens
MGNAAAAKKGSEQESVKEFLAKAKEDFLKKWESPAQNTAHLDQFERIKTLGTGSFGRVMLVKHKETGNHYAMKILDKQKVVKLKQIEHTLNEKRILQAVNFPFLVKLEFSFKDNSNLYMVMEYVPGGEMFSHLRRIGRFSEPHARFYAAQIVLTFEYLHSLDLIYRDLKPENLLIDQQGYIQVTDFGFAKRVKGRTWTLCGTPEYLAPEIILSKGYNKAVDWWALGVLIYEMAAGYPPFFADQPIQIYEKIVSGKVRFPSHFSSDLKDLLRNLLQVDLTKRFGNLKNGVNDIKNHKWFATTDWIAIYQRKVEAPFIPKFKGPGDTSNFDDYEEEEIRVSINEKCGKEFSEF

SEQ ID NO: 4636 - protein, 684 aa, Homo sapiens
MWVLLRSGYPLRILLPLRGEWMGRRGLPRNLAPGPPRRRYRKETLQALDMPVLPVTATEIRQYLRGHGIPFQDGHSCLRALSPFAESSQLKGQTGVTTSFSLFIDKTTGHFLCMTSLAEGSWEDFQASVEGRGDGAREGFLLSKAPEFEDSEEVRRIWNRAIPLWELPDQEEVQLADTMFGLTKVTDDTLKRFSVRYLRPARSLVFPWFSPGGSGLRGLKLLEAKCQGDGVSYEETTIPRPSAYHNLFGLPLISRRDAEVVLTSRELDSLALNQSTGLPTLTLPRGTTCLPPALLPYLEQFRRIVFWLGDDLRSWEAAKLFARKLNPKRCFLVRPGDQQPRPLEALNGGFNLSRILRTALPAWHKSIVSFRQLREEVLGELSNVEQAAGLRWSRFPDLNRILKGHRKGELTVFTGPTGSGKTTFISEYALDLCSQGVNTLWGSFEISNVRLARVMLTQFAEGRLEDQLDKYDHWADRFEDLPLYFMTFHGQQSIRTVIDTMQHAVYVYDICHVIIDNLQFMMGHEQLSTDRIAAQDYIIGVFRKFATDNNCHVTLVIHPRKEDDDKELQTASIFGSAKASQEADNVLILQDRKLVTGPGKRYLQVSKNRFDGDVGVFPLEFNKNSLTFSIPPKNKARLKKIKDDTGPVAKKPSSGKKGATTQNSEICSGQAPTPDQPDTSKRSK

SEQ ID NO: 4637 - protein, 847 aa, Homo sapiens
MEPLKSLFLKSPLGSWNGSGSGGGGGGGGGRPEGSPKAAGYANPVWTALFDYEPSGQDELALRKGDRVEVLSRDAAISGDEGWWAGQVGGQVGIFPSNYVSRGGGPPPCEVASFQELRLEEVIGIGGFGKVYRGSWRGELVAVKAARQDPDEDISVTAESVRQEARLFAMLAHPNIIALKAVCLEEPNLCLVMEYAAGGPLSRALAGRRVPPHVLVNWAVQIARGMHYLHCEALVPVIHRDLKSNNILLLQPIESDDMEHKTLKITDFGLAREWHKTTQMSAAGTYAWMAPEVIKASTFSKGSDVWSFGVLLWELLTGEVPYRGIDCLAVAYGVAVNKLTLPIPSTCPEPFAQLMADCWAQDPHRRPDFASILQQLEALEAQVLREMPRDSFHSMQEGWKREIQGLFDELRAKEKELLSREEELTRAAREQRSQAEQLRRREHLLAQWELEVFERELTLLLQQVDRERPHVRRRRGTFKRSKLRARDGGERISMPLDFKHRITVQASPGLDRRRNVFEVGPGDSPTFPRFRAIQLEPAEPGQAWGRQSPRRLEDSSNGERRACWAWGPSSPKPGEAQNGRRRSRMDEATWYLDSDDSSPLGSPSTPPALNGNPPRPSLEPEEPKRPVPAERGSSSGTPKLIQRALLRGTALLASLGLGRDLQPPGGPGRERGESPTTPPTPTPAPCPTEPPPSPLICFSLKTPDSPPTPAPLLLDLGIPVGQRSAKSPRREEEPRGGTVSPPPGTSRSAPGTPGTPRSPPLGLISRPRPSPLRSRIDPWSFVSAGPRPSPLPSPQPAPRRAPWTLFPDSDPFWDSPPANPFQGGPQDCRAQTKDMGAQAPWVPEAGP

SEQ ID NO: 4638 - protein, 166 aa, Homo sapiens
MASGVAVSDGVIKVFNDMKVRKSSTPEEVKKRKKAVLFCLSEDKKNIILEEGKEILVGDVGQTVDDPYATFVKMLPDKDCRYALYDATYETKESKKEDLVFIFWAPESAPLKSKMIYASSKDAIKKKLTGIKHELQANCYEEVKDRCTLAEKLGGSAVISLEGKPL

SEQ ID NO: 4639 - protein, 185 aa, Homo sapiens
MADGGGGGGTGAVGGGGTSQASAGAATGATGASGGGGPINPASLPPGDPQLIALIVEQLKSRGLFDSFRRDCLADVDTKPAYQNLRQKVDNFVSTHLDKQEWNPTMNKNQLRNGLRQSVVQSGMLEAGVDRIISQVVDPKLNHIFRPQIERAIHEFLAAQKKAAVPAPPPEPEGQDPPAPSQDTS

SEQ ID NO: 4640 - protein, 620 aa, Homo sapiens
MAEARTSLSAHCRGPLATGLHPDLDLPGRSLATPAPSCYLLGSEPSSGLGLQPETHLPEGSLKRCCVLGLPPTSPASSSPCASSDVTSIIRSSQTSLVTCVNGLRSPPLTGDLGGPSKRARPGPASTDSHEGSLQLEACRKASFLKQEPADEFSELFGPHQQGLPPPYPLSQLPPGPSLGGLGLGLAGRVVAGRQACRWVDCCAAYEQQEELVRHIEKSHIDQRKGEDFTCFWAGCVRRYKPFNARYKLLIHMRVHSGEKPNKCMFEGCSKAFSRLENLKIHLRSHTGEKPYLCQHPGCQKAFSNSSDRAKHQRTHLDTKPYACQIPGCSKRYTDPSSLRKHVKAHSAKEQQVRKKLHAGPDTEADVLTECLVLQQLHTSTQLAASDGKGGCGLGQELLPGVYPGSITPHNGLASGLLPPAHDVPSRHHPLDATTSSHHHLSPLPMAESTRDGLGPGLLSPIVSPLKGLGPPPLPPSSQSHSPGGQPFPTLPSKPSYPPFQSPPPPPLPSPQGYQGSFHSIQSCFPYGDCYRMAEPAAGGDGLVGETHGFNPLRPNGYHSLSTPLPATGYEALAEASCPTALPQQPSEDVVSSGPEDCGFFPNGAFDHCLGHIPSIYTDT

SEQ ID NO: 4641 - protein, 280 aa, Homo sapiens
MNDRSSRRRTMKDDETFEISIPFDEAPHLDPQIFYSLSPSRRNFEEPPEAASSALALMNSVKTQLHMALERNSWLQKRIEDLEEERDFLRCQLDKFISSARMEAEDHCRMKPGPRRMEGDSRGGAGGEASDPESAASSLSGASEEGSASERRRQKQKGGASRRRFGKPKARERQRVKDADGVLCRYKKILGTFQKLKSMSRAFEHHRVDRNTVALTTPIAELLIVAPEKLAEVGEFDPSKERLLEYSRRCFLALDDETLKKVQALKKSKLLLPITYRFKR

SEQ ID NO: 4642 - protein, 683 aa, Homo sapiens
MAAAVAAPLAAGGEEAAATTSVPGSPGLPGRRSAERALEEAVATGTLNLSNRRLKHFPRGAARSYDLSDITQADLSRNRFPEVPEAACQLVSLEGLSLYHNCLRCLNPALGNLTALTYLNLSRNQLSLLPPYICQLPLRVLIVSNNKLGALPPDIGTLGSLRQLDVSSNELQSLPSELCGLSSLRDLNVRRNQLSTLPEELGDLPLVRLDFSCNRVSRIPVSFCRLRHLQVILLDSNPLQSPPAQVCLKGKLHIFKYLSTEAGQRGSALGDLAPSRPPSFSPCPAEDLFPGHRYDGGLDSGFHSVDSGSKRWSGNESTDEFSELSFRISELAREPRGPRERKEDGSADGDPVQIDFIDSHVPGEDEERGTVEEQRPPELSPGAGDRERAPSSRREEPAGEERRRPDTLQLWQERERRQQQQSGAWGAPRKDSLLKPGLRAVVGGAAAVSTQAMHNGSPKSSASQAGAAAGQGAPAPAPASQEPLPIAGPATAPAPRPLGSIQRPNSFLFRSSSQSGSGPSSPDSVLRPRRYPQVPDEKDLMTQLRQVLESRLQRPLPEDLAEALASGVILCQLANQLRPRSVPFIHVPSPAVPKLSALKARKNVESFLEACRKMGVPEADLCSPSDLLQGTARGLRTALEAVKRVGGKALPPLWPPSGLGGFVVFYVVLMLLLYVTYTRLLGS

SEQ ID NO: 4643 - protein, 324 aa, Homo sapiens
MGPWGEPELLVWRPEAVASEPPVPVGLEVKLGALVLLLVLTLLCSLVPICVLRRPGANHEGSASRQKALSLVSCFAGGVFLATCLLDLLPDYLAAIDEALAALHVTLQFPLQEFILAMGFFLVLVMEQITLAYKEQSGPSPLEETRALLGTVNGGPQHWHDGPGVPQASGAPATPSALRACVLVFSLALHSVFEGLAVGLQRDRARAMELCLALLLHKGILAVSLSLRLLQSHLRAQVVAGCGILFSCMTPLGIGLGAALAESAGPLHQLAQSVLEGMAAGTFLYITFLEILPQELASSEQRILKVILLLAGFALLTGLLFIQI

SEQ ID NO: 4644 - protein, 911 aa, Homo sapiens
MPPRRSIVEVKVLDVQKRRVPNKHYVYIIRVTWSSGSTEAIYRRYSKFFDLQMQMLDKFPMEGGQKDPKQRIIPFLPGKILFRRSHIRDVAVKRLIPIDEYCKALIQLPPYISQCDEVLQFFETRPEDLNPPKEEHIGKKKSGGDQTSVDPMVLEQYVVVANYQKQESSEISLSVGQVVDIIEKNESGWWFVSTAEEQGWVPATCLEGQDGVQDEFSLQPEEEEKYTVIYPYTARDQDEMNLERGAVVEVIQKNLEGWWKIRYQGKEGWAPASYLKKNSGEPLPPKPGPGSPSHPGALDLDGVSRQQNAVGREKELLSSQRDGRFEGRPVPDGDAKQRSPKMRQRPPPRRDMTIPRGLNLPKPPIPPQVEEEYYTIAEFQTTIPDGISFQAGLKVEVIEKNLSGWWYIQIEDKEGWAPATFIDKYKKTSNASRPNFLAPLPHEVTQLRLGEAAALENNTGSEATGPSRPLPDAPHGVMDSGLPWSKDWKGSKDVLRKASSDMSASAGYEEISDPDMEEKPSLPPRKESIIKSEGELLERERERQRTEQLRGPTPKPPGVILPMMPAKHIPPARDSRRPEPKPDKSRLFQLKNDMGLECGHKVLAKEVKKPNLRPISKSKTDLPEEKPDATPQNPFLKSRPQVRPKPAPSPKTEPPQGEDQVDICNLRSKLRPAKSQDKSLLDGEGPQAVGGQDVAFSRSFLPGEGPGRAQDRTGKQDGLSPKEISCRAPPRPAKTTDPVSKSVPVPLQEAPQQRPVVPPRRPPPPKKTSSSSRPLPEVRGPQCEGHESRAAPTPGRALLVPPKAKPFLSNSLGGQDDTRGKGSLGPWGTGKIGENREKAAAASVPNADGLKDSLYVAVADFEGDKDTSSFQEGTVFEVREKNSSGWWFCQVLSGAPSWEGWIPSNYLRKKP

SEQ ID NO: 4645 - protein, 340 aa, Homo sapiens
MDKFWWHAAWGLCLVPLSLAQIDLNITCRFAGVFHVEKNGRYSISRTEAADLCKAFNSTLPTMAQMEKALSIGFETCRYGFIEGHVVIPRIHPNSICAANNTGVYILTSNTSQYDTYCFNASAPPEEDCTSVTDLPNAFDGPITITIVNRDGTRYVQKGEYRTNPEDIYPSNPTDDDVSSGSSSERSSTSGGYIFYTFSTVHPIPDEDSPWITDSTDRIPATRHSHGSQEGGANTTSGPIRTPQIPEWLIILASLLALALILAVCIAVNSRRRCGQKKKLVINSGNGAVEDRKPSGLNGEASKSQEMVHLVNKESSETPDQFMTADETRNLQNVDMKIGV

SEQ ID NO: 4646 - protein, 2615 aa, Homo sapiens
MKILLIIFVLIIWTETLADQSPGPGPVYADVVFLVDSSDHLGPKSFPFVKTFINKMINSLPIEANKYRVALAQYSDEFHSEFHLSTFKGRSPMLNHLKKNFQFIGGSLQIGKALQEAHRTYFSAPINGRDRKQFPPILVVLASAESEDEVEEASKALQKDGVKIISVGVQKASEENLKAMATSHFHFNLRTIRDLSTFSQNMTQIIKDVTKYKEGAVDADMQVHFPISCQKDSLADLVFLVDESLGTGGNLRHLQTFLENITSSMDVKENCMRLGLMSYSNSAKTISFLKSSTTQSEFQQQIKNLSIQVGKSNTGAAIDQMRRDGFSESYGSRRAQGVPQIAVLVTHRPSDDEVHDAALNLRLEDVNVFALSIQGANNTQLEEIVSYPPEQTISTLKSYADLETYSTKFLKKLQNEIWSQISTYAEQRNLDKTGCVDTKEADIHFLIDGSSSIQEKQFEQIKRFMLEVTEMFSIGPDKVRVGVVQYSDDTEVEFYITDYSNDIDLRKAIFNIKQLTGGTYTGKALDYILQIIKNGMKDRMSKVPCYLIVLTDGMSTDRVVEPAKRLRAEQITVHAVGIGAANKIELQEIAGKEERVSFGQNFDALKSIKNEVVREICAEKGCEDMKADIMFLVDSSWSIGNENFRKMKIFMKNLLTKIQIGADKTQIGVVQFSDKTKEEFQLNRYFTQQEISDAIDRMSLINEGTLTGKALNFVGQYFTHSKGARLGAKKFLILITDGVAQDDVRDPARILRGKDVTIFSVGVYNANRSQLEEISGDSSLVFHVENFDHLKALERKLIFRVCALHDCKRITLLDVVFVLDHSGSIKKQYQDHMINLTIHLVKKADVGRDRVQFGALKYSDQPNILFYLNTYSNRSAIIENLRKRRDTGGNTYTAKALKHANALFTEEHGSRIKQNVKQMLIVITDGESHDHDQLNDTALELRNKGITIFAVGVGKANQKELEGMAGNKNNTIYVDNFDKLKDVFTLVQERMCTEAPEVCHLQEADVIFLCDGSDRVSNSDFVTMTTFLSDLIDNFDIQSQRMKIGMAQFGSNYQSIIELKNSLTKTQWKTQIQNVSKSGGFPRIDFALKKVSNMFNLHAGGRRNAGVPQTLVVITSGDPRYDVADAVKTLKDLGICVLVLGIGDVYKEHLLPITGNSEKIITFQDFDKLKNVDVKKRIIREICQSCGKTNCFMDIVVGFDISTHVQGQPLFQGHPQLESYLPGILEDISSIKGVSCGAGTEAQVSLAFKVNSDQGFPAKFQIYQKAVFDSLLQVNVSGPTHLNAQFLRSLWDTFKDKSASRGQVLLIFSDGLQSESNIMLENQSDRLREAGLDALLVVSLNTTAHHEFSSFEFGKRFDYRTHLTIGMRELGKKLSQYLGNIAERTCCCTFCKCPGIPGPHGTRGLQAMKGSQGLKGSRGHRGEDGNPGVRGDTGPQGDKGIAGCPGAWGQKGLKGFSGPKGGHGDDGIDGLDGEEGCHGFPGIKGEKGDPGSQGSPGSRGAPGQYGEKGFPGDPGNPGQNNNIKGQKGSKGEQGRQGRSGQKGVQGSPSSRGSRGREGQRGLRGVSGEPGNPGPTGTLGAEGLQGPQGSQGNPGRKGEKGSQGQKGPQGSPGLMGAKGSTGRPGLLGKKGEPGLPGDLGPVGQTGQRGRQGDSGIPGYGQMGRKGVKGPRGFPGDAGQKGDIGNPGIPGGPGPKGFRGLALTVGLKGEEGSRGLPGPPGQRGIKGMAGQPVYSQCDLIRFLREHSPCWKEKCPAYPTELVFALDNSYDVTEESFNKTRDIITSIVNDLNIRENNCPVGARVAMVSYNSGTSYLIRWSDYNRKKQLLQQLSQIKYQDTTEPRDVGNAMRFVTRNVFKRTYAGANVRRVAVFFSNGQTASRSSIITATMEFSALDISPTVFAFDERVFLEAFGFDNTGTFQVIPVPPNGENQTLERLRRCALCYDKCFPNACIREAFLPEDSYMDVVFLIDNSRNIAKDEFKAVKALVSSVIDNFNIASDPLISDSGDRIALLSYSPWESSRRKMGTVKTEFDFITYDNQLLMKNHIQTSFQQLNGEATIGRALLWTTENLFPETPYLRKHKVIFVVSAGENYERKEFVKMMALRAKCQGYVIFVISLGSTRKDDMEELASYPLDQHLIQLGRIHKPDLNYIAKFLKPFLYSVRRGFNQYPPPMLEDACRLINLGGENIQNDGFQFVTELQEDFLGGNGFIGQELNSGRESPFVKTEDNGSDYLVYLPSQMFEPQKLMINYEKDQKSAEIASLTSGHENYGRKEEPDHTYEPGDVSLQEYYMDVAFLIDASQRVGSDEFKEVKAFITSVLDYFHIAPTPLTSTLGDRVAVLSYSPPGYMPNTEECPVYLEFDLVTYNSIHQMKHHLQDSQQLNGDVFIGHALQWTIDNVFVGTPNLRKNKVIFVISAGETNSLDKDVLRNVSLRAKCQGYSIFVFSFGPKHNDKELEELASHPLDHHLVQLGRTHKPDWNYIIKFVKPFVHLIRRAINKYPTEDMKATCVNMTSPNPENGGTENTVLLLPGIYEIKTENGDLFDEFDSQAQHLLVLGNNHSSGSETATDLMQKLYLLFSTEKLAMKDKEKAHLEEISALVVDKQQEKEDKEMEATDI

SEQ ID NO: 4647 - protein, 1132 aa, Homo sapiens
MIATPLKHSRIYLPPEASSQRRNLPMDAIFFDSIPSGTLTPVKDLVKYQNSSLKLNDHKKNQFLKMTTFNNKNIFQSTMLTEATTSNSSLDISAIKPNKDGLKNKANYESPGKIFLRMKEKVLRDKQEQPSRNSSLLEPQKSGNNETFTPNRVEKKKLQHTYLCEEKENNKSFQSDDSSLRASVQGVPLESSNNDIFLPVKQKIQCQQEKKAPLHNLTYELPTLNQEQENFLAVEARNKTLTRAQLAKQIFHSKESIVATTKSKKDTFVLESVDSADEQFQNTNAETLSTNCIPIKNGSLLMVSDSERTTEGTSQQKVKEGNGKTVPGETGLPGSMKDTCKIVLATPRLHITIPRRSKRNISKLSPPRIFQTVTNGLKKNQVVQLQEWMIKSINNNTAICVEGKLIDVTNIYWHSNVIIERIEHNKLRTISGNVYILKGMIDQISMKEAGYPNYLIRKFMFGFPENWKEHIDNFLEQLRAGEKNREKTKQKQKTGRSVRDIRKSMKNDARENQTDTAQRATTTYDFDCDNLELKSNKHSESPGATELNMCHSNCQNKPTLRFPDDQVNNTIQNGGGDDLSNQELIGKKEYKMSSKKLKIGERTNERIIKSQKQETTEELDVSIDILTSREQFFSDEERKYMAINQKKAYILVTPLKSRKVIEQRCMRYNLSAGTIKAVTDFVIPECQKKSPISKSMGTLENTFEGHKSKNKEDCDERDLLTVNRKIKISNLEKEQMLTSDFKKNTRLLPKLKKIENQVAMSFYKHQSSPDLSSEESETEKEIKRKAEVKKTKAGNTKEAVVHLRKSTRNTSNIPVILEPETEESENEFYIKQKKARPSVKETLQKSGVRKEFPITEAVGSDKTNRHPLECLPGLIQDKEWNEKELQKLHCAFASLPKHKPGFWSEVAAAVGSRSPEECQRKYMENPRGKGSQKHVTKKKPANSKGQNGKRGDADQKQTIKITAKVGTLKRKQQMREFLEQLPKDDHDDFFSTTPLQHQRILLPSFQDSEDDDDILPNMDKNPTTPSSVIFPLVKTPQCQHVSPGMLGSINRNDCDKYVFRMQKYHKSNGGIVWGNIKKKLVETDFSTPTPRRKTPFNTDLGENSGIGKLFTNAVESLDEEEKDYYFSNSDSA

SEQ ID NO: 4648 - protein, 140 aa, Homo sapiens
MAASLGQVLALVLVAALWGGTQPLLKRASAGLQRVHEPTWAQQLLQEMKTLFLNTEYLMPFLLNQCGSLLYYLTLASTDLTLAVPICNSLAIIFTLIVGKALGEDIGGKRAVAGMVLTVIGISLCITSSVSKTQGQQSTL

SEQ ID NO: 4649 - protein, 70 aa, Homo sapiens [sequence omitted]

SEQ ID NO: 4650 - protein, 360 aa, Homo sapiens
MEELSQALASSFSVSQDLNSTAAPHPRLSQYKSKYSSLEQSERRRRLLELQKSKRLDYVNHARRLAEDDWTGMESEEENKKDDEEMDIDTVKKLPKHYANQLMLSEWLIDVPSDLGQEWIVVVCPVGKRALIVASRGSTSAYTKSGYCVNRFSSLLPGGNRRNSTAKDYTILDCIYNEVNQTYYVLDVMCWRGHPFYDCQTDFRFYWMHSKLPEEEGLGEKTKLNPFKFVGLKNFPCTPESLCDVLSMDFPFEVDGLLFYHKQTHYSPGSTPLVGWLRPYMVSDVLGVAVPAGPLTTKPDYAGHQLQQIMEHKKSQKEGMKEKLTHKASENGHYELEHLSTPKLKGSSHSPDHPGCLMEN

SEQ ID NO: 4651 - protein, 189 aa, Homo sapiens
MTEYKLVVVGAGGVGKSALTIQLIQNHFVDEYDPTIEDSYRKQVVIDGETCLLDILDTAGQEEYSAMRDQYMRTGEGFLCVFAINNTKSFEDIHQYREQIKRVKDSDDVPMVLVGNKCDLAARTVESRQAQDLARSYGIPYIETSAKTRQGVEDAFYTLVREIRQHKLRKLNPPDESGPGCMSCKCVLS

SEQ ID NO: 4652 - protein, 445 aa, Homo sapiens
MVLEGNPEVGSPRTSDLQHRGNKGSCVLSSPGEDAQPGEEPIKYGELIVLGYNGCLASGDKGRRRSRLALSRRSHANGVKPDVMHHISTPLVSKALSNRGQHSISYTLSRSHSVIVEYTHDSDTDMFQIGRSTENMIDFVVTDTSPGGGAAEGPSAQSTISRYACRILCDRRPPYTARIYAAGFDASSNIFLGERAAKWRTPDGLMDGLTTNGVLVMHPAGGFSEDSAPGVWREISVCGNVYTLRDSRSAQQRGKLVENESNVLQDGSLIDLCGATLLWRTPAGLLRAPTLKQLEAQRQEANAARPQCPVGLSTLAFPSPARGRTAPDKQQPWVYVRCGHVHGYHGWGCRRERGPQERECPLCRLVGPYVPLWLGQEAGLCLDPGPPSHAFAPCGHVCSEKTARYWAQTPLPHGTHAFHAACPFCGAWLTGEHGCVRLIFQGPLD

SEQ ID NO: 4653 - protein, 632 aa, Homo sapiens
MDTMMLNVRNLFEQLVRRVEILSEGNEVQFIQLAKDFEDFRKKWQRTDHELGKYKDLLMKAETERSALDVKLKHARNQVDVEIKRRQRAEADCEKLERQIQLIREMLMCDTSGSIQLSEEQKSALAFLNRGQPSSSNAGNKRLSTIDESGSILSDISFDKTDESLDWDSSLVKTFKLKKREKRRSTSRQFVDGPPGPVKKTRSIGSAVDQGNESIVAKTTVTVPNDGGPIEAVSTIETVPYWTRSRRKTGTLQPWNSDSTLNSRQLEPRTETDSVGTPQSNGGMRLHDFVSKTVIKPESCVPCGKRIKFGKLSLKCRDCRVVSHPECRDRCPLPCIPTLIGTPVKIGEGMLADFVSQTSPMIPSIVVHCVNEIEQRGLTETGLYRISGCDRTVKELKEKFLRVKTVPLLSKVDDIHAICSLLKDFLRNLKEPLLTFRLNRAFMEAAEITDEDNSIAAMYQAVGELPQANRDTLAFLMIHLQRVAQSPHTKMDVANLAKVFGPTIVAHAVPNPDPVTMLQDIKRQPKVVERLLSLPLEYWSQFMMVEQENIDPLHVIENSNAFSTPQTPDIKVSLLGPVTTPEHQLLKTPSSSSLSQRVRSTLTKNTPRFGSKSKSATNLGRQGNFFASPMLK

SEQ ID NO: 4654 - protein, 821 aa, Homo sapiens
MVSWGRFICLVVVTMATLSLARPSFSLVEDTTLEPEEPPTKYQISQPEVYVAAPGESLEVRCLLKDAAVISWTKDGVHLGPNNRTVLIGEYLQIKGATPRDSGLYACTASRTVDSETWYFMVNVTDAISSGDDEDDTDGAEDFVSENSNNKRAPYWTNTEKMEKRLHAVPAANTVKFRCPAGGNPMPTMRWLKNGKEFKQEHRIGGYKVRNQHWSLIMESVVPSDKGNYTCVVENEYGSINHTYHLDVVERSPHRPILQAGLPANASTVVGGDVEFVCKVYSDAQPHIQWIKHVEKNGSKYGPDGLPYLKVLKVFAAGVNTTDKEIEVLYIRNVTFEDAGEYTCLAGNSIGISFHSAWLTVLPAPGREKEITASPDYLEIAIYCIGVFLIACMVVTVILCRMKNTTKKPDFSSQPAVHKLTKRIPLRRQVSAESSSSMNSNTPLVRITTRLSSTADTPMLAGVSEYELPEDPKWEFPRDKLTLGKPLGEGCFGQVVMAEAVGIDKDKPKEAVTVAVKMLKDDATEKDLSDLVSEMEMMKMIGKHKNIINLLGACTQDGPLYVIVEYASKGNLREYLRARRPPGMEYSYDINRVPEEQMTFKDLVSCTYQLARGMEYLASQKCIHRDLAARNVLVTENNVMKIADFGLARDINNIDYYKKTTNGRLPVKWMAPEALFDRVYTHQSDVWSFGVLMWEIFTLGGSPYPGIPVEELFKLLKEGHRMDKPANCTNELYMMMRDCWHAVPSQRPTFKQLVEDLDRILTLTTNEEYLDLSQPLEQYSPSYPDTRSSCSSGDDSVFSPDPMPYEPCLPQYPHINGSVKT

SEQ ID NO: 4655 - protein, 668 aa, Homo sapiens
MGNGMCSRKQKRIFQTLLLLTVVFGFLYGAMLYYELQTQLRKAEAVALKYQQHQESLSAQLQVVYEHRSRLEKSLQKERLEHKKAKEDFLVYKLEAQETLNKGRQDSNSRYSALNVQHQMLKSQHEELKKQHSDLEEEHRKQGEDFSRTFNDHKQKYLQLQQEKEQELSKLKETVYNLREENRQLRKAHQDIHTQLQDVKTQVAEYKQLKDTLNRIPSLRKPDPAEQQNVTQVAHSPQGYNTAREKPTREVQEVSRNNDVWQNHEAVPGRAEDTKLYAPTHKEAEFQAPPEPIQQEVERREPEEHQVEEEHRKALEEEEMEQVGQAEHLEEEHDPSPEEQDREWKEQHEQREAANLLEGHARAEVYPSAKPMIKFQSPYEEQLEQQRLAVQQVEEAQQLREHQEALHQQRLQGHLLRQQEQQQQQVAREMALQRQAELEEGRPQHQEQLRQQAHYDAMDNDIVQGAEDQGIQGEEGAYERDNQHQDEAEGDPGNRHEPREQGPREADPESEADRAAVEDINPADDPNNQGEDEFEEAEQVREENLPDENEEQKQSNQKQENTEVEEHLVMAGNPDQQEDNVDEQYQEEAEEEVQEDLTEEKKRELEHNAEETYGENDENTDDKNNDGEEQEVRDDNRPKGREEHYEEEEEEEEDGAAVAEKSHRRAEM

SEQ ID NO: 4656 - protein, 518 aa, Homo sapiens
MADADEGFGLAHTPLEPDAKDLPCDSKPESALGAPSKSPSSPQAAFTQQGMEGIKVFLHERELWLKFHEVGTEMIITKAGRRMFPSYKVKVTGLNPKTKYILLMDIVPADDHRYKFADNKWSVTGKAEPAMPGRLYVHPDSPATGAHWMRQLVSFQKLKLTNNHLDPFGHIILNSMHKYQPRLHIVKADENNGFGSKNTAFCTHVFPETAFIAVTSYQNHKITQLKIENNPFAKGFRGSDDMELHRMSRMQSKEYPVVPRSTVRQKVASNHSPFSSESRALSTSSNLGSQYQCENGVSGPSQDLLPPPNPYPLPQEHSQIYHCTKRKEEECSTTDHPYKKPYMETSPSEEDSFYRSSYPQQQGLGASYRTESAQRQACMYASSAPPSEPVPSLEDISCNTWPSMPSYSSCTVTTVQPMDRLPYQHFSAHFTSGPLVPRLAGMANHGSPQLGEGMFQHQTSVAHQPVVRQCGPQTGLQSPGTLQPPEFLYSHGVPRTLSPHQYHSVHGVGMVPEWSDNS

SEQ ID NO: 4657 - protein, 528 aa, Homo sapiens
MAGSDTAPFLSQADDPDDGPVPGTPGLPGSTGNPKSEEPEVPDQEGLQRITGLSPGRSALIVAVLCYINLLNYMDRFTVAGVLPDIEQFFNIGDSSSGLIQTVFISSYMVLAPVFGYLGDRYNRKYLMCGGIAFWSLVTLGSSFIPGEHFWLLLLTRGLVGVGEASYSTIAPTLIADLFVADQRSRMLSIFYFAIPVGSGLGYIAGSKVKDMAGDWHWALRVTPGLGVVAVLLLFLVVREPPRGAVERHSDLPPLNPTSWWADLRALARNPSFVLSSLGFTAVAFVTGSLALWAPAFLLRSRVVLGETPPCLPGDSCSSSDSLIFGLITCLTGVLGVGLGVEISRRLRHSNPRADPLVCATGLLGSAPFLFLSLACARGSIVATYIFIFIGETLLSMNWAIVADILLYVVIPTRRSTAEAFQIVLSHLLGDAGSPYLIGLISDRLRRNWPPSFLSEFRALQFSLMLCAFVGALGGAAFLGTAIFIEADRRRAQLHVQGLLHEAGSTDDRIVVPQRGRSTRVPVASVLI

SEQ ID NO: 4658 - protein, 443 aa, Homo sapiens
MLPCASCLPGSLLLWALLLLLLGSASPQDSEEPDSYTECTDGYEWDPDSQHCRDVNECLTIPEACKGEMKCINHYGGYLCLPRSAAVINDLHGEGPPPPVPPAQHPNPCPPGYEPDDQDSCVDVDECAQALHDCRPSQDCHNLPGSYQCTCPDGYRKIGPECVDIDECRYRYCQHRCVNLPGSFRCQCEPGFQLGPNNRSCVDVNECDMGAPCEQRCFNSYGTFLCRCHQGYELHRDGFSCSDIDECSYSSYLCQYRCINEPGRFSCHCPQGYQLLATRLCQDIDECESGAHQCSEAQTCVNFHGGYRCVDTNRCVEPYIQVSENRCLCPASNPLCREQPSSIVHRYMTITSERSVPADVFQIQATSVYPGAYNAFQIRAGNSQGDFYIRQINNVSAMLVLARPVTGPREYVLDLEMVTMNSLMSYRASSVLRLTVFVGAYTF

SEQ ID NO: 4659 - protein, 824 aa, Homo sapiens
MRQSLLFLTSVVPFVLAPRPPDDPGFGPHQRLEKLDSLLSDYDILSLSNIQQHSVRKRDLQTSTHVETLLTFSALKRHFKLYLTSSTERFSQNFKVVVVDGKNESEYTVKWQDFFTGHVVGEPDSRVLAHIRDDDVIIRINTDGAEYNIEPLWRFVNDTKDKRMLVYKSEDIKNVSRLQSPKVCGYLKVDNEELLPKGLVDREPPEELVHRVKRRADPDPMKNTCKLLVVADHRFYRYMGRGEESTTTNYLIELIDRVDDIYRNTSWDNAGFKGYGIQIEQIRILKSPQEVKPGEKHYNMAKSYPNEEKDAWDVKMLLEQFSFDIAEEASKVCLAHLFTYQDFDMGTLGLAYVGSPRANSHGGVCPKAYYSPVGKKNIYLNSGLTSTKNYGKTILTKEADLVTTHELGHNFGAEHDPDGLAECAPNEDQGGKYVMYPIAVSGDHENNKMFSNCSKQSIYKTIESKAQECFQERSNKVCGNSRVDEGEECDPGIMYLNNDTCCNSDCTLKEGVQCSDRNSPCCKNCQFETAQKKCQEAINATCKGVSYCTGNSSECPPPGNAEDDTVCLDLGKCKDGKCIPFCEREQQLESCACNETDNSCKVCCRDLSGRCVPYVDAEQKNLFLRKGKPCTVGFCDMNGKCEKRVQDVIERFWDFIDQLSINTFGKFLADNIVGSVLVFSLIFWIPFSILVHCVDKKLDKQYESLSLFHPSNVEMLSSMDSASVRIIKPFPAPQTPGRLQPAPVIPSAPAAPKLDHQRMDTIQEDPSTDSHMDEDGFEKDPFPNSSTAAKSFEDLTDHPVTRSEKAASFKLQRQNRVDSKETEC

SEQ ID NO: 4660 - protein, 229 aa, Homo sapiens
MPAAGPPLLLLGTPGSGKTALLFAAALEAAGEGQGPVLFLTRRPLQSMPRGTGTTLDPMRLQKIRFQYPPSTRELFRLLCSAHEAPGPAPSLLLLDGLEEYLAEDPEPQEAAYLIALLLDTAAHFSHRLGPGRDCGLMVALQTQEEAGSGDVLHLALLQRYFPAQCWLQPDAPGPGEHGLRACLEPGGLGPRTEWWVTFRSDGEMMIAPWPTQAGDPSSGKGSSSGGQP

SEQ ID NO: 4661 - protein, 502 aa, Homo sapiens
MWTADEIAQLCYEHYGIRLPKKGKPEPNHEWTLLAAVVKIQSPADKACDTPDKPVQVTKEVVSMGTGTKCIGQSKMRKNGDILNDSHAEVIARRSFQRYLLHQLQLAATLKEDSIFVPGTQKGVWKLRRDLIFVFFSSHTPCGDASIIPMLEFEDQPCCPVFRNWAHNSSVEASSNLEAPGNERKCEDPDSPVTKKMRLEPGTAAREVTNGAAHHQSFGKQKSGPISPGIHSCDLTVEGLATVTRIAPGSAKVIDVYRTGAKCVPGEAGDSGKPGAAFHQVGLLRVKPGRGDRTRSMSCSDKMARWNVLGCQGALLMHLLEEPIYLSAVVIGKCPYSQEAMQRALIGRCQNVSALPKGFGVQELKILQSDLLFEQSRSAVQAKRADSPGRLVPCGAAISWSAVPEQPLDVTANGFPQGTTKKTIGSLQARSQISKVELFRSFQKLLSRIARDKWPHSLRVQKLDTYQEYKEAASSYQEAWSTLRKQVFGSWIRNPPDYHQFK

SEQ ID NO: 4662 - protein, 385 aa, Homo sapiens
MLVRRGARAGPRMPRGWTALCLLSLLPSGFMSLDNNGTATPELPTQGTFSNVSTNVSYQETTTPSTLGSTSLHPVSQHGNEATTNITETTVKFTSTSVITSVYGNTNSSVQSQTSVISTVFTTPANVSTPETTLKPSLSPGNVSDLSTTSTSLATSPTKPYTSSSPILSDIKAEIKCSGIREVKLTQGICLEQNKTSSCAEFKKDRGEGLARVLCGEEQADADAGAQVCSLLLAQSEVRPQCLLLVLANRTEISSKLQLMKKHQSDLKKLGILDFTEQDVASHQSYSQKTLIALVTSGALLAVLGITGYFLMNRRSWSPTGERLGEDPYYTENGGGQGYSSGPGTSPEAQGKASVNRGAQENGTGQATSRNGHSARQHVVADTEL

SEQ ID NO: 4663 - protein, 477 aa, Homo sapiens
MATYTCITCRVAFRDADMQRAHYKTDWHRYNLRRKVASMAPVTAEGFQERVRAQRAVAEEESKGSATYCTVCSKKFASFNAYENHLKSRRHVELEKKAVQAVNRKVEMMNEKNLEKGLGVDSVDKDAMNAAIQQAIKAQPSMSPKKAPPAPAKEARNVVAVGTGGRGTHDRDPSEKPPRLQWFEQQAKKLAKQQEEDSEEEEEDLDGDDWEDIDSDEELECEDTEAMDDVVEQDAEEEEAEEGPPLGAIPITDCLFCSHHSSSLMKNVAHMTKDHSFFIPDIEYLSDIKGLIKYLGEKVGVGKICLWCNEKGKSFYSTEAVQAHMNDKSHCKLFTDGDAALEFADFYDFRSSYPDHKEGEDPNKAEELPSEKNLEYDDETMELILPSGARVGHRSLMRYYKQRFGLSRAVAVAKNRKAVGRVLQQYRALGWTGSTGAALMRERDMQYVQRMKSKWMLKTGMKNNATKQMHFRVQVRF

SEQ ID NO: 4664 - protein, 449 aa, Homo sapiens
MATQAKRPRVAGPVDGGDLDPVACFLSWCRRVGLELSPKVAVSRQGTVAGYGMVARESVQAGELLFVVPRAALLSQHTCSIGGLLERERVALQSQSGWVPLLLALLHELQAPASRWRPYFALWPELGRLEHPMFWPEEERRCLLQGTGVPEAVEKDLANIRSEYQSIVLPFMEAHPDLFSLRVRSLELYHQLVALVMAYSFQEPLEEEEDEKEPNSPVMVPAADILNHLANHNANLEYSANCLRMVATQPIPKGHEIFNTYGQMANWQLIHMYGFVEPYPDNTDDTADIQMVTVREAALQGTKTEAERHLVYERWDFLCKLEMVGEEGAFVIGREEVLTEEELTTTLKVLCMPAEEFRELKDQDGGGDDKREEGSLTITNIPKLKASWRQLLQNSVLLTLQTYATDLKTDQGLLSNKEVYAKLSWREQQALQVRYGQKMILHQLLELTS

SEQ ID NO: 4665 - protein, 1235 aa, Homo sapiens
MPAGGRAGSLKDPDVAELFFKDDPEKLFSDLREIGHGSFGAVYFARDVRNSEVVAIKKMSYSGKQSNEKWQDIIKEVRFLQKLRHPNTIQYRGCYLREHTAWLVMEYCLGSASDLLEVHKKPLQEVEIAAVTHGALQGLAYLHSHNMIHRDVKAGNILLSEPGLVKLGDFGSASIMAPANSFVGTPYWMAPEVILAMDEGQYDGKVDVWSLGITCIELAERKPPLFNMNAMSALYHIAQNESPVLQSGHWSEYFRNFVDSCLQKIPQDRPTSEVLLKHRFVLRERPPTVIMDLIQRTKDAVRELDNLQYRKMKKILFQEAPNGPGAEAPEEEEEAEPYMHRAGTLTSLESSHSVPSMSISASSQSSSVNSLADASDNEEEEEEEEEEEEEEEGPEAREMAMMQEGEHTVTSHSSIIHRLPGSDNLYDDPYQPEITPSPLQPPAAPAPTSTTSSARRRAYCRNRDHFATIRTASLVSRQIQEHEQDSALREQLSGYKRMRRQHQKQLLALESRLRGEREEHSARLQRELEAQRAGFGAEAEKLARRHQAIGEKEARAAQAEERKFQQHILGQQKKELAALLEAQKRTYKLRKEQLKEELQENPSTPKREKAEWLLRQKEQLQQCQAEEEAGLLRRQRQYFELQCRQYKRKMLLARHSLDQDLLREDLNKKQTQKDLECALLLRQHEATRELELRQLQAVQRTRAELTRLQHQTELGNQLEYNKRREQELRQKHAAQVRQQPKSLKVRAGQRPPGLPLPIPGALGPPNTGTPIEQQPCSPGQEAVLDQRMLGEEEEAVGERRILGKEGATLEPKQQRILGEESGAPSPSPQKHGSLVDEEVWGLPEEIEELRVPSLVPQERSIVGQEEAGTWSLWGKEDESLLDEEFELGWVQGPALTPVPEEEEEEEEGAPIGTPRDPGDGCPSPDIPPEPPPTHLRPCPASQLPGLLSHGLLAGLSFAVGSSSGLLPLLLLLLLPLLAAQGGGGLQAALLALEVGLVGLGASYLLLCTALHLPSSLFLLLAQGTALGAVLGLSWRRGLMGVPLGLGAAWLLAWPGLALPLVAMAAGGRWVRQQGPRVRRGISRLWLRVLLRLSPMAFRALQGCGAVGDRGLFALYPKTNKDGFRSRLPVPGPRRRNPRTTQHPLALLARVWVLCKGWNWRLARASQGLASHLPPWAIHTLASWGLLRGERPTRIPRLLPRSQRQLGPPASRQPLPGTLAGRRSRTRQSRALPPWR

SEQ ID NO: 4666 - protein, 170 aa, Homo sapiens
MSHRTSSTFRAERSFHSSSSSSSSSTSSSASRALPAQDPPMEKALSMFSDDFGSFMRPHSEPLAFPARPGGAGNIKTLGDAYEFAVDVRDFSPEDIIVTTSNNHIEVRAEKLAADGTVMNTFAHKCQLPEDVDPTSVTSALREDGSLTIRARRHPHTEHVQQTFRTEIKI

SEQ ID NO: 4667 - protein, 473 aa, Homo sapiens
MAQLEGYCFSAALSCTFLVSCLLFSAFSRALREPYMDEIFHLPQAQRYCEGHFSLSQWDPMITTLPGLYLVSVGVVKPAIWIFAWSEHVVCSIGMLRFVNLLFSVGNFYLLYLLFHKVQPRNKAASSIQRVLSTLTLAVFPTLYFFNFLYYTEAGSMFFTLFAYLMCLYGNHKTSAFLGFCGFMFRQTNIIWAVFCAGNVIAQKLTEAWKTELQKKEDRLPPIKGPFAEFRKILQFLLAYSMSFKNLSMLFCLTWPYILLGFLFCAFVVVNGGIVIGDRSSHEACLHFPQLFYFFSFTLFFSFPHLLSPSKIKTFLSLVWKHGILFLVVTLVSVFLVWKFTYAHKYLLADNRHYTFYVWKRVFQRYAILKYLLVPAYIFAGWSIADSLKSKPIFWNLMFFICLFIVIVPQKLLEFRYFILPYVIYRLNITLPPTSRLVCELSCYAIVNFITFYIFLNKTFQWPNSQDIQRFMW

SEQ ID NO: 4668 - protein, 606 aa, Homo sapiens
MLHTAISCWQPFLGLAVVLIFMGSTIGCPARCECSAQNKSVSCHRRRLIAIPEGIPIETKILDLSKNRLKSVNPEEFISYPLLEEIDLSDNIIANVEPGAFNNLFNLRSLRLKGNRLKLVPLGVFTGLSNLTKLDISENKIVILLDYMFQDLHNLKSLEVGDNDLVYISHRAFSGLLSLEQLTLEKCNLTAVPTEALSHLRSLISLHLKHLNINNMPVYAFKRLFHLKHLEIDYWPLLDMMPANSLYGLNLTSLSVTNTNLSTVPFLAFKHLVYLTHLNLSYNPISTIEAGMFSDLIRLQELHIVGAQLRTIEPHSFQGLRFLRVLNVSQNLLETLEENVFSSPRALEVLSINNNPLACDCRLLWILQRQPTLQFGGQQPMCAGPDTIRERSFKDFHSTALSFYFTCKKPKIREKKLQHLLVDEGQTVQLECSADGDPQPVISWVTPRRRFITTKSNGRATVLGDGTLEIRFAQDQDSGMYVCIASNAAGNDTFTASLTVKGFASDRFLYANRTPMYMTDSNDTISNGTNANTFSLDLKTILVSTAMGCFTFLGVVLFCFLLLFVWSRGKGKHKNSIDLEYVPRKNNGAVVEGEVAGPRRFNMKMI

SEQ ID NO: 4669 - protein, 427 aa, Homo sapiens
MGTPKPRILPWLVSQLDLGQLEGVAWVNKSRTRFRIPWKHGLRQDAQQEDFGIFQAWAEATGAYVPGRDKPDLPTWKRNFRSALNRKEGLRLAEDRSKDPHDPHKIYEFVNSGVGDFSQPDTSPDTNGGGSTSDTQEDILDELLGNMVLAPLPDPGPPSLAVAPEPCPQPLRSPSLDNPTPFPNLGPSENPLKRLLVPGEEWEFEVTAFYRGRQVFQQTISCPEGLRLVGSEVGDRTLPGWPVTLPDPGMSLTDRGVMSYVRHVLSCLGGGLALWRAGQWLWAQRLGHCHTYWAVSEELLPNSGHGPDGEVPKDKEGGVFDLGPFIVDLITFTEGSGRSPRYALWFCVGESWPQDQPWTKRLVMVKVVPTCLRALVEMARVGGASSLENTVDLHISNSHPLSLTSDQYKAYLQDLVEGMDFQGPGES

SEQ ID NO: 4670 - protein, 908 aa, Homo sapiens
MEEGGRDKAPVQPQQSPAAAPGGTDEKPSGKERRDAGDKDKEQELSEEDKQLQDELEMLVERLGEKDTSLYRPALEELRRQIRSSTTSMTSVPKPLKFLRPHYGKLKEIYENMAPGENKRFAADIISVLAMTMSGERECLKYRLVGSQEELASWGHEYVRHLAGEVAKEWQELDDAEKVQREPLLTLVKEIVPYNMAHNAEHEACDLLMEIEQVDMLEKDIDENAYAKVCLYLTSCVNYVPEPENSALLRCALGVFRKFSRFPEALRLALMLNDMELVEDIFTSCKDVVVQKQMAFMLGRHGVFLELSEDVEEYEDLTEIMSNVQLNSNFLALARELDIMEPKVPDDIYKTHLENNRFGGSGSQVDSARMNLASSFVNGFVNAAFGQDKLLTDDGNKWLYKNKDHGMLSAAASLGMILLWDVDGGLTQIDKYLYSSEDYIKSGALLACGIVNSGVRNECDPALALLSDYVLHNSNTMRLGSIFGLGLAYAGSNREDVLTLLLPVMGDSKSSMEVAGVTALACGMIAVGSCNGDVTSTILQTIMEKSETELKDTYARWLPLGLGLNHLGKGEAIEAILAALEVVSEPFRSFANTLVDVCAYAGSGNVLKVQQLLHICSEHFDSKEKEEDKDKKEKKDKDKKEAPADMGAHQGVAVLGIALIAMGEEIGAEMALRTFGHLLRYGEPTLRRAVPLALALISVSNPRLNILDTLSKFSHDADPEVSYNSIFAMGMVGSGTNNARLAAMLRQLAQYHAKDPNNLFMVRLAQGLTHLGKGTLTLCPYHSDRQLMSQVAVAGLLTVLVSFLDVRNIILGKSHYVLYGLVAAMQPRMLVTFDEELRPLPVSVRVGQAVDVVGQAGKPKTITGFQTHTTPVLLAHGERAELATEEFLPVTPILEGFVILRKNPNYDL

SEQ ID NO: 4671 - protein, 335 aa, Homo sapiens
MFLATLSFLLPFAHPFGTVSCEYMLGSPLSSLAQVNLSPFSHPKVHMDPNYCHPSTSLHLCSLAWSFTRLLHPPLSPGISQVVKDHVTKPTAMAQGRVAHLIEWKGWSKPSDSPAALESAFSSYSDLSEGEQEARFAAGVAEQFAIAEAKLRAWSSVDGEDSTDDSYDEDFAGGMDTDMAGQLPLGPHLQDLFTGHRFSRPVRQGSVEPESDCSQTVSPDTLCSSLCSLEDGLLGSPARLASQLLGDELLLAKLPPSRESAFRSLGPLEAQDSLYNSPLTESCLSPAEEEPAPCKDCQPLCPPLTGSWERQRQASDLASSGVVSLDEDEAEPEEQ

SEQ ID NO: 4672 - protein, 490 aa, Homo sapiens
MALLLLLFLGLLGLWGLLCACAQDPSPAARWPPGPRPLPLVGNLHLLRLSQQDRSLMELSERYGPVFTVHLGRQKTVVLTGFEAVKEALAGPGQELADRPPIAIFQLIQRGGGIFFSSGARWRAARQFTVRALHSLGVGREPVADKILQELKCLSGQLDGYRGRPFPLALLGWAPSNITFALLFGRRFDYRDPVFVSLLGLIDEVMVLLGSPGLQLFNVYPWLGALLQLHRPVLRKIEEVRAILRTLLEARRPHVCPGDPVCSYVDALIQQGQGDDPEGLFAEANAVACTLDMVMAGTETTSATLQWAALLMGRHPDVQGRVQEELDRVLGPGRTPRLEDQQALPYTSAVLHEVQRFITLLPHVPRCTAADTQLGGFLLPKGTPVIPLLTSVLLDETQWQTPGQFNPGHFLDANGHFVKREAFLPFSAGRRVCVGERLARTELFLLFAGLLQRYRLLPPPGVSPASLDTTPARAFTMRPRAQALCAVPRP

SEQ ID NO: 4673 - protein, 369 aa, Homo sapiens
MSSRGGKKKSTKTSRSAKAGVIFPVGRMLRYIKKGHPKYRIGVGAPVYMAAVLEYLTAEILELAGNAARDNKKGRVTPRHILLAVANDEELNQLLKGVTIASGGVLPNIHPELLAKKRGSKGKLEAIITPPPAKKAKSPSQKKPVSKKAGGKKGARKSKKKQGEVSKAASADSTTEGTPADGFTVLSTKSLFLGQKLQVVQADIASIDSDAVVHPTNTDFYIGGEVGNTLEKKGGKEFVEAVLELRKKNGPLEVAGAAVSAGHGLPAKFVIHCNSPVWGADKCEELLEKTVKNCLALADDKKLKSIAFPSIGSGRNGFPKQTAAQLILKAISSYFVSTMSSSIKTVYFVLFDSESIGIYVQEMAKLDAN

SEQ ID NO: 4674 - protein, 271 aa, Homo sapiens
MFRDFGEPGPSSGNGGGYGGPAQPPAAAQAAQQKFHLVPSINTMSGSQELQWMVQPHFLGPSSYPRPLTYPQYSPPQPRPGVIRALGPPPGVRRRPCEQISPEEEERRRVRRERNKLAAAKCRNRRKELTDFLQAETDKLEDEKSGLQREIEELQKQKERLELVLEAHRPICKIPEGAKEGDTGSTSGTSSPPAPCRPVPCISLSPGPVLEPEALHTPTLMTTPSLTPFTPSLVFTYPSTPEPCASAHRKSSSSSGDPSSDPLGSPTLLAL

SEQ ID NO: 4675 - protein, 132 aa, Homo sapiens
MCSAGELLRGGDGGERDEDGDALAEREAAGTGWDPGASPRRRGQRPKESEQDVEDSQNHTGEPVGDDYKKMGTLFGELNKNLINMGFTRMYFGERIVEPVIVIFFWVMLWFLGLQALGLVAVLCLVIIYVQQ

SEQ ID NO: 4676 - protein, 216 aa, Homo sapiens
MSFLFGSRSSKTFKPKKNIPEGSHQYELLKHAEATLGSGNLRMAVMLPEGEDLNEWVAVNTVDFFNQINMLYGTITDFCTEESCPVMSAGPKYEYHWADGTNIKKPIKCSAPKYIDYLMTWVQDQLDDETLFPSKIGVPFPKNFMSVAKTILKRLFRVYAHIYHQHFDPVIQLQEEAHLNTSFKHFIFFVQEFNLIDRRELAPLQELIEKLTSKDR

SEQ ID NO: 4677 - protein, 853 aa, Homo sapiens
MGTPRAQHPPPPQLLFLILLSCPWIQGLPLKEEEILPEPGSETPTVASEALAELLHGALLRRGPEMGYLPGPPLGPEGGEEETTTTIITTTTVTTTVTSPVLCNNNISEGEGYVESPDLGSPVSRTLGLLDCTYSIHVYPGYGIEIQVQTLNLSQEEELLVLAGGGSPGLAPRLLANSSMLGEGQVLRSPTNRLLLHFQSPRVPRGGGFRIHYQAYLLSCGFPPRPAHGDVSVTDLHPGGTATFHCDSGYQLQGEETLICLNGTRPSWNGETPSCMASCGGTIHNATLGRIVSPEPGGAVGPNLTCRWVIEAAEGRRLHLHFERVSLDEDNDRLMVRSGGSPLSPVIYDSDMDDVPERGLISDAQSLYVELLSETPANPLLLSLRFEAFEEDRCFAPFLAHGNVTTTDPEYRPGALATFSCLPGYALEPPGPPNAIECVDPTEPHWNDTEPACKAMCGGELSEPAGVVLSPDWPQSYSPGQDCVWGVHVQEEKRILLQVEILNVREGDMLTLFDGDGPSARVLAQLRGPQPRRRLLSSGPDLTLQFQAPPGPPNPGLGQGFVLHFKEVPRNDTCPELPPPEWGWRTASHGDLIRGTVLTYQCEPGYELLGSDILTCQWDLSWSAAPPACQKIMTCADPGEIANGHRTASDAGFPVGSHVQYRCLPGYSLEGAAMLTCYSRDTGTPKWSDRVPKCALKYEPCLNPGVPENGYQTLYKHHYQAGESLRFFCYEGFELIGEVTITCVPGHPSQWTSQPPLCKVAYEELLDNRKLEVTQTTDPSRQLEGGNLALAILLPLGLVIVLGSGVYIYYTKLQGKSLFGFSGSHSYSPITVESDFSNPLYEAGDTREYEVSI

SEQ ID NO: 4678 - protein, 635 aa, Homo sapiens
MSVGVSTSAPLSPTSGTSVGMSTFSIMDYVVFVLLLVLSLAIGLYHACRGWGRHTVGELLMADRKMGCLPVALSLLATFQSAVAILGVPSEIYRFGTQYWFLGCCYFLGLLIPAHIFIPVFYRLHLTSAYEYLELRFNKTVRVCGTVTFIFQMVIYMGVVLYAPSLALNAVTGFDLWLSVLALGIVCTVYTALGGLKAVIWTDVFQTLVMFLGQLAVIIVGSAKVGGLGRVWAVASQHGRISGFELDPDPFVRHTFWTLAFGGVFMMLSLYGVNQAQVQRYLSSRTEKAAVLSCYAVFPFQQVSLCVGCLIGLVMFAYYQEYPMSIQQAQAAPDQFVLYFVMDLLKGLPGLPGLFIACLFSGSLSTISSAFNSLATVTMEDLIRPWFPEFSEARAIMLSRGLAFGYGLLCLGMAYISSQMGPVLQAAISIFGMVGGPLLGLFCLGMFFPCANPPGAVVGLLAGLVMAFWIGIGSIVTSMGSSMPPSPSNGSSFSLPTNLTVATVTTLMPLTTFSKPTGLQRFYSLSYLWYSAHNSTTVIVVGLIVSLLTGRMRGRSLNPATIYPVLPKLLSLLPLSCQKRLHCRSYGQDHLDTGLFPEKPRNGVLGDSRDKEAMALDGTAYQGSSSTCILQETSL

SEQ ID NO: 4679 - protein, 201 aa, Homo sapiens
MNPEYDYLFKLLLIGDSGVGKSCLLLRFADDTYTESYISTIGVDFKIRTIELDGKTIKLQIWDTAGQERFRTITSSYYRGAHGIIVVYDVTDQESYANVKQWLQEIDRYASENVNKLLVGNKSDLTTKKVVDNTTAKEFADSLGIPFLETSAKNATNVEQAFMTMAAEIKKRMGPGAASGGERPNLKIDSTPVKPAGGGCC

SEQ ID NO: 4680 - protein, 887 aa, Homo sapiens
MPILLFLIDTSASMNQRSHLGTTYLDTAKGAVETFMKLRARDPASRGDRYMLVTFEEPPYAIKAGWKENHATFMNELKNLQAEGLTTLGQSLRTAFDLLNLNRLVTGIDNYGQGRNPFFLEPAIIITITDGSKLTTTSGVQDELHLPLNSPLPGSELTKEPFRWDQRLFALVLRLPGTMSVESEQLTGVPLDDSAITPMCEVTGGRSYSVCSPRMLNQCLESLVQKVQSGVVINFEKAGPDPSPVEDGQPDISRPFGSQPWHSCHKLIYVRPNPKTGVPIGHWPVPESFWPDQNSPTLPPRTSHPVVKFSCTDCEPMVIDKLPFDKYELEPSPLTQFILERKSPQTCWQVYVSNSAKYSELGHPFGYLKASTALNCVNLFVMPYNYPVLLPLLDDLFKVHKAKPTLKWRQSFESYLKTMPPYYLGPLKKAVRMMGAPNLIADSMEYGLSYSVISYLKKLSQQAKIESDRVIGSVGKKVVQETGIKVRSRSHGLSMAYRKDFQQLLQGISEDVPHRLLDLNMKEYTGFQVALLNKDLKPQTFRNAYDIPRRNLLDHLTRMRSNLLKSTRRFLKGQDEDQVHSVPIAQMGNYQEYLKQVPSPLRELDPDQPRRLHTFGNPFKLDKKGMMIDEADEFVAGPQNKHKRPGEPNMQGIPKRRRCMSPLLRGRQQNPVVNNHIGGKGPPAPTTQAQPDLIKPLPLHKISETTNDSIIHDVVENHVADQLSSDITPNAMDTEFSASSPASLLERPTNHMEALGHDHLGTNDLTVGGFLENHEEPRDKEQCAEENIPASSLNKGKKLMHCRSHEEVNTELKAQIMKEIRKPGRKYERIFTLLKHVQGSLQTRLIFLQNVIKEASRFKKRMLIEQLENFLDEIHRRANQINHINSN

SEQ ID NO: 4681 - protein, 386 aa, Homo sapiens
MGLWGQSVPTASSARAGRYPGARTASGTRPWLLDPKILKFVVFIVAVLLPVRVDSATIPRQDEVPQQTVAPQQQRRSLKEEECPAGSHRSEYTGACNPCTEGVDYTIASNNLPSCLLCTVCKSGQTNKSSCTTTRDTVCQCEKGSFQDKNSPEMCRTCRTGCPRGMVKVSNCTPRSDIKCKNESAASSTGKTPAAEETVTTILGMLASPYHYLIIIVVLVIILAVVVVGFSCRKKFISYLKGICSGGGGGPERVHRVLFRRRSCPSRVPGAEDNARNETLSNRYLQPTQVSEQEIQGQELAELTGVTVELPEEPQRLLEQAEAEGCQRRRLLVPVNDADSADISTLLDASATLEEGHAKETIQDQLVGSEKLFYEEDEAGSATSCL

SEQ ID NO: 4682 - protein, 89 aa, Homo sapiens
MTTSQKHRDFVAEPMGEKPVGSLAGIGEVLGKKLEERGFDKAYVVLGQFLVLKKDEDLFREWLKDTCGANAKQSRDCFGCLREWCDAFL

SEQ ID NO: 4683 - protein, 781 aa, Homo sapiens
MTAPEKPVKQEEMAALDVDSGGGGGGGGGHGEYLQQQQQHGNGAVAAAAAAQDTQPSPLALLAATCSKIGPPSPGDDEEEAAAAAGAPAAAGATGDLASAQLGGAPNRWEVLSATPTTIKDEAGNLVQIPSAATSSGQYVLPLQNLQNQQIFSVAPGSDSSNGTVSSVQYQVIPQIQSADGQQVQIGFTGSSDNGGINQESSQIQIIPGSNQTLLASGTPSANIQNLIPQTGQVQVQGVAIGGSSFPGQTQVVANVPLGLPGNITFVPINSVDLDSLGLSGSSQTMTAGINADGHLINTGQAMDSSDNSERTGERVSPDINETNTDTDLFVPTSSSSQLPVTIDSTGILQQNTNSLTTSSGQVHSSDLQGNYIQSPVSEETQAQNIQVSTAQPVVQHLQLQESQQPTSQAQIVQGITPQTIHGVQASGQNISQQALQNLQLQLNPGTFLIQAQTVTPSGQVTWQTFQVQGVQNLQNLQIQNTAAQQITLTPVQTLTLGQVAAGGAFTSTPVSLSTGQLPNLQTVTVNSIDSAGIQLHPGENADSPADIRIKEEEPDPEEWQLSGDSTLNTNDLTHLRVQVVDEEGDQQHQEGKRLRRVACTCPNCKEGGGRGTNLGKKKQHICHIPGCGKVYGKTSHLRAHLRWHSGERPFVCNWMYCGKRFTRSDELQRHRRTHTGEKKFVCPECSKRFMRSDHLAKHIKTHQNKKGIHSSSTVLASVEAARDDTLITAGGTTLILANIQQGSVSGIGTVNTSATSNQDILTNTEIPLQLVTVSGNETME

SEQ ID NO: 4684 - protein, 286 aa, Homo sapiens
MAAPAPGAGAASGGAGCSGGGAGAGAGSGSGAAGAGGRLPSRVLELVFSYLELSELRSCALVCKHWYRCLHGDENSEVWRSLCARSLAEEALRTDILCNLPSYKAKIRAFQHAFSTNDCSRNVYIKKNGFTLHRNPIAQSTDGARTKIGFSEGRHAWEVWWEGPLGTVAVIGIATKRAPMQCQGYVALLGSDDQSWGWNLVDNNLLHNGEVNGSFPQCNNAPKYQIGERIRVILDMEDKTLAFERGYEFLGVAFRGLPKVCLYPAVSAVYGNTEVTLVYLGKPLDG

SEQ ID NO: 4685 - protein, 1747 aa, Homo sapiens
MNWNEKPKSATLPPLYPKSQPPFLHQSLINQITTTSQSSFSYPGSNQEACMYPGNSNPISQPLLNIQNYPQQISVSDMHNGTVVASHTSVERITYANVNGPKQLTHNLQMSSGVTQNVWLNSPMRNPVHSHIGATVSHQTDFGANVPNMPALQSQLITSDTYSMQMQMIPSNSTRLPVAYQGNQGLNQSFSEQQVDWTQQCISKGLTYPDYRPPPKLYRYSPQSFLPDSTIQKQNFIPHTSLQVKNSQLLNSVLTLPSRQTSAVPSQQYATQTDKRPPPPPYNCRYGSQPLQSTQHITKHLSMEVPQSREMLSSEIRTSFQQQWQNPNENVSTIGNFTNLKVNTNSKQPFNSPIRSSVDGVQTLAQTNEEKIMDSCNPTSNQVLDTSVAKEKLVRDIKTLVEIKQKFSELARKIKINKDLLMAAGCIKMTNTSYSEPAQNSKLSLKQTAKIQSGPQITPVMPENAERQTPTVVESAETNKTQCMLNSDIQEVNCRRFNQVDSVLPNPVYSEKRPMPDSSHDVKVLTSKTSAVEMTQAVLNTQLSSENVTKVEQNSPAVCETISVPKSMSTEEYKSKIQNENMLLLALLSQARKTQKTVLKDANQTIQDSKPDSCEMNPNTQMTGNQLNLKNMETPSTSNVSGRVLDNSFCSGQESSTKGMPAKSDSSCSMEVLATCLSLWKKQPSDTAKEKECDKLRTNTTAVGISKPANIHVKSPCSVVGNSNSQNKISNPSQQTALSMVMHNYESSGINITKGTELQIAVVSPLVLSEVKTLSVKGITPAVLPETVYPVIKEGSVCSLQNQLAENAKATAALKVDVSGPVASTATSTKIFPLTQKEKQNESTNGNSEVTPNVNQGKHNKLESAIHSPMNDQQISQESRNSTVVSSDTLQIDNICSLVEGDTSYNSQIAKIFSSLPLKMVEPQKPSLPNQQGIGSREPEKQLDNTTENKDFGFQKDKPVQCTDVSHKICDQSKSEPPLESSFNNLETNRVILEKSSLEHATEKSTANDTCSSAAIQEDIYPQEIDASSNYTPQDPARNEIHSDKAPVLYLHDQLSELLKEFPYGIEAVNTREGSVGQQTTYQTSEDQTADKTSSDSKDPADQIQITILSSEQMKEIFPEQDDQPYVVDKLAEPQKEEPITEVVSQCDLQAPAAGQSRDSVILDSEKDDIHCCALGWLSMVYEGVPQCQCNSIKNSSSEEEKQKEQCSPLDTNSCKQGERTSDRDVTVVQFKSLVNNPKTPPDGKSHFPELQDDSRKDTPKTKHKSLPRTEQELVAGQFSSKCDKLNPLQNHKRKKLRFHEVTFHSSNKMTASYEQASQETRQKKHVTQNSRPLKTKTAFLPNKDVYKKHSSLGQSLSPEKIKLKLKSVSFKQKRKLDQGNVLDMEVKKKKHDKQEQKGSVGATFKLGDSLSNPNERAIVKEKMVSNTKSVDTKASSSKFSRILTPKEYLQRQKHKEALSNKASKKICVKNVPCDSEHMRPSKLAVQVESCGKSNEKHSSGVQTSKESLNGLTSHGKNLKIHHSQESKTYNILRNVKEKVGGKQPDKIWIDKTKLDKLTNISNEAQFSQMPPQVKDQKKLYLNRVGFKCTERESISLTKLESSPRKLHKDKRQENKHKTFLPVKGNTEKSNMLEFKLCPDILLKNTNSVEERKDVKPHPRKEQAPLQVSGIKSTKEDWLKFVATKKRTQKDSQERDNVNSRLSKRSFSADGFEMLQNPVKDSKEMFQTYKQMYLEKRSRSLGSSPVK

SEQ ID NO: 4686 - protein, 328 aa, Homo sapiens
MGFWILAILTILMYSTAAKFSKQSWGLENEALIVRCPRQGKPSYTVDWYYSQTNKSIPTQERNRVFASGQLLKFLPAAVADSGIYTCIVRSPTFNRTGYANVTIYKKQSDCNVPDYLMYSTVSGSEKNSKIYCPTIDLYNWTAPLEWFKNCQALQGSRYRAHKSFLVIDNVMTEDAGDYTCKFIHNENGANYSVTATRSFTVKDEQGFSLFPVIGAPAQNEIKEVEIGKNANLTCSACFGKGTQFLAAVLWQLNGTKITDFGEPRIQQEEGQNQSFSNGLACLDMVLRIADVKEEDLLLQYDCLALNLHGLRRHTVRLSRKNPSKECF

SEQ ID NO: 4687 - protein, 207 aa, Homo sapiens
MENRALDPGTRDSYGATSHLPNKGALAKVKNNFKDLMSKLTEGQYVLCRWTDGLYYLGKIKRVSSSKQSCLVTFEDNSKYWVLWKDIQHAGVPGEEPKCNICLGKTSGPLNEILICGKCGLGYHQQCHIPIAGSADQPLLTPWFCRRCIFALAVRVSLPSSPVPASPASSSGADQRLPSQSLSSKQKGHTWALETDSASATVLGQDL

SEQ ID NO: 4688 - protein, 783 aa, Homo sapiens
MESPGESGAGSPGAPSPSSFTTGHLAREKPAQDPLYDVPNASGGQAGGPQRPGRVVSLRERLLLTRPVWLQLQANAAAALHMLRTEPPGTFLVRKSNTRQCQALCMRLPEASGPSFVSSHYILESPGGVSLEGSELMFPDLVQLICAYCHTRDILLLPLQLPRAIHHAATHKELEAISHLGIEFWSSSLNIKAQRGPAGGPVLPQLKARSPQELDQGTGAALCFFNPLFPGDLGPTKREKFKRSFKVRVSTETSSPLSPPAVPPPPVPVLPGAVPSQTERLPPCQLLRRESSVGYRVPAGSGPSLPPMPSLQEVDCGSPSSSEEEGVPGSRGSPATSPHLGRRRPLLRSMSAAFCSLLAPERQVGRAAAALMQDRHTAAGQLVQDLLTQVRAGPEPQELQGIRQALSRARAMLSAELGPEKLLSPKRLEHVLEKSLHCSVLKPLRPILAARLRRRLAADGSLGRLAEGLRLARAQGPGAFGSHLSLPSPVELEQVRQKLLQLLRTYSPSAQVKRLLQACKLLYMALRTQEGEGAGADEFLPLLSLVLAHCDLPELLLEAEYMSELLEPSLLTGEGGYYLTSLSASLALLSGLGQAHTLPLSPVQELRRSLSLWEQRRLPATHCFQHLLRVAYQDPSSGCTSKTLAVPPEASIATLNQLCATKFRVTQPNTFGLFLYKEQGYHRLPPGALAHRLPTTGYLVYRRAEWPETQGAVTEEEGSGQSEARSRGEEQGCQGDGDAGVKASPRDIREQSETTAEGGQGQAQEGPAQPGEPEAEGSRAAEE

SEQ ID NO: 4689 - protein, 526 aa, Homo sapiens
MPAVSGPGPLFCLLLLLLDPHSPETGCPPLRRFEYKLSFKGPRLALPGAGIPFWSHHGDAILGLEEVRLTPSMRNRSGAVWSRASVPFSAWEVEVQMRVTGLGRRGAQGMAVWYTRGRGHVGSVLGGLASWDGIGIFFDSPAEDTQDSPAIRVLASDGHIPSEQPGDGASQGLGSCHWDFRNRPHPFRARITYWGQRLRMSLNSGLTPSDPGEFCVDVGPLLLVPGGFFGVSAATGTLADDHDVLSFLTFSLSEPSPEVPPQPFLEMQQLRLARQLEGLWARLGLGTREDVTPKSDSEAQGEGERLFDLEETLGRHRRILQALRGLSKQLAQAERQWKKQLGPPGQARPDGGWALDASCQIPSTPGRGGHLSMSLNKDSAKVGALLHGQWTLLQALQEMRDAAVRMAAEAQVSYLPVGIEHHFLELDHILGLLQEELRGPAKAAAKAPRPPGQPPRASSCLQPGIFLFYLLIQTVGFFGYVHFRQELNKSLQECLSTGSLPLGPAPHTPRALGILRRQPLPASMPA

SEQ ID NO: 4690 - protein, 222 aa, Homo sapiens
MDLLFGRRKTPEELLRQNQRALNRAMRELDRERQKLETQEKKIIADIKKMAKQGQMDAVRIMAKDLVRTRRYVRKFVLMRANIQAVSLKIQTLKSNNSMAQAMKGVTKAMGTMNRQLKLPQIQKIMMEFERQAEIMDMKEEMMNDAIDDAMGDEEDEEESDAVVSQVLDELGLSLTDELSNLPSTGGSLSVAAGGKKAEAAASALADADADLEERLKNLRRD

SEQ ID NO: 4691 - protein, 800 aa, Homo sapiens
MGSSKKHRGEKEAAGTTAAAGTGGATEQPPRHREHKKHKHRSGGSGGSGGERRKRSRERGGERGSGRRGAEAEARSSTHGRERSQAEPSERRVKREKRDDGYEAAASSKTSSGDASSLSIEETNKLRAKLGLKPLEVNAIKKEAGTKEEPVTADVINPMALRQREELREKLAAAKEKRLLNQKLGKIKTLGEDDPWLDDTAAWIERSRQLQKEKDLAEKRAKLLEEMDQEFGVSTLVEEEFGQRRQDLYSARDLQGLTVEHAIDSFREGETMILTLKDKGVLQEEEDVLVNVNLVDKERAEKNVELRKKKPDYLPYAEDESVDDLAQQKPRSILSKYDEELEGERPHSFRLEQGGTADGLRERELEEIRAKLRLQAQSLSTVGPRLASEYLTPEEMVTFKKTKRRVKKIRKKEKEVVVRADDLLPLGDQTQDGDFGSRLRGRGRRRVSEVEEEKEPVPQPLPSDDTRVENMDISDEEEGGAPPPGSPQVLEEDEAELELQKQLEKGRRLRQLQQLQQLRDSGEKVVEIVKKLESRQRGWEEDEDPERKGAIVFNATSEFCRTLGEIPTYGLAGNREEQEELMDFERDEERSANGGSESDGEENIGWSTVNLDEEKQQQDFSASSTTILDEEPIVNRGLAAALLLCQNKGLLETTVQKVARVKAPNKSLPSAVYCIEDKMAIDDKYSRREEYRGFTQDFKEKDGYKPDVKIEYVDETGRKLTPKEAFRQLSHRFHGKGSGKMKTERRMKKLDEEALLKKMSSSDTPLGTVALLQEKQKAQKTPYIVLSGSGKSMNANTITK

SEQ ID NO: 4692 - protein, 210 aa, Homo sapiens
MDNCLAAAALNGVDRRSLQRSARLALEVLERAKRRAVDWHALERPKGCMGVLAREAPHLEKQPAAGPQRVLPGEREERPPTLSASFRTMAEFMDYTSSQCGKYYSSVPEEGGATHVYRYHRGESKLHMCLDIGNGQRKDRKKTSLGPGGSYQISEHAPEASQPAENISKDLYIEVYPGTYSVTVGSNDLTKKTHVVAVDSGQSVDLVFPV

SEQ ID NO: 4693 - protein, 359 aa, Homo sapiens
MVKLFIGNLPREATEQEIRSLFEQYGKVLECDIIKNYGFVHIEDKTAAEDAIRNLHHYKLHGVNINVEASKNKSKASTKLHVGNISPTCTNQELRAKFEEYGPVIECDIVKDYAFVHMERAEDAVEAIRGLDNTEFQGKRMHVQLSTSRLRTAPGMGDQSGCYRCGKEGHWSKECPVDRTGRVADFTEQYNEQYGAVRTPYTMGYGESMYYNDAYGALDYYKRYRVRSYEAVAAAAAASAYNYAEQTMSHLPQVQSTTVTSHLNSTSVDPYDRHLLPNSGAAATSAAMAAAAATTSSYYGRDRSPLRRAAAMLPTVGEGYGYGPESELSQASAATRNSLYDMARYEREQYVDRARYSAF

SEQ ID NO: 4694 - protein, 439 aa, Homo sapiens
MDPLSELQDDLTLDDTSEALNQLKLASIDEKNWPSDEMPDFPKSDDSKSSSPELVTHLKWDDPYYDIARHQIVEVAGDDKYGRKIIVFSACRMPPSHQLDHSKLLGYLKHTLDQYVESDYTLLYLHHGLTSDNKPSLSWLRDAYREFDRKYKKNIKALYIVHPTMFIKTLLILFKPLISFKFGQKIFYVNYLSELSEHVKLEQLGIPRQVLKYDDFLKSTQKSPATAPKPMPPRPPLPNQQFGVSLQHLQEKNPEQEPIPIVLRETVAYLQAHALTTEGIFRRSANTQVVREVQQKYNMGLPVDFDQYNELHLPAVILKTFLRELPEPLLTFDLYPHVVGFLNIDESQRVPATLQVLQTLPEENYQVLRFLTAFLVQISAHSDQNKMTNTNLAVVFGPNLLWAKDAAITLKAINPINTFTKFLLDHQGELFPSPDPSGL

SEQ ID NO: 4695 - protein, 307 aa, Homo sapiens
MSMILSASVIRVRDGLPLSASTDYEQSTGMQECRKYFKMLSRKLAQLPDRCTLKTGHYNINFISSLGVSYMMLCTENYPNVLAFSFLDELQKEFITTYNMMKTNTAVRPYCFIEFDNFIQRTKQRYNNPRSLSTKINLSDMQTEIKLRPPYQISMCELGSANGVTSAFSVDCKGAGKISSAHQRLEPATLSGIVGFILSLLCGALNLIRGFHAIESLLQSDGDDFNYIIAFFLGTAACLYQCYLLVYYTGWRNVKSFLTFGLICLCNMYLYELRNLWQLFFHVTVGAFVTLQIWLRQAQGKAPDYDV

SEQ ID NO: 4696 - protein, 234 aa, Homo sapiens
MSSEVSARRDAKKLVRSPSGLRMVPEHRAFGSPFGLEEPQWVPDKECRRCMQCDAKFDFLTRKHHCRRCGKCFCDRCCSQKVPLRRMCFVDPVRQCAECALVSLKEAEFYDKQLKVLLSGATFLVTFGNSEKPETMTCRLSNNQRYLFLDGDSHYEIEIVHISTVQILTEGFPPGGGNARATGMFLQYTVPGTEGVTQLKLTVVEDVTVGRRQAVAWLVAMHKAAKLLYESRDQ

SEQ ID NO: 4697 - protein, 1222 aa, Homo sapiens
MPKGGAPPWIMALMFTGHLLFLALLMFAFSTFEESVSNYSEWAVFTDDIDQFKTQKVQDFRPNQKLKKSMLHPSLYFDAGEIQAMRQKSRASHLHLFRAIRSAVTVMLSNPTYYLPPPKHADFAAKWNEIYGNNLPPLALYCLLCPEDKVAFEFVLEYMDRMVGYKDWLVENAPGDEVPIGHSLTGFATAFDFLYNLLDNHRRQKYLEKIWVITEEMYEYSKVRSWGKQLLHNHQATNMIALLTGALVTGVDKGSKANIWKQAVVDVMEKTMFLLNHIVDGSLDEGVAYGSYTAKSVTQYVFLAQRHFNINNLDNNWLKMHFWFYYATLLPGFQRTVGIADSNYNWFYGPESQLVFLDKFILKNGAGNWLAQQIRKHRPKDGPMVPSTAQRWSTLHTEYIWYDPQLTPQPPADYGTAKIHTFPNWGVVTYGAGLPNTQTNTFVSFKSGKLGGRAVYDIVHFQPYSWIDGWRSFNPGHEHPDQNSFTFAPNGQVFVSEALYGPKLSHLNNVLVFAPSPSSQCNKPWEGQLGECAQWLKWTGEEVGDAAGEIITASQHGEMVFVSGEAVSAYSSAMRLKSVYRALLLLNSQTLLVVDHIERQEDSPINSVSAFFHNLDIDFKYIPYKFMNRYNGAMMDVWDAHYKMFWFDHHGNSPMASIQEAEQAAEFKKRWTQFVNVTFQMEPTITRIAYVFYGPYINVSSCRFIDSSNPGLQISLNVNNTEHVVSIVTDYHNLKTRFNYLGFGGFASVADQGQITRFGLGTQAIVKPVRHDRIIFPFGFKFNIAVGLILCISLVILTFQWRFYLSFRKLMRWILILVIALWFIELLDVWSTCSQPICAKWTRTEAEGSKKSLSSEGHHMDLPDVVITSLPGSGAEILKQLFFNSSDFLYIRVPTAYIDIPETELEIDSFVDACEWKVSDIRSGHFRLLRGWLQSLVQDTKLHLQNIHLHEPNRGKLAQYFAMNKDKKRKFKRRESLPEQRSQMKGAFDRDAEYIRALRRHLVYYPSARPVLSLSSGSWTLKLHFFQEVLGASMRALYIVRDPRAWIYSMLYNSKPSLYSLKNVPEHLAKLFKIEGGKGKCNLNSGYAFEYEPLRKELSKSKSNAVSLLSHLWLANTAAALRINTDLLPTSYQLVKFEDIVHFPQKTTERIFAFLGIPLSPASLNQILFATSTNLFYLPYEGEISPTNTNVWKQNLPRDEIKLIENICWTLMDRLGYPKFMD

SEQ ID NO: 4698 - protein, 406 aa, Homo sapiens
MALDGPEQMELEEGKAGSGLRQYYLSKIEELQLIVNDKSQNLRRLQAQRNELNAKVRLLREELQLLQEQGSYVGEVVRAMDKKKVLVKVHPEGKFVVDVDKNIDINDVTPNCRVALRNDSYTLHKILPNKVDPLVSLMMVEKVPDSTYEMIGGLDKQIKEIKEVIELPVKHPELFEALGIAQPKGVLLYGPPGTGKTLLARAVAHHTDCTFIRVSGSELVQKFIGEGARMVRELFVMAREHAPSIIFMDEIDSIGSSRLEGGSGGDSEVQRTMLELLNQLDGFEATKNIKVIMATNRIDILDSALLRPGRIDRKIEFPPPNEEARLDILKIHSRKMNLTRGINLRKIAELMPGASGAEVKGVCTEAGMYALRERRVHVTQEDFEMAVAKVMQKDSEKNMSIKKLWK

SEQ ID NO: 4699 - protein, 647 aa, Homo sapiens
MSDEVFSTTLAYTKSPKVTKRTTFQDELIRAITARSARQRSSEYSDDFDSDEIVSLGDFSDTSADENSVNKKMNDFHISDDEEKNPSKLLFLKTNKSNGNITKDEPVCAIKNEEEMAPDGCEDIVVKSFSESQNKDEEFEKDKIKMKPKPRILSIKSTSSAENNSLDTDDHFKPSPRPRSMLKKKSHMEEKDGLEDKETALSEELELHSAPSSLPTPNGIQLEAEKKAFSENLDPEDSCLTSLASSSLKQILGDSFSPGSEGNASGKDPNEEITENHNSLKSDENKENSFSADHVTTAVEKSKESQVTADDLEEEKAKAELIMDDDRTVDPLLSKSQSILISTSATASSKKTIEDRNIKNKKSTNNRASSASARLMTSEFLKKSSSKRRTPSTTTSSHYLGTLKVLDQKPSQKQSIEPDRADNIRAAVYQEWLEKKNVYLHEMHRIKRIESENLRIQNEQKKAAKREEALASFEAWKAMKEKEAKKIAAKKRLEEKNKKKTEEENAARKGEALQAFEKWKEKKMEYLKEKNRKEREYERAKKQKEEETVAEKKKDNLTAVEKWNEKKEAFFKQKEKEKINEKRKEELKRAEKKDKDKQAINEYEKWLENKEKQERIERKQKKRHSFLESEALPPWSPPSRTVFAKVF

SEQ ID NO: 4700 - protein, 133 aa, Homo sapiens
MNYMPGTASLIEDIDKKHLVLLRDGRTLIGFLRSIDQFANLVLHQTVERIHVGKKYGDIPRGIFVVRGENVVLLGEIDLEKESDTPLQQVSIEEILEEQRVEQQTKLEAEKLKVQALKDRGLSIPRADTLDEY

SEQ ID NO: 4701 - protein, 167 aa, Homo sapiens
MAAAGAFRLRRAASALLLRSPRLPARELSAPARLYHKKVVDHYENPRNVGSLDKTSKNVGTGLVGAPACGDVMKLQIQVDEKGKIVDARFKTFGCGSAIASSSLATEWVKGKTVEEALTIKNTDIAKELCLPPVKLHCSMLAEDAIKAALADYKLKQEPKKGEAEKK

SEQ ID NO: 4702 - protein, 183 aa, Homo sapiens
MDNCLAAAALNGVDRRSLQRSARLALEVLERAKRRAVDWHALERPKGCMGVLAREAPHLEKQPAAGPQRVLPGEREERPPTLSASFRTMAEFMDYTSSQCGKYYSSVPEEGGATHVYRYHRGESKLHMCLDIGNGQAENISKDLYIEVYPGTYSVTVGSNDLTKKTHVVAVDSGQSVDLVFPV

SEQ ID NO: 4703 - protein, 999 aa, Homo sapiens
MGVAGRNRPGAAWAVLLLLLLLPPLLLLAGAVPPGRGRAAGPQEDVDECAQGLDDCHADALCQNTPTSYKCSCKPGYQGEGRQCEDIDECGNELNGGCVHDCLNIPGNYRCTCFDGFMLAHDGHNCLDVDECLENNGGCQHTCVNVMGSYECCCKEGFFLSDNQHTCIHRSEEGLSCMNKDHGCSHICKEAPRGSVACECRPGFELAKNQRDCILTCNHGNGGCQHSCDDTADGPECSCHPQYKMHTDGRSCLEREDTVLEVTESNTTSVVDGDKRVKRRLLMETCAVNNGGCDRTCKDTSTGVHCSCPVGFTLQLDGKTCKDIDECQTRNGGCDHFCKNIVGSFDCGCKKGFKLLTDEKSCQDVDECSLDRTCDHSCINHPGTFACACNRGYTLYGFTHCGDTNECSINNGGCQQVCVNTVGSYECQCHPGYKLHWNKKDCVEVKGLLPTSVSPRVSLHCGKSGGGDGCFLRCHSGIHLSSDVTTIRTSVTFKLNEGKCSLKNAELFPEGLRPALPEKHSSVKESFRYVNLTCSSGKQVPGAPGRPSTPKEMFITVEFELETNQKEVTASCDLSCIVKRTEKRLRKAIRTLRKAVHREQFHLQLSGMNLDVAKKPPRTSERQAESCGVGQGHAENQCVSCRAGTYYDGARERCILCPNGTFQNEEGQMTCEPCPRPGNSGALKTPEAWNMSECGGLCQPGEYSADGFAPCQLCALGTFQPEAGRTSCFPCGGGLATKHQGATSFQDCETRVQCSPGHFYNTTTHRCIRCPVGTYQPEFGKNNCVSCPGNTTTDFDGSTNITQCKNRRCGGELGDFTGYIESPNYPGNYPANTECTWTINPPPKRRILIVVPEIFLPIEDDCGDYLVMRKTSSSNSVTTYETCQTYERPIAFTSRSKKLWIQFKSNEGNSARGFQVPYVTYDEDYQELIEDIVRDGRLYASENHQEILKDKKLIKALFDVLAHPQNYFKYTAQESREMFPRSFIRLLRSKVSRFLRPYK

SEQ ID NO: 4704 - protein, 819 aa, Homo sapiens
MDTEGFGELLQQAEQLAAETEGISELPHVERNLQEIQQAGERLRSRTLTRTSQETADVKASVLLGSRGLDISHISQRLESLSAATTFEPLEPVKDTDIQGFLKNEKDNALLSAIEESRKRTFGMAEEYHRESMLVEWEQVKQRILHTLLASGEDALDFTQESEPSYISDVGPPGRSSLDNIEMAYARQIYIYNEKIVNGHLQPNLVDLCASVAELDDKSISDMWTMVKQMTDVLLTPATDALKNRSSVEVRMEFVRQALAYLEQSYKNYTLVTVFGNLHQAQLGGVPGTYQLVRSFLNIKLPAPLPGLQDGEVEGHPVWALIYYCMRCGDLLAASQVVNRAQHQLGEFKTWFQEYMNSKDRRLSPATENKLRLHYRRALRNNTDPYKRAVYCIIGRCDVTDNQSEVADKTEDYLWLKLNQVCFDDDGTSSPQDRLTLSQFQKQLLEDYGESHFTVNQQPFLYFQVLFLTAQFEAAVAFLFRMERLRCHAVHVALVLFELKLLLKSSGQSAQLLSHEPGDPPCLRRLNFVRLLMLYTRKFESTDPREALQYFYFLRDEKDSQGENMFLRCVSELVIESREFDMILGKLENDGSRKPGVIDKFTSDTKPIINKVASVAENKGLFEEAAKLYDLAKNADKVLELMNKLLSPVVPQISAPQSNKERLKNMALSIAERYRAQGISANKFVDSTFYLLLDLITFFDEYHSGHIDRAFDIIERLKLVPLNQESVEERVAAFRNFSDEIRHNLSEVLLATMNILFTQFKRLKGTSPSSSSRPQRVIEDRDSQLRSQARTLITFAGMIPYRTSGDTNARLVQMEVLMN

SEQ ID NO: 4705 - protein, 923 aa, Homo sapiens
MSQFKRQRINPLPGGRNFSGTASTSLLGPPPGLLTPPVATELSQNARHLQGGEKQRVFTGIVTSLHDYFGVVDEEVFFQLSVVKGRLPQLGEKVLVKAAYNPGQAVPWNAVKVQTLSNQPLLKSPAPPLLHVAALGQKQGILGAQPQLIFQPHRIPPLFPQKPLSLFQTSHTLHLSHLNRFPARGPHGRLDQGRSDDYDSKKRKQRAGGEPWGAKKPRHDLPPYRVHLTPYTVDSPICDFLELQRRYRSLLVPSDFLSVHLSWLSAFPLSQPFSLHHPSRIQVSSEKEAAPDAGAEPITADSDPAYSSKVLLLSSPGLEELYRCCMLFVDDMAEPRETPEHPLKQIKFLLGRKEEEAVLVGGEWSPSLDGLDPQADPQVLVRTAIRCAQAQTGIDLSGCTKWWRFAEFQYLQPGPPRRLQTVVVYLPDVWTIMPTLEEWEALCQQKAAEAAPPTQEAQGETEPTEQAPDALEQAADTSRRNAETPEATTQQETDTDLPEAPPPPLEPAVIARPGCVNLSLHGIVEDRRPKERISFEVMVLAELFLEMLQRDFGYRVYKMLLSLPEKVVSPPEPEKEEAAKEEATKEEEAIKEEVVKEPKDEAQNEGPATESEAPLKEDGLLPKPLSSGGEEEEKPRGEASEDLCEMALDPELLLLRDDGEEEFAGAKLEDSEVRSVASNQSEMEFSSLQDMPKELDPSAVLPLDCLLAFVFFDANWCGYLHRRDLERILLTLGIRLSAEQAKQLVSRVVTQNICQYRSLQYSRQEGLDGGLPEEVLFGNLDLLPPPGKSTKPGAAPTEHKALVSHNGSLINVGSLLQRAEQQDSGRLYLENKIHTLELKLEESHNRFSATEVTNKTLAAEMQELRVRLAEAEETARTAERQKSQLQRLLQELRRRLTPLQLEIQRVVEKADSWVEKEEPAPSN

SEQ ID NO: 4706 - protein, 447 aa, Homo sapiens
MGEPRAGAALDDGSGWTGSEEGSEEGTGGSEGAGGDGGPDAEGVWSPDIEQSFQEALAIYPPCGRRKIILSDEGKMYGRNELIARYIKLRTGKTRTRKQVSSHIQVLARRKSREIQSKLKDQVSKDKAFQTMATMSSAQLISAPSLQAKLGPTGPQASELFQFWSGGSGPPWNVPDVKPFSQTPFTLSLTPPSTDLPGYEPPQALSPLPPPTPSPPAWQARGLGTARLQLVEFSAFVEPPDAVDSYQRHLFVHISQHCPSPGAPPLESVDVRQIYDKFPEKKGGLRELYDRGPPHAFFLVKFWADLNWGPSGEEAGAGGSISSGGFYGVSSQYESLEHMTLTCSSKVCSFGKQVVEKVETERAQLEDGRFVYRLLRSPMCEYLVNFLHKLRQLPERYMMNSVLENFTILQVVTNRDTQELLLCTAYVFEVSTSERGAQHHIYRLVRD

SEQ ID NO: 4707 - protein, 102 aa, Homo sapiens
MFLTALLWRGRIPGRQWIGKHRRPRFVSLRAKQNMIRRLEIEAENHYWLSMPYMTREQERGHAAVRRREAFEAIKAAATSKFPPHRFIADQLDHLNVTKKWS

SEQ ID NO: 4708 - protein, 406 aa, Homo sapiens
MDQSGMEIPVTLIIKAPNQKYSDQTISCFLNWTVGKLKTHLSNVYPSKPLTKDQRLVYSGRLLPDHLQLKDILRKQDEYHMVHLVCTSRTPPSSPKSSTNRESHEALASSSNSSSDHSGSTTPSSGQETLSLAVGSSSEGLRQRTLPQAQTDQAQSHQFPYVMQGNVDNQFPGQAAPPGFPVYPAFSPLQMLWWQQMYAHQYYMQYQAAVSAQATSNVNPTQPTTSQPLNLAHVPGEEPPPAPNLVAQENRPMNENVQMNAQGGPVLNEEDFNRDWLDWMYTFSRAAILLSIVYFYSSFSRFIMVMGAMLLVYLHQAGWFPFRQEGGHQQAPNNNAEVNNDGQNANNLELEEMERLMDDGLEDESGEDGGEDASAIQRPGLMASAWSFITTFFTSLIPEGPPQVAN

SEQ ID NO: 4709 - protein, 193 aa, Homo sapiens
MGKQNSKLRPEVLQDLRENTEFTDHELQEWYKGFLKDCPTGHLTVDEFKKIYANFFPYGDASKFAEHVFRTFDTNGDGTIDFREFIIALSVTSRGKLEQKLKWAFSMYDLDGNGYISRSEMLEIVQAIYKMVSSVMKMPEDESTPEKRTDKIFRQMDTNNDGKLSLEEFIRGAKSDPSIVRLLQCDPSSASQF

SEQ ID NO: 4710 - protein, 233 aa, Homo sapiens
MALKNKFSCLWILGLCLVATTSSKIPSITDPHFIDNCIEAHNEWRGKVNPPAADMKYMIWDKGLAKMAKAWANQCKFEHNDCLDKSYKCYAAFEYVGENIWLGGIKSFTPRHAITAWYNETQFYDFDSLSCSRVCGHYTQLVWANSFYVGCAVAMCPNLGGASTAIFVCNYGPAGNFANMPPYVRGESCSLCSKEEKCVKNLCKNPFLKPTGRAPQQTAFNPFSLGFLLLRIF

SEQ ID NO: 4711 - protein, 360 aa, Homo sapiens
MAPLGTTVLLWSLLRSSPGVERVCFRARIQPWHGGLLQPLPCSFEMGLPRRRFSSEAAESGSPETKKPTFMDEEVQSILTKMTGLNLQKTFKPAIQELKPPTYKLMTQAQLEEATRQAVEAAKVRLKMPPVLEERVPINDVLAEDKILEGTETTKYVFTDISYSIPHRERFIVVREPSGTLRKASWEERDRMIQVYFPKEGRKILTPIIFKEENLRTMYSQDRHVDVLNLCFAQFEPDSTEYIKVHHKTYEDIDKRGKYDLLRSTRYFGGMVWYFVNNKKIDGLLIDQIQRDLIDDATNLVQLYHVLHPDGQSAQGAKDQAAEGINLIKVFAKTEAQKGAYIELTLQTYQEALSRHSAAS

SEQ ID NO: 4712 - protein, 215 aa, Homo sapiens
MADLHRQLQEYLAQGKAGGPAAAEPLLAAEKAEEPGDRPAEEWLGRAGLRWTWARSPAESAAAGLTCLPSVTRGQRLAAGGGCLLLAALCFGLAALYAPVLLLRARKFALLWSLGSALALAGSALLRGGAACGRLLRCEEAPSRPALLYMAALGATLFAALGLRSTLLTVLGAGAQVAALLAALVGLLPWGGGTALRLALGRLGRGAGLAKVLPV

SEQ ID NO: 4713 - protein, 637 aa, Homo sapiens
MSRMLPFLLLLWFLPITEGSQRAEPMFTAVTNSVLPPDYDSNPTQLNYGVAVTDVDHDGDFEIVVAGYNGPNLVLKYDRAQKRLVNIAVDERSSPYYALRDRQGNAIGVTACDIDGDGREEIYFLNTNNAFSGVATYTDKLFKFRNNRWEDILSDEVNVARGVASLFAGRSVACVDRKGSGRYSIYIANYAYGNVGPDALIEMDPEASDLSRGILALRDVAAEAGVSKYTGGRGVSVGPILSSSASDIFCDNENGPNFLFHNRGDGTFVDAAASAGVDDPHQHGRGVALADFNRDGKVDIVYGNWNGPHRLYLQMSTHGKVRFRDIASPKFSMPSPVRTVITADFDNDQELEIFFNNIAYRSSSANRLFRVIRREHGDPLIEELNPGDALEPEGRGTGGVVTDFDGDGMLDLILSHGESMAQPLSVFRGNQGFNNNWLRVVPRTRFGAFARGAKVVLYTKKSGAHLRIIDGGSGYLCEMEPVAHFGLGKDEASSVEVTWPDGKMVSRNVASGEMNSVLEILYPRDEDTLQDPAPLECGQGFSQQENGHCMDTNECIQFPFVCPRDKPVCVNTYGSYRCRTNKKCSRGYEPNEDGTACVAQVAFLGGYSSAASRISEPLSRASYLSLGLGLCLQLYAL

SEQ ID NO: 4714 - protein, 211 aa, Homo sapiens
MADDFGFFSSSESGAPEAAEEDPAAAFLAQQESEIAGIENDEGFGAPAGSHAAPAQPGPTSGAGSEDMGTTVNGDVFQEANGPADGYAAIAQADRLTQEPESIRKWREEQRKRLQELDAASKVTEQEWREKAKKDLEEWNQRQSEQVEKNKINNRASEEAFVKESKEETPGTEWEKVAQLCDFNPKSSKQCKDVSRLRSVLMSLKQTPLSR

SEQ ID NO: 4715 - protein, 484 aa, Homo sapiens [sequence omitted]

SEQ ID NO: 4716 - protein, 539 aa, Homo sapiens
MAVCARLCGVGPSRGCRRRQQRRGPAETAAADSEPDTDPEEERIEASAGVGGGLCAGPSPPPPRCSLLELPPELLVEIFASLPGTDLPSLAQVCTKFRRILHTDTIWRRRCREEYGVCENLRKLEITGVSCRDVYAKLLHRYRHILGLWQPDIGPYGGLLNVVVDGLFIIGWMYLPPHDPHVDDPMRFKPLFRIHLMERKAATVECMYGHKGPHHGHIQIVKKDEFSTKCNQTDHHRMSGGRQEEFRTWLREEWGRTLEDIFHEHMQELILMKFIYTSQYDNCLTYRRIYLPPSRPDDLIKPGLFKGTYGSHGLEIVMLSFHGRRARGTKITGDPNIPAGQQTVEIDLRHRIQLPDLENQRNFNELSRIVLEVRERVRQEQQEGGHEAGEGRGRQGPRESQPSPAQPRAEAPSKGPDGTPGEDGGEPGDAVAAAEQPAQCGQGQPFVLPVGVSSRNEDYPRTCRMCFYGTGLIAGHGFTSPERTPGVFILFDEDRFGFVWLELKSFSLYSRVQATFRNADAPSPQAFDEMLKNIQSLTS

SEQ ID NO: 4717 - protein, 1328 aa, Homo sapiens
MDQKILSLAAEKTADKLQEFLQTLREGDLTNLLQNQAVKGKVAGALLRAIFKGSPCSEEAGTLRRRKIYTCCIQLVESGDLQKEIASEIIGLLMLEAHHFPGPLLVELANEFISAVREGSLVNGKSLELLPIILTALATKKENLAYGKGVLSGEECKKQLINTLCSGRWDQQYVIQLTSMFKDVPLTAEEVEFVVEKALSMFSKMNLQEIPPLVYQLLVLSSKGSRKSVLEGIIAFFSALDKQHNEEQSGDELLDVVTVPSGELRHVEGTIILHIVFAIKLDYELGRELVKHLKVGQQGDSNNNLSPFSIALLLSVTRIQRFQDQVLDLLKTSVVKSFKDLQLLQGSKFLQNLVPHRSYVSTMILEVVKNSVHSWDHVTQGLVELGFILMDSYGPKKVLDGKTIETSPSLSRMPNQHACKLGANILLETFKIHEMIRQEILEQVLNRVVTRASSPISHFLDLLSNIVMYAPLVLQSCSSKVTEAFDYLSFLPLQTVQRLLKAVQPLLKVSMSMRDCLILVLRKAMFANQLDARKSAVAGFLLLLKNFKVLGSLSSSQCSQSLSVSQVHVDVHSHYNSVANETFCLEIMDSLRRCLSQQADVRLMLYEGFYDVLRRNSQLANSVMQTLLSQLKQFYEPKPDLLPPLKLEACILTQGDKISLQEPLDYLLCCIQHCLAWYKNTVIPLQQGEEEEEEEEAFYEDLDDILESITNRMIKSELEDFELDKSADFSQSTSIGIKNNICAFLVMGVCEVLIEYNFSISSFSKNRFEDILSLFMCYKKLSDILNEKAGKAKTKMANKTSDSLLSMKFVSSLLTALFRDSIQSHQESLSVLRSSNEFMRYAVNVALQKVQQLKETGHVSGPDGQNPEKIFQNLCDITRVLLWRYTSIPTSVEESGKKEKGKSISLLCLEGLQKIFSAVQQFYQPKIQQFLRALDVTDKEGEEREDADVSVTQRTAFQIRQFQRSLLNLLSSQEEDFNSKEALLLVTVLTSLSKLLEPSSPQFVQMLSWTSKICKENSREDALFCKSLMNLLFSLHVSYKSPVILLRDLSQDIHGHLGDIDQDVEVEKTNHFAIVNLRTAAPTVCLLVLSQAEKVLEEVDWLITKLKGQVSQETLSEEASSQATLPNQPVEKAIIMQLGTLLTFFHELVQTALPSGSCVDTLLKDLCKMYTTLTALVRYYLQVCQSSGGIPKNMEKLVKLSGSHLTPLCYSFISYVQNKSKSLNYTGEKKEKPAAVATAMARVLRETKPIPNLIFAIEQYEKFLIHLSKKSKVNLMQHMKLSTSRDFKIKGNILDMVLREDGEDENEEGTASEHGGQNKEPAKKKRKK

SEQ ID NO: 4718 - protein, 193 aa, Homo sapiens
MPVWGGGNKCGACGRTVYHAEEVQCDGRSFHRCCFLCMVCRKNLDSTTVAIHDEEIYCKSCYGKKYGPKGYGYGQGAGTLNMDRGERLGIKPESVQPHRPTTNPNTSKFAQKYGGAEKCSRCGDSVYAAEKIIGAGKPWHKNCFRCAKCGKSLESTTLTEKEGEIYCKGCYAKNFGPKGFGYGQGAGALVHAQ

SEQ ID NO: 4719 - protein, 142 aa, Homo sapiens
MRLSWFRVLTVLSICLSAVATATGAEGKRKLQIGVKKRVDHCPIKSRKGDVLHMHYTGKLEDGTEFDSSLPQNQPFVFSLGTGQVIKGWDQGLLGMCEGEKRKLVIPSELGYGERGAPPKIPGGATLVFEVELLKIERRTEL

SEQ ID NO: 4720 - protein, 707 aa, Homo sapiens
MSGSRQAGSGSAGTSPGSSAASSVTSASSSLSSSPSPPSVAVSAAALVSGGVAQAAGSGGLGGPVRPVLVAPAVSGSGGGAVSTGLSRHSCAARPSAGVGGSSSSLGSGSRKRPLLAPLCNGLINSYEDKSNDFVCPICFDMIEEAYMTKCGHSFCYKCIHQSLEDNNRCPKCNYVVDNIDHLYPNFLVNELILKQKQRFEEKRFKLDHSNGHRWQIFQDWLGTDQDNLDLANVNLMLELLVQKKKQLEAESHAAQLQILMEFLKVARRNKREEMSGLYSPVSEDSTVPQFEAPSPSHSSIIDSTEYSQPPGFSGSSQTKKQPWYNSTLASRRKRLTAHFEDLEQCYFSTRMSRISDDSRTASQLDEFQECLSKFTRYNSVRPLATLSYASDLYNGSSIVSSIEFDRDCDYFAIAGVTKKIKVYEYDTVIQDAVDIHYPENEMTCNSKISCISWSSYHKNLLASSDYEGTVILWDGFTGQRSKVYQEHEKRCWSVDFNLMDPKLLASGSDDAKVKLWSTNLDNSVASIEAKANVCCVKFSPSSRYHLAFGCADHCVHYYDLRNTKQPIMVFKGHRKAVSYAKFVSGEEIVSASTDSQLKLWNVGKPYCLRSFKGHINEKNFVGLASNGDYIACGSENNSLYLYYKGLSKTLLTFKFDTVKSVLDKDRKEDDTNEFVSAVCWRALPDGESNVLIAANSQGTIKVLELV

SEQ ID NO: 4721 - protein, 240 aa, Homo sapiens
MAMASVKLLAGVLRKPDAWIGLWGVLRGTPSSYKLCTSWNRYLYFSSTKLRAPNYKTLFYNIFSLRLPGLLLSPECIFPFSVRLKSNIRSTKSTKKSLQKVDEEDSDEESHHDEMSEQEEELEDDPTVVKNYKDLEKAVQSFRYDVVLKTGLDIGRNKVEDAFYKGELRLNEEKLWKKSRTVKVGDTLDLLIGEDKEAGTETVMRILLKKVFEEKTESEKYRVVLRRWKSLKLPKKRMSK

SEQ ID NO: 4722 - protein, 510 aa, Homo sapiens
MEEPQAGDAARFSCPPNFTAKPPASESPRFSLEALTGPDTELWLIQAPADFAPECFNGRHVPLSGSQIVKGKLAGKRHRYRVLSSCPQAGEATLLAPSTEAGGGLTCASAPQGTLRILEGPQQSLSGSPLQPIPASPPPQIPPGLRPRFCAFGGNPPVTGPRSALAPNLLTSGKKKKEMQVTEAPVTQEAVNGHGALEVDMALGSPEMDVRKKKKKKNQQLKEPEAAGPVGTEPTVETLEPLGVLFPSTTKKRKKPKGKETFEPEDKTVKQEQINTEPLEDTVLSPTKKRKRQKGTEGMEPEEGVTVESQPQVKVEPLEEAIPLPPTKKRKKEKGQMAMMEPGTEAMEPVEPEMKPLESPGGTMAPQQPEGAKPQAQAALAAPKKKTKKEKQQDATVEPETEVVGPELPDDLEPQAAPTSTKKKKKKKERGHTVTEPIQPLEPELPGEGQPEARATPGSTKKRKKQSQESRMPETVPQEEMPGPPLNSESGEEAPTGRDKKRKQQQQQPV

SEQ ID NO: 4723 - protein, 450 aa, Homo sapiens
MAADQRPKADTLALRQRLISSSCRLFFPEDPVKIVRAQGQYMYDEQGAEYIDCISNVAHVGHCHPLVVQAAHEQNQVLNTNSRYLHDNIVDYAQRLSETLPEQLCVFYFLNSGSEANDLALRLARHYTGHQDVVVLDHAYHGHLSSLIDISPYKFRNLDGQKEWVHVAPLPDTYRGPYREDHPNPAMAYANEVKRVVSSAQEKGRKIAAFFAESLPSVGGQIIPPAGYFSQVAEHIRKAGGVFVADEIQVGFGRVGKHFWAFQLQGKDFVPDIVTMGKSIGNGHPVACVAATQPVARAFEATGVEYFNTFGGSPVSCAVGLAVLNVLEKEQLQDHATSVGSFLMQLLGQQKIKHPIVGDVRGVGLFIGVDLIKDEATRTPATEEAAYLVSRLKENYVLLSTDGPGRNILKFKPPMCFSLDNARQVVAKLDAILTDMEEKVRSCETLRLQP

SEQ ID NO: 4724 - protein, 515 aa, Homo sapiens
MATSTGRWLLLRLALFGFLWEASGGLDSGASRDDDLLLPYPRARARLPRDCTRVRAGNREHESWPPPPATPGAGGLAVRTFVSHFRDRAVAGHLTRAVEPLRTFSVLEPGGPGGCAARRRATVEETARAADCRVAQNGGFFRMNSGECLGNVVSDERRVSSSGGLQNAQFGIRRDGTLVTGYLSEEEVLDTENPFVQLLSGVVWLIRNGSIYINESQATECDETQETGSFSKFVNVISARTAIGHDRKGQLVLFHADGQTEQRGINLWEMAEFLLKQDVVNAINLDGGGSATFVLNGTLASYPSDHCQDNMWRCPRQVSTVVCVHEPRCQPPDCHGHGTCVDGHCQCTGHFWRGPGCDELDCGPSNCSQHGLCTETGCRCDAGWTGSNCSEECPLGWHGPGCQRPCKCEHHCPCDPKTGNCSVSRVKQCLQPPEATLRAGELSFFTRTAWLALTLALAFLLLISTAANLSLLLSRAERNRRLHGDYAYHPLQEMNGEPLAAEKEQPGGAHNPFKD

SEQ ID NO: 4725 - protein, 816 aa, Homo sapiens
MAEPLKEEDGEDGSAEPPGPVKAEPAHTAASVAAKNLALLKARSFDVTFDVGDEYEIIETIGNGAYGVVSSARRRLTGQQVAIKKIPNAFDVVTNAKRTLRELKILKHFKHDNIIAIKDILRPTVPYGEFKSVYVVLDLMESDLHQIIHSSQPLTLEHVRYFLYQLLRGLKYMHSAQVIHRDLKPSNLLVNENCELKIGDFGMARGLCTSPAEHQYFMTEYVATRWYRAPELMLSLHEYTQAIDLWSVGCIFGEMLARRQLFPGKNYVHQLQLIMMVLGTPSPAVIQAVGAERVRAYIQSLPPRQPVPWETVYPGADRQALSLLGRMLRFEPSARISAAAALRHPFLAKYHDPDDEPDCAPPFDFAFDREALTRERIKEAIVAEIEDFHARREGIRQQIRFQPSLQPVASEPGCPDVEMPSPWAPSGDCAMESPPPAPPPCPGPAPDTIDLTLQPPPPVSEPAPPKKDGAISDNTKAALKAALLKSLRSRLRDGPSAPLEAPEPRKPVTAQERQREREEKRRRRQERAKEREKRRQERERKERGAGASGGPSTDPLAGLVLSDNDRSLLERWTRMARPAAPALTSVPAPAPAPTPTPTPVQPTSPPPGPVAQPTGPQPQSAGSTSGPVPQPACPPPGPAPHPTGPPGPIPVPAPPQIATSTSLLAAQSLVPPPGLPGSSTPGVLPYFPPGLPPPDAGGAPQSSMSESPDVNLVTQQLSKSQVEDPLPPVFSGTPKGSGAGYGVGFDLEEFLNQSFDMGVADGPQDGQADSASLSASLLADWLEGHGMNPADIESLQREIQMDSPMLLADLPDLQDP

SEQ ID NO: 4726 - protein, 151 aa, Homo sapiens [sequence omitted]

SEQ ID NO: 4727 - protein, 277 aa, Homo sapiens
MENTENSVDSKSIKNLEPKIIHGSESMDSGISLDNSYKMDYPEMGLCIIINNKNFHKSTGMTSRSGTDVDAANLRETFRNLKYEVRNKNDLTREEIVELMRDVSKEDHSKRSSFVCVLLSHGEEGIIFGTNGPVDLKKITNFFRGDRCRSLTGKPKLFIIQACRGTELDCGIETDSGVDDDMACHKIPVEADFLYAYSTAPGYYSWRNSKDGSWFIQSLCAMLKQYADKLEFMHILTRVNRKVATEFESFSFDATFHAKKQIPCIVSMLTKELYFYH

SEQ ID NO: 4728 - protein, 348 aa, Homo sapiens
MLCPWRTANLGLLLILTIFLVAEAEGAAQPNNSLMLQTSKENHALASSSLCMDEKQITQNYSKVLAEVNTSWPVKMATNAVLCCPPIALRNLIIITWEIILRGQPSCTKAYKKETNETKETNCTDERITWVSRPDQNSDLQIRTVAITHDGYYRCIMVTPDGNFHRGYHLQVLVTPEVTLFQNRNRTAVCKAVAGKPAAHISWIPEGDCATKQEYWSNGTVTVKSTCHWEVHNVSTVTCHVSHLTGNKSLYIELLPVPGAKKSAKLYIPYIILTIIILTIVGFIWLLKVNGCRKYKLNKTESTPVVEEDEMQPYASYTEKNNPLYDTTNKVKASEALQSEVDTDLHTL

SEQ ID NO: 4729 - protein, 79 aa, Homo sapiens [sequence omitted]

SEQ ID NO: 4730 - protein, 519 aa, Homo sapiens
MSVSVLSPSRLLGDVSGILQAASLLILLLLLIKAVQLYLHRQWLLKALQQFPCPPSHWLFGHIQELQQDQELQRIQKWVETFPSACPHWLWGGKVRVQLYDPDYMKVILGRSDPKSHGSYRFLAPWIGYGLLLLNGQTWFQHRRMLTPAFHYDILKPYVGLMADSVRVMLDKWEELLGQDSPLEVFQHVSLMTLDTIMKCAFSHQGSIQVDRNSQSYIQAISDLNNLVFSRVRNAFHQNDTIYSLTSAGRWTHRACQLAHQHTDQVIQLRKAQLQKEGELEKIKRKRHLDFLDILLLAKMENGSILSDKDLRAEVDTFMFEGHDTTASGISWILYALATHPKHQERCREEIHSLLGDGASITWNHLDQMPYTTMCIKEALRLYPPVPGIGRELSTPVTFPDGRSLPKGIMVLLSIYGLHHNPKVWPNPEVFDPFRFAPGSAQHSHAFLPFSGGSRNCIGKQFAMNELKVATALTLLRFELLPDPTRIPIPIARLVLKSKNGIHLRLRRLPNPCEDKDQL

SEQ ID NO: 4731 - protein, 544 aa, Homo sapiens
MVMYARKQQRLSDGCHDRRGDSQPYQALKYSSKSHPSSGDHRHEKMRDAGDPSPPNKMLRRSDSPENKYSDSTGHSKAKNVHTHRVRERDGGTSYSPQENSHNHSALHSSNSHSSNPSNNPSKTSDAPYDSADDWSEHISSSGKKYYYNCRTEVSQWEKPKEWLEREQRQKEANKMAVNSFPKDRDYRREVMQATATSGFASGKSTSGDKPVSHSCTTPSTSSASGLNPTSAPPTSASAVPVSPVPQSPIPPLLQDPNLLRQLLPALQATLQLNNSNVDISKINEVLTAAVTQASLQSIIHKFLTAGPSAFNITSLISQAAQLSTQAQPSNQSPMSLTSDASSPRSYVSPRISTPQTNTVPIKPLISTPPVSSQPKVSTPVVKQGPVSQSATQQPVTADKQQGHEPVSPRSLQRSSSQRSPSPGPNHTSNSSNASNATVVPQNSSARSTCSLTPALAAHFSENLIKHVQGWPADHAEKQASRLREEAHNMGTIHMSEICTELKNLRSLVRVCEIQATLREQRILFLRQQIKELEKLKNQNSFMV

SEQ ID NO: 4732 - protein, 745 aa, Homo sapiens
MEVMNLMEQPIKVTEWQQTYTYDSGIHSGANTCVPSVSSKGIMEEDEACGRQYTLKKTTTYTQGVPPSQGDLEYQMSTTARAKRVREAMCPGVSGEDSSLLLATQVEGQATNLQRLAEPSQLLKSAIVHLINYQDDAELATRALPELTKLLNDEDPVVVTKAAMIVNQLSKKEASRRALMGSPQLVAAVVRTMQNTSDLDTARCTTSILHNLSHHREGLLAIFKSGGIPALVRMLSSPVESVLFYAITTLHNLLLYQEGAKMAVRLADGLQKMVPLLNKNNPKFLAITTDCLQLLAYGNQESKLIILANGGPQALVQIMRNYSYEKLLWTTSRVLKVLSVCPSNKPAIVEAGGMQALGKHLTSNSPRLVQNCLWTLRNLSDVATKQEGLESVLKILVNQLSVDDVNVLTCATGTLSNLTCNNSKNKTLVTQNSGVEALIHAILRAGDKDDITEPAVCALRHLTSRHPEAEMAQNSVRLNYGIPAIVKLLNQPNQWPLVKATIGLIRNLALCPANHAPLQEAAVIPRLVQLLVKAHQDAQRHVAAGTQQPYTDGVRMEEIVEGCTGALHILARDPMNRMEIFRLNTIPLFVQLLYSSVENIQRVAAGVLCELAQDKEAADAIDAEGASAPLMELLHSRNEGTATYAAAVLFRISEDKNPDYRKRVSVELTNSLFKHDPAAWEAAQSMIPINEPYGDDMDATYRPMYSSDVPLDPLEMHMDMDGDYPIDTYSDGLRPPYPTADHMLA

SEQ ID NO: 4733 - protein, 207 aa, Homo sapiens
MSPLLRRLLLAALLQLAPAQAPVSQPDAPGHQRKVVSWIDVYTRATCQPREVVVPLTVELMGTVAKQLVPSCVTVQRCGGCCPDDGLECVPTGQHQVRMQILMIRYPSSQLGEMSLEEHSQCECRPKKKDSAVKPDRAATPHHRPQPRSVPGWDSAPGAPSPADITHPTPAPGPSAHAAPSTTSALTPGPAAAAADAAASSVAKGGA

SEQ ID NO: 4734 - protein, 360 aa, Homo sapiens
MKALILVGGYGTRLRPLTLSTPKPLVDFCNKPILLHQVEALAAAGVDHVILAVSYMSQVLEKEMKAQEQRLGIRISMSHEEEPLGTAGPLALARDLLSETADPFFVLNSDVICDFPFQAMVQFHRHHGQEGSILVTKVEEPSKYGVVVCEADTGRIHRFVEKPQVFVSNKINAGMYILSPAVLQRIQLQPTSIEKEVFPIMAKEGQLYAMELQGFWMDIGQPKDFLTGMCLFLQSLRQKQPERLCSGPGIVGNVLVDPSARIGQNCSIGPNVSLGPGVVVEDGVCIRRCTVLRDARIRSHSWLESCIVGWRCRVGQWVRMENVTVLGEDVIVNDELYLNGASVLPHKSIGESVPEPRIIM

SEQ ID NO: 4735 - protein, 729 aa, Homo sapiens
MFSALKKLVGSDQAPGRDKNIPAGLQSMNQALQRRFAKGVQYNMKIVIRGDRNTGKTALWHRLQGRPFVEEYIPTQEIQVTSIHWSYKTTDDIVKVEVWDVVDKGKCKKRGDGLKMENDPQEAESEMALDAEFLDVYKNCNGVVMMFDITKQWTFNYILRELPKVPTHVPVCVLGNYRDMGEHRVILPDDVRDFIDNLDRPPGSSYFRYAESSMKNSFGLKYLHKFFNIPFLQLQRETLLRQLETNQLDMDATLEELSVQQETEDQNYGIFLEMMEARSRGHASPLAANGQSPSPGSQSPVVPAGAVSTGSSSPGTPQPAPQLPLNAAPPSSVPPVPPSEALPPPACPSAPAPRRSIISRLFGTSPATEAAPPPPEPVPAAEGPATVQSVEDFVPDDRLDRSFLEDTTPARDEKKVGAKAAQQDSDSDGEALGGNPMVAGFQDDVDLEDQPRGSPPLPAGPVPSQDITLSSEEEAEVAAPTKGPAPAPQQCSEPETKWSSIPASKPRRGTAPTRTAAPPWPGGVSVRTGPEKRSSTRPPAEMEPGKGEQASSSESDPEGPIAAQMLSFVMDDPDFESEGSDTQRRADDFPVRDDPSDVTDEDEGPAEPPPPPKLPLPAFRLKNDSDLFGLGLEEAGPKESSEEGKEGKTPSKEKKKKKKKGKEEEEKAAKKKSKHKKSKDKEEGKEERRRRQQRPPRSRERTAADELEAFLGGGAPGGRHPGGGDYEEL

SEQ ID NO: 4736 - protein, 1157 aa, Homo sapiens
MGKLRRRYNIKGRQQAGPGPSKGPPEPPPVQLELEDKDTLKGVDASNALVLPGKKKKKTKAPPLSKKEKKPLTKKEKKVLQKILEQKEKKSQRAEMLQKLSEVQASEAEMRLFYTTSKLGTGNRMYHTKEKADEVVAPGQEKISSLSGAHRKRRRWPSAEEEEEEEEESESELEEESELDEDPAAEPAEAGVGTTVAPLPPAPAPSSQPVPAGMTVPPPPAAAPPLPRALAKPAVFIPVNRSPEMQEERLKLPILSEEQVIMEAVAEHPIVIVCGETGSGKTTQVPQFLYEAGFSSEDSIIGVTEPRRVAAVAMSQRVAKEMNLSQRVVSYQIRYEGNVTEETRIKFMTDGVLLKEIQKDFLLLRYKVVIIDEAHERSVYTDILIGLLSRIVTLRAKRNLPLKLLIMSATLRVEDFTQNPRLFAKPPPVIKVESRQFPVTVHFNKRTPLEDYSGECFRKVCKIHRMLPAGGILVFLTGQAEVHALCRRLRKAFPPSRARPQEKDDDQKDSVEEMRKFKKSRARAKKARAEVLPQINLDHYSVLPAGEGDEDREAEVDEEEGALDSDLDLDLGDGGQDGGEQPDASLPLHVLPLYSLLAPEKQAQVFKPPPEGTRLCVVATNVAETSLTIPGIKYVVDCGKVKKRYYDRVTGVSSFRVTWVSQASADQRAGRAGRTEPGHCYRLYSSAVFGDFEQFPPPEITRRPVEDLILQMKALNVEKVINFPFPTPPSVEALLAAEELLIALGALQPPQKAERVKQLQENRLSCPITALGRTMATFPVAPRYAKMLALSRQHGCLPYAITIVASMTVRELFEELDRPAASDEELTRLKSKRARVAQMKRTWAGQGASLKLGDLMVLLGAVGACEYASCTPQFCEANGLRYKAMMEIRRLRGQLTTAVNAVCPEAELFVDPKMQPPTESQVTYLRQIVTAGLGDHLARRVQSEEMLEDKWRNAYKTPLLDDPVFIHPSSVLFKELPEFVVYQEIVETTKMYMKGVSSVEVQWIPALLPSYCQFDKPLEEPAPTYCPERGRVLCHRASVFYRVGWPLPAIEVDFPEGIDRYKHFARFLLEGQVFRKLASYRSCLLSSPGTMLKTWARLQPRTESLLRALVAEKADCHEALLAAWKKNPKYLLAEYCEWLPQAMHPDIEKAWPPTTVH

SEQ ID NO: 4737 - protein, 719 aa, Homo sapiens
MGFSNMEDDGPEEEERVAEPQANFNTPQALRFEELLANLLNEQHQIAKELFEQLKMKKPSAKQQKEVEKVKPQCKEVHQTLILDPAQRKRLQQQMQQHVQLLTQIHLLATCNPNLNPEASSTRICLKELGTFAQSSIALHHQYNPKFQTLFQPCNLMGAMQLIEDFSTHVSIDCSPHKTVKKTANEFPCLPKQVAWILATSKVFMYPELLPVCSLKAKNPQDKILFTKAEDNKYLLTCKTARQLTVRIKNLNMNRAPDNIIKFYKKTKQLPVLGKCCEEIQPHQWKPPIEREEHRLPFWLKASLPSIQEELRHMADGAREVGNMTGTTEINSDQGLEKDNSELGSETRYPLLLPKGVVLKLKPVADRFPKKAWRQKRSSVLKPLLIQPSPSLQPSFNPGKTPAQSTHSEAPPSKMVLRIPHPIQPATVLQTVPGVPPLGVSGGESFESPAALPAMPPEARTSFPLSESQTLLSSAPVPKVMMPSPASSMFRKPYVRRRPSKRRGARAFRCIKPAPVIHPASVIFTVPATTVKIVSLGGGCNMIQPVNAAVAQSPQTIPIATLLVNPTSFPCPLNQPLVASSVSPLIVSGNSVNLPIPSTPEDKAHMNVDIACAVADGENAFQGLEPKLEPQELSPLSATVFPKVEHSPGPPPVDKQCQEGLSENSAYRWTVVKTEEGRQALEPLPQGIQESLNNSSPGDLEEVVKMEPEDATEEISGFL

SEQ ID NO: 4738 - protein, 269 aa, Homo sapiens
MASEFKKKLFWRAVVAEFLATTLFVFISIGSALGFKYPVGNNQTAVQDNVKVSLAFGLSIATLAQSVGHISGAHLNPAVTLGLLLSCQISIFRALMYIIAQCVGAIVATAILSGITSSLTGNSLGRNDLADGVNSGQGLGIEIIGTLQLVLCVLATTDRRRRDLGGSAPLAIGLSVALGHLLAIDYTGCGINPARSFGSAVITHNFSNHWIFWVGPFIGGALAVLIYDFILAPRSSDLTDRVKVWTSGQVEEYDLDADDINSRVEMKPK

SEQ ID NO: 4739 - protein, 576 aa, Homo sapiens
MWAPRCRRFWSRWEQVAALLLLLLLLGVPPRSLALPPIRYSHAGICPNDMNPNLWVDAQSTCRRECETDQECETYEKCCPNVCGTKSCVAARYMDVKGKKGPVGMPKEATCDHFMCLQQGSECDIWDGQPVCKCKDRCEKEPSFTCASDGLTYYNRCYMDAEACSKGITLAVVTCRYHFTWPNTSPPPPETTMHPTTASPETPELDMAAPALLNNPVHQSVTMGETVSFLCDVVGRPRPEITWEKQLEDRENVVMRPNHVRGNVVVTNIAQLVIYNAQLQDAGIYTCTARNVAGVLRADFPLSVVRGHQAAATSESSPNGTAFPAAECLKPPDSEDCGEEQTRWHFDAQANNCLTFTFGHCHRNLNHFETYEACMLACMSGPLAACSLPALQGPCKAYAPRWAYNSQTGQCQSFVYGGCEGNGNNFESREACEESCPFPRGNQRCRACKPRQKLVTSFCRSDFVILGRVSELTEEPDSGRALVTVDEVLKDEKMGLKFLGQEPLEVTLLHVDWACPCPNVTVSEMPLIIMGEVDGGMAMLRPDSFVGASSARRVRKLREVMHKKTCDVLKEFLGLH

SEQ ID NO: 4740 - protein, 997 aa, Homo sapiens
MENAHTKTVEEVLGHFGVNESTGLSLEQVKKLKERWGSNELPAEEGKTLLELVIEQFEDLLVRILLLAACISFVLAWFEEGEETITAFVEPFVILLILVANAIVGVWQERNAENAIEALKEYEPEMGKVYRQDRKSVQRIKAKDIVPGDIVEIAVGDKVPADIRLTSIKSTTLRVDQSILTGESVSVIKHTDPVPDPRAVNQDKKNMLFSGTNIAAGKAMGVVVATGVNTEIGKIRDEMVATEQERTPLQQKLDEFGEQLSKVISLICIAVWIINIGHFNDPVHGGSWIRGAIYYFKIAVALAVAAIPEGLPAVITTCLALGTRRMAKKNAIVRSLPSVETLGCTSVICSDKTGTLTTNQMSVCRMFILDRVEGDTCSLNEFTITGSTYAPIGEVHKDDKPVNCHQYDGLVELATICALCNDSALDYNEAKGVYEKVGEATETALTCLVEKMNVFDTELKGLSKIERANACNSVIKQLMKKEFTLEFSRDRKSMSVYCTPNKPSRTSMSKMFVKGAPEGVIDRCTHIRVGSTKVPMTSGVKQKIMSVIREWGSGSDTLRCLALATHDNPLRREEMHLEDSANFIKYETNLTFVGCVGMLDPPRIEVASSVKLCRQAGIRVIMITGDNKGTAVAICRRIGIFGQDEDVTSKAFTGREFDELNPSAQRDACLNARCFARVEPSHKSKIVEFLQSFDEITAMTGDGVNDAPALKKAEIGIAMGSGTAVAKTASEMVLADDNFSTIVAAVEEGRAIYNNMKQFIRYLISSNVGEVVCIFLTAALGFPEALIPVQLLWVNLVTDGLPATALGFNPPDLDIMNKPPRNPKEPLISGWLFFRYLAIGCYVGAATVGAAAWWFIAADGGPRVSFYQLSHFLQCKEDNPDFEGVDCAIFESPYPMTMALSVLVTIEMCNALNSLSENQSLLRMPPWENIWLVGSICLSMSLHFLILYVEPLPLIFQITPLNVTQWLMVLKISLPVILMDETLKFVARNYLEPAILE

SEQ ID NO: 4741 - protein, 403 aa, Homo sapiens
MHNFEEELTCPICYSIFEDPRVLPCSHTFCRNCLENILQASGNFYIWRPLRIPLKCPNCRSITEIAPTGIESLPVNFALRAIIEKYQQEDHPDIVTCPEHYRQPLNVYCLLDKKLVCGHCLTIGQHHGHPIDDLQSAYLKEKDTPQKLLEQLTDTHWTDLTHLIEKLKEQKSHSEKMIQGDKEAVLQYFKELNDTLEQKKKSFLTALCDVGNLINQEYTPQIERMKEIREQQLELMALTISLQEESPLKFLEKVDDVRQHVQILKQRPLPEVQPVEIYPRVSKILKEEWSRTEIGQIKNVLIPKMKISPKRMSCSWPGKDEKEVEFLKILNIVVVTLISVILMSILFFNQHIITFLSEITLIWFSEASLSVYQSLSNSLHKVKNILCHIFYLLKEFVWKIVSH

SEQ ID NO: 4742 - protein, 289 aa, Homo sapiens
MILLQHAVLPPPKQPSPSPPMSVATRSTGTLQLPPQKPFGQEASLPLAGEEELSKGGEQDCALEELCKPLYCKLCNVTLNSAQQAQAHYQGKNHGKKLRNYYAANSCPPPARMSNVVEPAATPVVPVPPQMGSFKPGGRVILATENDYCKLCDASFSSPAVAQAHYQGKNHAKRLRLAEAQSNSFSESSELGQRRARKEGNEFKMMPNRRNMYTVQNNSAGPYFNPRSRQRIPRDLAMCVTPSGQFYCSMCNVGAGEEMEFRQHLESKQHKSKVSEQRYRNEMENLGYV

SEQ ID NO: 4743 - protein, 58 aa, Homo sapiens
MAGPESDAQYQFTGIKKYFNSYTLTGRMNCVLATYGSIALIVLYFKLRSKKTPAVKAT

SEQ ID NO: 4744 - protein, 199 aa, Homo sapiens
MYPATAVPQINITILKGEKGDRGDRGLQGKYGKTGSAGARGHTGPKGQKGSMGAPGERCKSHYAAFSVGRKKPMHSNHYYQTVIFDTEFVNLYDHFNMFTGKFYCYVPGLYFFSLNVHTWNQKETYLHIMKNEEEVVILFAQVGDRSIMQSQSLMLELREQDQVWVRLYKGERENAIFSEELDTYITFSGYLVKHATEP

SEQ ID NO: 4745 - protein, 663 aa, Homo sapiens
MAITLQPSDLIFEFASNGMDDDIHQLEDPSVFPAVIVEQVPYPDLLHLYSGLELDDVHNGIITDGTLCMTQDQILEGSFLLTDDNEATSHTMSTAEVLLNMESPSDILDEKQIFSTSEMLPDSDPAPAVTLPNYLFPASEPDALNRAGDTSDQEGHSLEEKASREESAKKTGKSKKRIRKTKGNRSTSPVTDPSIPIRKKSKDGKGSTIYLWEFLLALLQDRNTCPKYIKWTQREKGIFKLVDSKAVSKLWGKQKNKPDMNYETMGRALRYYYQRGILAKVEGQRLVYQFKEMPKDLVVIEDEDESSEATAAPPQASTASVASASTTRRTSSRVSSRSAPQGKGSSSWEKPKIQHVGLQPSASLELGPSLDEEIPTTSTMLVSPAEGQVKLTKAVSASSVPSNIHLGVAPVGSGSALTLQTIPLTTVLTNGPPASTTAPTQLVLQSVPAASTFKDTFTLQASFPLNASFQDSQVAAPGAPLILSGLPQLLAGANRPTNPAPPTVTGAGPAGPSSQPPGTVIAAFIRTSGTTAAPRVKEGPLRSSSYVQGMVTGAPMEGLLVPEETLRELLRDQAHLQPLPTQVVSRGSHNPSLLGNQTLSPPSRPTVGLTPVAELELSSGSGSLLMAEPSVTTSGSLLTRSPTPAPFSPFNPTSLIKMEPHDI

SEQ ID NO: 4746 - protein, 376 aa, Homo sapiens
MALTAHPSCLLALLVAGLAQGIRGPLRAQDLGPQPLELKEAFKLFQIQFNRSYLSPEEHAHRLDIFAHNLAQAQRLQEEDLGTAEFGVTPFSDLTEEEFGQLYGYRRAAGGVPSMGREIRSEEPEESVPFSCDWRKVASAISPIKDQKNCNCCWAMAAAGNIETLWRISFWDFVDVSVQELLDCGRCGDGCHGGFVWDAFITVLNNSGLASEKDYPFQGKVRAHRCHPKKYQKVAWIQDFIMLQNNEHRIAQYLATYGPITVTINMKPLQLYRKGVIKATPTTCDPQLVDHSVLLVGFGSVKSEEGIWAETVSSQSQPQPPHPTPYWILKNSWGAQWGEKGYFRLHRGSNTCGITKFPLTARVQKPDMKPRVSCPP

SEQ ID NO: 4747 - protein, 130 aa, Homo sapiens
MARRHCFSYWLLVCWLVVTVAEGQEEVFTPPGDSQNNADATDCQIFTLTPPPAPRSPVTRAQPITKTPRCPFHFFPRRPRIHFRFPNRPFVPSRCNHRFPFQPFYWPHRYLTYRYFPRRRLQRGSSSEES

SEQ ID NO: 4748 - protein, 194 aa, Homo sapiens
MSALWLLLGLLALMDLSESSNWGCYGNIQSLDTPGASCGIGRRHGLNYCGVRASERLAEIDMPYLLKYQPMMQTIGQKYCMDPAVIAGVLSRKSPGDKILVNMGDRTSMVQDPGSQAPTSWISESQVSQTTEVLTTRIKEIQRRFPTWTPDQYLRGGLCAYSGGAGYVRSSQDLSCDFCNDVLARAKYLKRHGF

SEQ ID NO: 4749 - protein, 1300 aa, Homo sapiens
MGTGPAQTPRSTRAGPEPSPAPPGPGDTGDSDVTQEGSGPAGIRGGETVIRAGMGDSPGRGAPERRHKAQPGRARKYEWRPEGPTSMGSLGQREDLQDEDRNSAFTWKVQANNRAYNGQFKEKVILCWQRKKYKTNVIRTAKYNFYSFLPLNLYEQFHRVSNLFFLIIIILQSIPDISTLPWFSLSTPMVCLLFIRATRDLVDDMGRHKSDRAINNRPCQILMGKSFKQKKWQDLCVGDVVCLRKDNIVPADMLLLASTEPSSLCYVETVDIDGETNLKFRQALMVTHKELATIKKMASFQGTVTCEAPNSRMHHFVGCLEWNDKKYSLDIGNLLLRGCRIRNTDTCYGLVIYAGFDTKIMKNCGKIHLKRTKLDLLMNKLVVVIFISVVLVCLVLAFGFGFSVKEFKDHHYYLSGVHGSSVAAESFFVFWSFLILLSVTIPMSMFILSEFIYLGNSVFIDWDVQMYYKPQDVPAKARSTSLNDHLGQVEYIFSDKTGTLTQNILTFNKCCISGRVYGPDSEATTRPKENPYLWNKFADGKLLFHNAALLHLVRTNGDEAVREFWRLLAICHTVMVRESPRERPDQLLYQAASPDEGALVTAARNFGYVFLSRTQDTVTIMELGEERVYQVLAIMDFNSTRKRMSVLVRKPEGAICLYTKGADTVIFERLHRRGAMEFATEEALAAFAQETLRTLCLAYREVAEDIYEDWQQRHQEASLLLQNRAQALQQLLGATAIEDRLQDGVPETIKCLKKSNIKIWVLTGDKQETAVNIGFACELLSENMLILEEKEISRILETYWENSNNLLTRESLSQVKLALVINGDFLDKLLVSLRKEPRALAQNVNMDEAWQELGQSRRDFLYARRLSLLCRRFGLPLAAPPAQDSRARRSSEVLQERAFVDLASKCQAVICCRVTPKQKALIVALVKKYHQVVTLAIGDGANDINMIKTADVGVGLAGQEGMQAVQNSDFVLGQFCFLQRLLLVHGRWSYVRICKFLRYFFYKSMASMMVQVWFACYNGFTGQPLYEGWFLALFNLLYSTLPVLYIGLFEQDVSAEQSLEKPELYVVGQKDELFNYWVFVQAIAHGVTTSLVNFFMTLWISRDTAGPASFSDHQSFAVVVALSCLLSITMEVILIIKYWTALCVATILLSLGFYAIMTTTTQSFWLFRVSPTTFPFLYADLSVMSSPSILLVVLLSVSINTFPVLALRVIFPALKELRAKEEKVEEGPSEEIFTMEPLPHVHRESRARRSSYAFSHREGYANLITQGTILRRGPGVSSDIASESLDPSDEEAASSPKESQ

SEQ ID NO: 4750 - protein, 667 aa, Homo sapiens
MAGASELGTGPGAAGGDGDDSLYPIAVLIDELRNEDVQLRLNSIKKLSTIALALGVERTRSELLPFLTDTIYDEDEVLLALAEQLGNFTGLVGGPDFAHCLLPPLENLATVEETVVRDKAVESLRQISQEHTPVALEAYFVPLVKRLASGDWFTSRTSACGLFSVCYPRASNAVKAEIRQQFRSLCSDDTPMVRRAAASKLGEFAKVLELDSVKSEIVPLFTSLASDEQDSVRLLAVEACVSIAQLLSQDDLETLVMPTLRQAAEDKSWRVRYMVADRFSELQKAMGPKITLNDLIPAFQNLLKDCEAEVRAAAAHKVKELGENLPIEDRETIIMNQILPYIKELVSDTNQHVKSALASVIMGLSTILGKENTIEHLLPLFLAQLKDECPDVRLNIISNLDCVNEVIGIRQLSQSLLPAIVELAEDAKWRVRLAIIEYMPLLAGQLGVEFFDEKLNSLCMAWLVDHVYAIREAATNNLMKLVQKFGTEWAQNTIVPKVLVMANDPNYLHRMTTLFCINALSEACGQEITTKQMLPIVLKMAGDQVANVRFNVAKSLQKIGPILDTNALQGEVKPVLQKLGQDEDMDVKYFAQEAISVVAQRLRKLEFPVKDSGEPSVPRADKNHFPRPTVPGEDMGKGPVYQLRGDTRDTLAQLGIAELVHFSQSTD

SEQ ID NO: 4751 - protein, 90 aa, Homo sapiens
MKFLAVLVLLGVSIFLVSAQNPTTAAPADTYPATGPADDEAPDAETTAAATTATTAAPTTATTAASTTARKDIPVLPKWVGDLPNGRVCP

SEQ ID NO: 4752 - protein, 154 aa, Homo sapiens
MAPARAGCCPLLLLLLGLWVAEVLVRAKPKDMTSSQWFKTQHVQPSPQACNSAMSIINKYTERCKDLNTFLHEPFSSVAITCQTPNIACKNSCKNCHQSHGPMSLTMGELTSGKYPNCRYKEKHLNTPYIVACDPPQQGDPGYPLVPVHLDKVV

SEQ ID NO: 4753 - protein, 297 aa, Homo sapiens
MGTALDIKIKRANKVYHAGEVLSGVVVISSKDSVQHQGVSLTMEGTVNLQLSAKSVGVFEAFYNSVKPIQIINSTIEMVKPGKFPSGKTEIPFEFPLHLKGNKVLYETYHGVFVNIQYTLRCDMKRSLLAKDLTKTCEFIVHSAPQKGKFTPSPVDFTITPETLQNVKERALLPKFLLRGHLNSTNCVITQPLTGELVVESSEAAIRSVELQLVRVETCGCAEGYARDATEIQNIQIADGDVCRGLSVPIYMVFPRLFTCPTLETTNFKVEFEVNIVVLLHPDHLITENFPLKLCRI

SEQ ID NO: 4754 - protein, 608 aa, Homo sapiens
MALRGPAGLGPGSRRPLDEAVAGAEGREAPALVAAGGAPEDDEEDDGRGRGLLRWDSFSAWLHCVCVVGFDLELGQAVEVIYPQHSKLTDREKTNICYLSFPDSNSGCLGDTQFCFRFRQSSGRRVSLHCLLDQFDKDLPVYLKKDPAYFYGYVYFRQVRDKTLKRGYFQKSLVLISKLPYIHFFHTVLKQIAPEYFEKNEPYLEAACNDVDRWPAPVPGKTLHLPIMGVVMKVRIPTCHDKPGTTQIVQLTQQVDTNISVILPTVHEVDIFRCFCPVFLHSQMLWELVLLGEPLVVMAPSPSESSETVLALVNCISPLKYFSDFRPYFTIHDSEFKEYTTRTQAPPSVILGVTNPFFAKTLQHWPHIIRIGDLKPTGEIPKQVKVKKLKNLKTLDSKPGVYTSYKPYLNRDEEIIKQLQKGVQQKRPSEAQSVILRRYFLELTQSFIIPLERYVASLMPLQKSISPWKSPPQLRQFLPEEFMKTLEKTGPQLTSRIKGDWIGLYRHFLKSPNFDGWFKTRRKEMTQKLEALHLEALCEEDLLLWIQKHTEVETVDLVLKLKNKLLQADREHLPVKPDTMEKLRTHIDAIILALPEDLQGILLKTGMT

SEQ ID NO: 4755 - protein, 1168 aa, Homo sapiens
MSWFSGLLVPKVDERKTAWGERNGQKRSRRRGTRAGGFCTPRYMSCLRDAEPPSPTPAGPPRCPWQDDAFIRRGGPGKGKELGLRAVALGFEDTEVTTTAGGTAEVAPDAVPRSGRSCWRRLVQVFQSKQFRSAKLERLYQRYFFQMNQSSLTLLMAVLVLLTAVLLAFHAAPARPQPAYVALLACAAALFVGLMVVCNRHSFRQDSMWVVSYVVLGILAAVQVGGALAADPRSPSAGLWCPVFFVYIAYTLLPIRMRAAVLSGLGLSTLHLILAWQLNRGDAFLWKQLGANVLLFLCTNVIGICTHYPAEVSQRQAFQETRGYIQARLHLQHENRQQERLLLSVLPQHVAMEMKEDINTKKEDMMFHKIYIQKHDNVSILFADIEGFTSLASQCTAQELVMTLNELFARFDKLAAENHCLRIKILGDCYYCVSGLPEARADHAHCCVEMGVDMIEAISLVREVTGVNVNMRVGIHSGRVHCGVLGLRKWQFDVWSNDVTLANHMEAGGRAGRIHITRATLQYLNGDYEVEPGRGGERNAYLKEQHIETFLILGASQKRKEEKAMLAKLQRTRANSMEGLMPRWVPDRAFSRTKDSKAFRQMGIDDSSKDNRGTQDALNPEDEVDEFLSRAIDARSIDQLRKDHVRRFLLTFQREDLEKKYSRKVDPRFGAYVACALLVFCFICFIQLLIFPHSTLMLGIYASIFLLLLITVLICAVYSCGSLFPKALQRLSRSIVRSRAHSTAVGIFSVLLVFTSAIANMFTCNHTPIRSCAARMLNLTPADITACHLQQLNYSLGLDAPLCEGTMPTCSFPEYFIGNMLLSLLASSVFLHISSIGKLAMIFVLGLIYLVLLLLGPPATIFDNYDLLLGVHGLASSNETFDGLDCPAAGRVALKYMTPVILLVFALALYLHAQQVESTARLDFLWKLQATGEKEEMEELQAYNRRLLHNILPKDVAAHFLARERRNDELYYQSCECVAVMFASIANFSEFYVELEANNEGVECLRLLNEIIADFDEIISEERFRQLEKIKTIGSTYMAASGLNASTYDQVGRSHITALADYAMRLMEQMKHINEHSFNNFQMKIGLNMGPVVAGVIGARKPQYDIWGNTVNVSSRMDSTGVPDRIQVTTDLYQVLAAKGYQLECRGVVKVKGKGEMTTYFLNGGPSS

SEQ ID NO: 4756 - protein, 574 aa, Homo sapiens
MALKGRALYDFHSENKEEISIQQDEDLVIFSETSLDGWLQGQNSRGETGLFPASYVEIVRSGISTNHADYSSSPAGSPGAQVSLYNSPSVASPARSGGGSGFLSNQGSFEEDDDDDWDDWDDGCTVVEEPRAGGLGTNGHPPLNLSYPGAYPSQHMAFRPKPPLERQDSLASAKRGSVVGRNLNRFSCFVRSGVEAFILGDVPMMAKIAETYSIEMGPRGPQWKANPHPFACSVEDPTKQTKFKGIKSYISYKLTPTHAASPVYRRYKHFDWLYNRLLHKFTVISVPHLPEKQATGRFEEDFIEKRKRRLILWMDHMTSHPVLSQYEGFQHFLSCLDDKQWKMGKRRAEKDEMVGASFLLTFQIPTEHQDLQDVEDRVDTFKAFSKKMDDSVLQLSTVASELVRKHVGGFRKEFQKLGSAFQAISHSFQMDPPFCSEALNSAISHTGRTYEAIGEMFAEQPKNDLFQMLDTLSLYQGLLSNFPDIIHLQKGAFAKVKESQRMSDEGRMVQDEADGIRRRCRVVGFALQAEMNHFHQRRELDFKHMMQNYLRQQILFYQRVGQQLEKTLRMYDNL

SEQ ID NO: 4757 - protein, 427 aa, Homo sapiens [sequence omitted]

SEQ ID NO: 4758 - protein, 208 aa, Homo sapiens
MSTGGDFGNPLRKFKLVFLGEQSVGKTSLITRFMYDSFDNTYQATIGIDFLSKTMYLEDRTIRLQLWDTAGQERFRSLIPSYIRDSAAAVVVYDITNVNSFQQTTKWIDDVRTERGSDVIIMLVGNKTDLADKRQVSIEEGERKAKELNVMFIETSAKAGYNVKQLFRRVAAALPGMESTQDRSREDMIDIKLEKPQEQPVSEGGCSC

SEQ ID NO: 4759 - protein, 829 aa, Homo sapiens
MGCAPSIHISERLVAEDAPSPAAPPLSSGGPRLPQGQKTAALPRTRGAGLLESELRDGSGKKVAVADVQFGPMRFHQDQLQVLLVFTKEDNQCNGFCRACEKAGFKCTVTKEAQAVLACFLDKHHDIIIIDHRNPRQLDAEALCRSIRSSKLSENTVIVGVVRRVDREELSVMPFISAGFTRRYVENPNIMACYNELLQLEFGEVRSQLKLRACNSVFTALENSEDAIEITSEDRFIQYANPAFETTMGYQSGELIGKELGEVPINEKKADLLDTINSCIRIGKEWQGIYYAKKKNGDNIQQNVKIIPVIGQGGKIRHYVSIIRVCNGNNKAEKISECVQSDTHTDNQTGKHKDRRKGSLDVKAVASRATEVSSQRRHSSMARIHSMTIEAPITKVINIINAAQESSPMPVTEALDRVLEILRTTELYSPQFGAKDDDPHANDLVGGLMSDGLRRLSGNEYVLSTKNTQMVSSNIITPISLDDVPPRIARAMENEEYWDFDIFELEAATHNRPLIYLGLKMFARFGICEFLHCSESTLRSWLQIIEANYHSSNPYHNSTHSADVLHATAYFLSKERIKETLDPIDEVAALIAATIHDVDHPGRTNSFLCNAGSELAILYNDTAVLESHHAALAFQLTTGDDKCNIFKNMERNDYRTLRQGIIDMVLATEMTKHFEHVNKFVNSINKPLATLEENGETDKNQEVINTMLRTPENRTLIKRMLIKCADVSNPCRPLQYCIEWAARISEEYFSQTDEEKQQGLPVVMPVFDRNTCSIPKSQISFIDYFITDMFDAWDAFVDLPDLMQHLDNNFKYWKGLDEMKLRNLRPPPE

SEQ ID NO: 4760 - protein, 218 aa, Homo sapiens
MPMILGYWDIRGLAHAIRLLLEYTDSSYEEKKYTMGDAPDYDRSQWLNEKFKLGLDFPNLPYLIDGAHKITQSNAILCYIARKHNLCGETEEEKIRVDILENQTMDNHMQLGMICYNPEFEKLKPKYLEELPEKLKLYSEFLGKRPWFAGNKITFVDFLVYDVLDLHRIFEPKCLDAFPNLKDFISRFEGLEKISAYMKSSRFLPRPVFSKMAVWGNK

SEQ ID NO: 4761 - protein, 158 aa, Homo sapiens
MAAQGVGPGPGSAAPPGLEAARQKLALRRKKVLSTEEMELYELAQAAGGGIDPDVFKILVDLLKLNVAPLAVFQMLKSMCAGQRLASEPQDPAAVSLPTSSVPETRGRDKGSAALGGVLALAERSNHEGSSQRMPRQPSATRLPKGGGPGKSPTQGST

SEQ ID NO: 4762 - protein, 1381 aa, Homo sapiens
MASPRASRWPPPLLLLLLPLLLLPPAAPGTRDPPPSPARRALSLAPLAGAGLELQLERRPEREPPPTPPRERRGPATPGPSYRAPEPGAATQRGPSGRAPRGGSADAAWKHWPESNTEAHVENITFYQNQEDFSTVSSKEGVMVQTSGKSHAASDAPENLTLLAETADARGRSGSSSRTNFTILPVGYSLEIATALTSQSGNLASESLHLPSSSSEFDERIAAFQTKSGTASEMGTERAMGLSEEWTVHSQEATTSAWSPSFLPALEMGELTTPSRKRNSSGPDLSWLHFYRTAASSPLLDLSSSSESTEKLNNSTGLQSSSVSQTKTMHVATVFTDGGPRTLRSLTVSLGPVSKTEGFPKDSRIATTSSSVLLSPSAVESRRNSRVTGNPGDEEFIEPSTENEFGLTSLRWQNDSPTFGEHQLASSSEVQNGSPMSQTETVSRSVAPMRGGEITAHWLLTNSTTSADVTGSSASYPEGVNASVLTQFSDSTVQSGGSHTALGDRSYSESSSTSSSESLNSSAPRGERSIAGISYGQVRGTAIEQRTSSDHTDHTYLSSTFTKGERALLSITDNSSSSDIVESSTSYIKISNSSHSEYSSFFHAQTERSNISSYDGEYAQPSTESPVLHTSNLPSYTPTINMPNTSVVLDTDAEFVSDSSSSSSSSSSSSSSGPPLPLPSVSQSHHLFSSILPSTRASVHLLKSTSDASTPWSSSPSPLPVSLTTSTSAPLSVSQTTLPQSSSTPVLPRARETPVTSFQTSTMTSFMTMLHSSQTADLKSQSTPHQEKVITESKSPSLVSLPTESTKAVTTNSPLPPSLTESSTEQTLPATSTNLAQMSPTFTTTILKTSQPLMTTPGTLSSTASLVTGPIAVQTTAGKQLSLTHPEILVPQISTEGGISTERNRVIVDATTGLIPLTSVPTSAKEMTTKLGVTAEYSPASRSLGTSPSPQTTVVSTAEDLAPKSATFAVQSSTQSPTTVSSSASVNSCAVNPCLHNGECVADNTSRGYHCRCPPSWQGDDCSVDVNECLSNPCPSTAMCNNTQGSFICKCPVGYQLEKGICNLVRTFVTEFKLKRTFLNTTVEKHSDLQEVENEITKTLNMCFSALPSYIRSTVHASRESNAVVISLQTTFSLASNVTLFDLADRMQKCVNSCKSSAEVCQLLGSQRRIFRAGSLCKRKSPECDKDTSICTDLDGVALCQCKSGYFQFNKMDHSCRACEDGYRLENETCMSCPFGLGGLNCGNPYQLITVVIAAAGGGLLLILGIALIVTCCRKNKNDISKLIFKSGDFQMSPYAEYPKNPRSQEWGREAIEMHENGSTKNLLQMTDVYYSPTSVRNPELERNGLYPAYTGLPGSRHSCIFPGQYNPSFISDESRRRDYF

SEQ ID NO: 4763 - protein, 598 aa, Homo sapiens
MKPTGTDPRILSIAAEVAKSPEQNVPVILLKLKEIINITPLGSSELKKIKQDIYCYDLIQYCLLVLSQDYSRIQGGWTTISQLTQILSHCCVGLEPGEDAEEFYNELLPSAAENFLVLGRQLQTCFINAAKAEEKDELLHFFQIVTDSLFWLLGGHVELIQNVLQSDHFLHLLQADNVQIGSAVMMMLQNILQINSGDLLRIGRKALYSILDEVIFKLFSTPSPVIRSTATKLLLLMAESHQEILILLRQSTCYKGLRRLLSKQETGTEFSQELRQLVGLLSPMVYQEVEEQKLHQAACLIQAYWKGFQTRKRLKKLPSAVIALQRSFRSKRSKMLLEINRQKEEEDLKLQLQLQRQRAMRLSRELQLSMLEIVHPGQVEKHYREMEEKSALIIQKHWRGYRERKNFHQQRQSLIEYKAAVTLQRAALKFLAKCRKKKKLFAPWRGLQELTDARRVELKKRVDDYVRRHLGSPMSDVVSRELHAQAQERLQHYFMGRALEERAQQHREALIAQISTNVEQLMKAPSLKEAEGKEPELFLSRSRPVAAKAKQAHLTTLKHIQAPWWKKLGEESGDEIDVPKDELSIELENLFIGGTKPP

SEQ ID NO: 4764 - protein, 529 aa, Homo sapiens
MRRNSSLSFQMERPLEEQVQSKWSSSQGRTGTGGSDVLQMQNSEHHGQSIKTQTDSISLEDVAVNFTLEEWALLDPGQRNIYRDVMRATFKNLACIGEKWKDQDIEDEHKNQGRNLRSPMVEALCENKEDCPCGKSTSQIPDLNTNLETPTGLKPCDCSVCGEVFMHQVSLNRHMRSHTEQKPNECHEYGEKPHKCKECGKTFTRSSSIRTHERIHTGEKPYECKECGKAFAFLFSFRNHIRIHTGETPYECKECGKAFRYLTALRRHEKNHTGEKPYKCKQCGKAFIYYQPFLTHERTHTGEKPYECKQCGKAFSCPTYLRSHEKTHTGEKPFVCRECGRAFFSHSSLRKHVKTHTGVQPYTCKKCGEAFKSSSSCEVHERTHFGEKPYECKQCGKAFNSSSYLQLHERVHTGEKTYECKECGKAFLYSTHFRIHERTHTREKPYECKQCGRVFIYFSHLRRHERSHTGVKPCECKQCGKAFTCLNSLKVHKRIHTGERPFQCRQCGKAFSYSKSLHVHERTHSRQKP

SEQ ID NO: 4765 - protein, 886 aa, Homo sapiens
MRGFNLLLFWGCCVMHSWEGHIRPTRKPNTKGNNCRDSTLCPAYATCTNTVDSYYCACKQGFLSSNGQNHFKDPGVRCKDIDECSQSPQPCGPNSSCKNLSGRYKCSCLDGFSSPTGNDWVPGKPGNFSCTDINECLTSSVCPEHSDCVNSMGSYSCSCQVGFISRNSTCEDVDECADPRACPEHATCNNTVGNYSCFCNPGFESSSGHLSFQGLKASCEDIDECTEMCPINSTCTNTPGSYFCTCHPGFAPSNGQLNFTDQGVECRDIDECRQDPSTCGPNSICTNALGSYSCGCIAGFHPNPEGSQKDGNFSCQRVLFKCKEDVIPDNKQIQQCQEGTAVKPAYVSFCAQINNIFSVLDKVCENKTTVVSLKNTTESFVPVLKQISTWTKFTKEETSSLATVFLESVESMTLASFWKPSANITPAVRTEYLDIESKVINKECSEENVTLDLVAKGDKMKIGCSTIEESESTETTGVAFVSFVGMESVLNERFFKDHQAPLTTSEIKLKMNSRVVGGIMTGEKKDGFSDPIIYTLENIQPKQKFERPICVSWSTDVKGGRWTSFGCVILEASETYTICSCNQMANLAVIMASGELTMDFSLYIISHVGIIISLVCLVLAIATFLLCRSIRNHNTYLHLHLCVCLLLAKTLFLAGIHKTDNKMGCAIIAGFLHYLFLACFFWMLVEAVILFLMVRNLKVVNYFSSRNIKMLHICAFGYGLPMLVVVISASVQPQGYGMHNRCWLNTETGFIWSFLGPVCTVIVINSLLLTWTLWILRQRLSSVNAEVSTLKDTRLLTFKAFAQLFILGCSWVLGIFQIGPVAGVMAYLFTIINSLQGAFIFLIHCLLNGQVREEYKRWITGKTKPSSQSQTSRILLSSMPSASKTG

SEQ ID NO: 4766 - protein, 329 aa, Homo sapiens
MVRTKTWTLKKHFVGYPTNSDFELKTAELPPLKNGEVLLEALFLTVDPYMRVAAKRLKEGDTMMGQQVAKVVESKNVALPKGTIVLASPGWTTHSISDGKDLEKLLTEWPDTIPLSLALGTVGMPGLTAYFGLLEICGVKGGETVMVNAAAGAVGSVVGQIAKLKGCKVVGAVGSDEKVAYLQKLGFDVVFNYKTVESLEETLKKASPDGYDCYFDNVGGEFSNTVIGQMKKFGRIAICGAISTYNRTGPLPPGPPPEIVIYQELRMEAFVVYRWQGDARQKALKDLLKWVLEGKIQYKEYIIEGFENMPAAFMGMLKGDNLGKTIVKA

SEQ ID NO: 4767 - protein, 1327 aa, Homo sapiens
MAASRRSQHHHHHHQQQLQPAPGASAPPPPPPPPLSPGLAPGTTPASPTASGLAPFASPRHGLALPEGDGSRDPPDRPRSPDPVDGTSCCSTTSTICTVAAAPVVPAVSTSSAAGVAPNPAGSGSNNSPSSSSSPTSSSSSSPSSPGSSLAESPEAAGVSSTAPLGPGAAGPGTGVPAVSGALRELLEACRNGDVSRVKRLVDAANVNAKDMAGRKSSPLHFAAGFGRKDVVEHLLQMGANVHARDDGGLIPLHNACSFGHAEVVSLLLCQGADPNARDNWNYTPLHEAAIKGKIDVCIVLLQHGADPNIRNTDGKSALDLADPSAKAVLTGEYKKDELLEAARSGNEEKLMALLTPLNVNCHASDGRKSTPLHLAAGYNRVRIVQLLLQHGADVHAKDKGGLVPLHNACSYGHYEVTELLLKHGACVNAMDLWQFTPLHEAASKNRVEVCSLLLSHGADPTLVNCHGKSAVDMAPTPELRERLTYEFKGHSLLQAAREADLAKVKKTLALEIINFKQPQSHETALHCAVASLHPKRKQVTELLLRKGANVNEKNKDFMTPLHVAAERAHNDVMEVLHKHGAKMNALDTLGQTALHRAALAGHLQTCRLLLSYGSDPSIISLQGFTAAQMGNEAVQQILSESTPIRTSDVDYRLLEASKAGDLETVKQLCSSQNVNCRDLEGRHSTPLHFAAGYNRVSVVEYLLHHGADVHAKDKGGLVPLHNACSYGHYEVAELLVRHGASVNVADLWKFTPLHEAAAKGKYEICKLLLKHGADPTKKNRDGNTPLDLVKEGDTDIQDLLRGDAALLDAAKKGCLARVQKLCTPENINCRDTQGRNSTPLHLAAGYNNLEVAEYLLEHGADVNAQDKGGLIPLHNAASYGHVDIAALLIKYNTCVNATDKWAFTPLHEAAQKGRTQLCALLLAHGADPTMKNQEGQTPLDLATADDIRALLIDAMPPEALPTCFKPQATVVSASLISPASTPSCLSAASSIDNLTGPLAELAVGGASNAGDGAAGTERKEGEVAGLDMNISQFLKSLGLEHLRDIFETEQITLDVLADMGHEELKEIGINAYGHRHKLIKGVERLLGGQQGTNPYLTFHCVNQGTILLDLAPEDKEYQSVEEEMQSTIREHRDGGNAGGIFNRYNVIRIQKVVNKKLRERFCHRQKEVSEENHNHHNERMLFHGSPFINAIIHKGFDERHAYIGGMFGAGIYFAENSSKSNQYVYGIGGGTGCPTHKDRSCYICHRQMLFCRVTLGKSFLQFSTMKMAHAPPGHHSVIGRPSVNGLAYAEYVIYRGEQAYPEYLITYQIMKPEAPSQTATAAEQKT

SEQ ID NO: 4768 - protein, 642 aa, Homo sapiens
MEEERKTAELQKNRIQDSVVFEDVAVDFTQEEWALLDLAQRNLYRDVMLENFQNLASLGYPLHTPHLISQWEQEEDLQTVKRELIQGIFMGEHREGFETQLKTNESVASQDICGEKISNEQKIVRFKRNDSWFSSLHENQESCGIDYQNKSHERHLRNHMVENIYECYEENQDGQTFSQVPNLDSLKRNTEVKSCECHECGKAFVDHSSLKSHIRSHTGSKPYQCKECGKAFHFLACFKKHMKTPTEEKPYECKECTKAFSCSSFFRAHMKIHIGKTNYECKECGKGFSCSSSLTEHKRIHSGDKPYECKECGKAFSCSSSLSKHKRIHSGDKPYECKECGKAFSSSSHLIIHIRIHTGEKPYECKECGKAFSESSKLTVHGRTHTGEKPYKCKECGKAYNCPSSLSIHMRKHTGEKPYECLECGKAFYLPTSLNTHVKNQSREKPYECKECGKAFSCPSSFRAHVRDHTGKIQYECKECGKTFSRSSSLTEHLRTHSGEKPYECKECGKAFISSSHLTVHIRTHTGEKPYECKKCGKAFIYPSALRIHMRTHTGEKPYECKECGKAFRHSSYLTVHARMHTGEKPFECLECGKAFSCPSSFRRHVRSHTGEKPYECKECGKAFVCPAYFRRHVKTHTRENI

SEQ ID NO: 4769 - protein, 268 aa, Homo sapiens
MKENVASATVFTLLLFLNTCLLNGQLPPGKPEIFKCRSPNKETFTCWWRPGTDGGLPTNYSLTYHREGETLMHECPDYITGGPNSCHFGKQYTSMWRTYIMMVNATNQMGSSFSDELYVDVTYIVQPDPPLELAVEVKQPEDRKPYLWIKWSPPTLIDLKTGWFTLLYEIRLKPEKAAEWEIHFAGQQTEFKILSLHPGQKYLVQVRCKPDHGYWSAWSPATFIQIPSGDPLMLGASHYKNLKSYRPRKISSQGRLAVFTKATLTTVQ

SEQ ID NO: 4770 - protein, 757 aa, Homo sapiens
MSENSSDSDSSCGWTVISHEGSDIEMLNSVTPTDSCEPAPECSSLEQEELQALQIEQGESSQNGTVLMEETAYPALEETSSTIEAEEQKIPEDSIYIGTASDDSDIVTLEPPKLEEIGNQEVVIVEEAQSSEDFNMGSSSSSQYTFCQPETVFSSQPSDDESSSDETSNQPSPAFRRRRARKKTVSASESEDRLVAEQETEPSKELSKRQFSSGLNKCVILALVIAISMGFGHFYGTIQIQKRQQLVRKIHEDELNDMKDYLSQCQQEQESFIDYKSLKENLARCWTLTEAEKMSFETQKTNLATENQYLRVSLEKEEKALSSLQEELNKLREQIRILEDKGTSTELVKENQKLKQHLEEEKQKKHSFLSQRETLLTEAKMLKRELERERLVTTALRGELQQLSGSQLHGKSDSPNVYTEKKEIAILRERLTELERKLTFEQQRSDLWERLYVEAKDQNGKQGTDGKKKGGRGSHRAKNKSKETFLGSVKETFDAMKNSTKEFVRHHKEKIKQAKEAVKENLKKFSDSVKSTFRHFKDTTKNIFDEKGNKRFGATKEAAEKPRTVFSDYLHPQYKAPTENHHNRGPTMQNDGRKEKPVHFKEFRKNTNSKKCSPGHDCRENSHSFRKACSGVFDCAQQESMSLFNTVVNPIRMDEFRQIIQRYMLKELDTFCHWNELDQFINKFFLNGVFIHDQKLFTDFVNDVKDYLRNMKEYEVDNDGVFEKLDEYIYRHFFGHTFSPPYGPRSVYIKPCHYSSL

SEQ ID NO: 4771 - protein, 392 aa, Homo sapiens
MAAPLRIQSDWAQALRKDEGEAWLSCHPPGKPSLYGSLTCQGIGLDGIPEVTASEGFTVNEINKKSIHISCPKENASSKFLAPYTTFSRIHTKSITCLDISSRGGLGVSSSTDGTMKIWQASNGELRRVLEGHVFDVNCCRFFPSGLVVLSGGMDAQLKIWSAEDASCVVTFKGHKGGILDTAIVDRGRNVVSASRDGTARLWDCGRSACLGVLADCGSSINGVAVGAADNSINLGSPEQMPSEREVGTEAKMLLLAREDKKLQCLGLQSRQLVFLFIGSDAFNCCTFLSGFLLLAGTQDGNIYQLDVRSPRAPVQVIHRSGAPVLSLLSVRDGFIASQGDGSCFIVQQDLDYVTELTGADCDPVYKVATWEKQIYTCCRDGLVRRYQLSDL

SEQ ID NO: 4772 - protein, 351 aa, Homo sapiens
MAAAANSGSSLPLFDCPTWAGKPPPGLHLDVVKGDKLIEKLIIDEKKYYLFGRNPDLCDFTIDHQSCSRVHAALVYHKHLKRVFLIDLNSTHGTFLGHIRLEPHKPQQIPIDSTVSFGASTRAYTLREKPQTLPSAVKGDEKMGGEDDELKGLLGLPEEETELDNLTEFNTAHNKRISTLTIEEGNLDIQRPKRKRKNSRVTFSEDDEIINPEDVDPSVGRFRNMVQTAVVPVKKKRVEGPGSLGLEESGSRRMQNFAFSGGLYGGLPPTHSEAGSQPHGIHGTALIGGLPMPYPNLAPDVDLTPVVPSAVNMNPAPNPAVYNPEAVNEPKKKKYAKEAWPGKKPTPSLLI

SEQ ID NO: 4773 - protein, 202 aa, Homo sapiens
MEAEAGGLEELTDEEMAALGKEELVRRLRREEAARLAALVQRGRLMQEVNRQLQGHLGEIRELKQLNRRLQAENRELRDLCCFLDSERQRGRRAARQWQLFGTQASRAVREDLGGCWQKLAELEGRQEELLRENLALKELCLALGEEWGPRGGPSGAGGSGAGPAPELALPPCGPRDLGDGSSSTGSVGSPDQLPLACSPDD

SEQ ID NO: 4774 - protein, 268 aa, Homo sapiens
MSLSFLLLLFFSHLILSAWAHGEKRLAPKGQPGPAATDRNPRGSSSRQSSSSAMSSSSASSSPAASLGSQGSGLEQSSFQWSPSGRRTGSLYCRVGIGFHLQIYPDGKVNGSHEANMLSVLEIFAVSQGIVGIRGVFSNKFLAMSKKGKLHASAKFTDDCKFRERFQENSYNTYASAIHRTEKTGREWYVALNKRGKAKRGCSPRVKPQHISTHFLPRFKQSEQPELSFTVTVPEKKKPPSPIKPKIPLSAPRKNTNSVKYRLKFRFG

SEQ ID NO: 4775 - protein, 337 aa, Homo sapiens
MGPRARPALLLLMLLQTAVLQGRLLRSHSLHYLFMGASEQDLGLSLFEALGYVDDQLFVFYDHESRRVEPRTPWVSSRISSQMWLQLSQSLKGWDHMFTVDFWTIMENHNHSKESHTLQVILGCEMQEDNSTEGYWKYGYDGQDHLEFCPDTLDWRAAEPRAWPTKLEWERHKIRARQNRAYLERDCPAQLQQLLELGRGVLDQQVPPLVKVTHHVTSSVTTLRCRALNYYPQNITMKWLKDKQPMDAKEFEPKDVLPNGDGTYQGWITLAVPPGEEQRYTCQVEHPGLDQPLIVIWEPSPSGTLVIGVISGIAVFVVILFIGILFIILRKRQGSSF

SEQ ID NO: 4776 - protein, 527 aa, Homo sapiens
MSEDSSALPWSINRDDYELQEVIGSGATAVVQAAYCAPKKEKVAIKRINLEKCQTSMDELLKEIQAMSQCHHPNIVSYYTSFVVKDELWLVMKLLSGGSVLDIIKHIVAKGEHKSGVLDESTIATILREVLEGLEYLHKNGQIHRDVKAGNILLGEDGSVQIADFGVSAFLATGGDITRNKVRKTFVGTPCWMAPEVMEQVRGYDFKADIWSFGITAIELATGAAPYHKYPPMKVLMLTLQNDPPSLETGVQDKEMLKKYGKSFRKMISLCLQKDPEKRPTAAELLRHKFFQKAKNKEFLQEKTLQRAPTISERAKKVRRVPGSSGRLHKTEDGGWEWSDDEFDEESEEGKAAISQLRSPRVKESISNSELFPTTDPVGTLLQVPEQISAHLPQPAGQIATQPTQVSLPPTAEPAKTAQALSSGSGSQETKIPISLVLRLRNSKKELNDIRFEFTPGRDTAEGVSQELISAGLVDGRDLVIVAANLQKIVEEPQSNRSVTFKLASGVEGSDIPDDGKLIGFAQLSIS

SEQ ID NO: 4777 - protein, 141 aa, Homo sapiens
MAPKVFRQYWDIPDGTDCHRKAYSTTSIASVAGLTAAAYRVTLNPPGTFLEGVAKVGQYTFTAAAVGAVFGLTTCISAHVREKPDDPLNYFLGGCAGGLTLGARTHNYGIGAAACVYFGIAASLVKMGRLEGWEVFAKPKV

SEQ ID NO: 4778 - protein, 669 aa, Homo sapiens
MKIFVGNVDGADTTPEELAALFAPYGTVMSCAVMKQFAFVHMRENAGALRAIEALHGHELRPGRALVVEMSRPRPLNTWKIFVGNVSAACTSQELRSLFERRGRVIECDVVKDYAFVHMEKEADAKAAIAQLNGKEVKGKRINVELSTKGQKKGPGLAVQSGDKTKKPGAGDTAFPGTGGFSATFDYQQAFGNSTGGFDGQARQPTPPFFGRDRSPLRRSPPRASYVAPLTAQPATYRAQPSVSLGAAYRAQPSASLGVGYRTQPMTAQAASYRAQPSVSLGAPYRGQLASPSSQSAAASSLGPYGGAQPSASALSSYGGQAAAASSLNSYGAQGSSLASYGNQPSSYGAQAASSYGVRAAASSYNTQGAASSLGSYGAQAASYGAQSAASSLAYGAQAASYNAQPSASYNAQSAPYAAQQAASYSSQPAAYVAQPATAAAYASQPAAYAAQATTPMAGSYGAQPVVQTQLNSYGAQASMGLSGSYGAQSAAAATGSYGAAAAYGAQPSATLAAPYRTQSSASLAASYAAQQHPQAAASYRGQPGNAYDGAGQPSAAYLSMSQGAVANANSTPPPYERTRLSPPRASYDDPYKKAVAMSKRYGSDRRLAELSDYRRLSESQLSFRRSPTKSSLDYRRLPDAHSDYARYSGSYNDYLRAAQMHSGYQRRM

SEQ ID NO: 4779 - protein, 975 aa, Homo sapiens
MRLGSGTFATCCVAIEVLGIAVFLRGFFPAPVRSSARAEHGAEPPAPEPSAGASSNWTTLPPPLFSKVVIVLIDALRDDFVFGSKGVKFMPYTTYLVEKGASHSFVAEAKPPTVTMPRIKALMTGSLPGFVDVIRNLNSPALLEDSVIRQAKAAGKRIVFYGDETWVKLFPKHFVEYDGTTSFFVSDYTEVDNNVTRHLDKVLKRGDWDILILHYLGLDHIGHISGPNSPLIGQKLSEMDSVLMKIHTSLQSKERETPLPNLLVLCGDHGMSETGSHGASSTEEVNTPLILISSAFERKPGDIRHPKHVQQTDVAATLAIALGLPIPKDSVGSLLFPVVEGRPMREQLRFLHLNTVQLSKLLQENVPSYEKDPGFEQFKMSERLHGNWIRLYLEEKHSEVLFNLGSKVLRQYLDALKTLSLSLSAQVAQYDIYSMMVLTLLLLSVPQALRRKAELEVPLSSPGFSLLFYLVILVLSAVHVIVCTSAESSCYFCGLSWLAAGGVMVLASALLCVIVSVLTNVLVGGNTPRKNPMHPSSRWSELDLLILLGTAGHVLSLGASSFVEEEHQTWYFLVNTLCLALSQETYRNYFLGDDGEPPCGLCVEQGHDGATAAWQDGPGCDVLERDKGHGSPSTSEVLRGREKWMVLASPWLILACCRLLRSLNQTGVQWAHRPDLGHWLTSSDHKAELSVLAALSLLVVFVLVQRGCSPVSKAALALGLLGVYCYRAAIGSVRFPWRPDSKDISKGIIEARFVYVFVLGILFTGTKDLLKSQVIAADFKLKTVGLWEIYSGLVLLAALLFRPHNLPVLAFSLLIQTLMTKFIWKPLRHDAAEITVMHYWFGQAFFYFQGNSNNIATVDISAGFVGLDTYVEIPAVLLTAFGTYAGPVLWASHLVHFLSSETRSGSALSHACFCYALICSIPVFTYIVLVTSLRYHLFIWSVFSPKLLYEGMHLLITAAVCVFFTAMDQTRLTQS

SEQ ID NO: 4780 - protein, 76 aa, Homo sapiens
MARGQQKIQSQQKNAKKQAGQKKKQGHDQKAAAKAALIYTCTVCRTQMPDPKTFKQHFESKHPKTPLPPELADVQA

SEQ ID NO: 4781 - protein, 920 aa, Homo sapiens
MNSMNPMKPALPPAPHGDGSFAYESVPWQQSATQPAGSLSVVTTVWGVGNATQSQVLGNPMGPAGSPSGSSMMPGVAGGSSALTSPQCLGQQAFAEGGANKGYVQQGVYSRGGYPGAPGFTTGYAGGPGGLGLPSHAARPSTDFTQAAAAAAVAAAAATATATATATVAALQEKQSQELSQYGAMGAGQSFNSQFLQHGGPRGPSVPAGMNPTGIGGVMGPSGLSPLAMNPTRAAGMTPLYAGQRLPQHGYPGPPQAQPLPRQGVKRTYSEVYPGQQYLQGGQYAPSTAQFAPSPGQPPAPSPSYPGHRLPLQQGMTQSLSVPGPTGLHYKPTEQFNGQGASFNGGSVSYSQPGLSGPTRSIPGYPSSPLPGNPTPPMTPSSSVPYMSPNQEVKSPFLPDLKPNLNSLHSSPSGSGPCDELRLTFPVRDGVVLEPFRLQHNLAVSNHVFQLRDSVYKTLIMRPDLELQFKCYHHEDRQMNTNWPASVQVSVNATPLTIERGDNKTSHKPLYLKHVCQPGRNTIQITVTACCCSHLFVLQLVHRPSVRSVLQGLLKKRLLPAEHCITKIKRNFSSGTIPGTPGPNGEDGVEQTAIKVSLKCPITFRRIQLPARGHDCRHIQCFDLESYLQLNCERGTWRCPVCNKTALLEGLEVDQYMLGILIYIQNSDYEEITIDPTCSWKPVPVKPDMHIKEEPDGPALKRCRTVSPAHVLMPSVMEMIAALGPGAAPFAPLQPPSVPAPSDYPGQGSSFLGPGTFPESFPPTTPSTPTLAEFTPGPPPISYQSDIPSSLLTSEKSTACLPSQMAPAGHLDPTHNPGTPGLHTSNLGAPPGPQLHHSNPPPASRQSLGQASLGPTGELAFSPATGVMGPPSMSGAGEAPEPALDLLPELTNPDELLSYLGPPDLPTNNNDDLLSLFENN

SEQ ID NO: 4782 - protein, 1780 aa, Homo sapiens
MKIFQRKMRYWLLPPFLAIVYFCTIVQGQVAPPTRLRYNVISHDSIQISWKAPRGKFGGYKLLVTPTSGGKTNQLNLQNTATKAIIQGLMPDQNYTVQIIAYNKDKESKPAQGQFRIKDLEKRKDPKPRVKVVDRGNGSRPSSPEEVKFVCQTPAIADIVILVDGSWSIGRFNFRLVRHFLENLVTAFDVGSEKTRIGLAQYSGDPRIEWHLNAFSTKDEVIEAVRNLPYKGGNTLTGLALNYIFENSFKPEAGSRTGVSKIGILITDGKSQDDIIPPSRNLRESGVELFAIGVKNADVNELQEIASEPDSTHVYNVAEFDLMHTVVESLTRTLCSRVEEQDREIKASAHAITGPPTELITSEVTARSFMVNWTHAPGNVEKYRVVYYPTRGGKPDEVVVDGTVSSTVLKNLMSLTEYQIAVFAIYAHTASEGLRGTETTLALPMASDLLLYDVTENSMRVKWDAVPGASGYLILYAPLTEGLAGDEKEMKIGETHTDIELSGLLPNTEYTVTVYAMFGEEASDPVTGQETTLALSPPRNLRISNVGSNSARLTWDPTSRQINGYRIVYNNADGTEINEVEVDPITTFPLKGLTPLTEYTIAIFSIYDEGQSEPLTGVFTTEEVPAQQYLEIDEVTTDSFRVTWHPLSADEGLHKLMWIPVYGGKTEEVVLKEEQDSHVIEGLEPGTEYEVSLLAVLDDGSESEVVTAVGTTLDSFWTEPATTIVPTTSVTSVFQTGIRNLVVGDETTSSLRVKWDISDSDVQQFRVTYMTAQGDPEEEVIGTVMVPGSQNNLLLKPLLPDTEYKVTVTPIYTDGEGVSVSAPGKTLPSSGPQNLRVSEEWYNRLRITWDPPSSPVKGYRIVYKPVSVPGPTLETFVGADINTILITNLLSGMDYNVKIFASQASGFSDALTGMVKTLFLGVTNLQAKHVEMTSLCAHWQVHRHATAYRVVIESLQDRQKQESTVGGGTTRHCFYGLQPDSEYKISVYTKLQEIEGPSVSIMEKTQSLPTRPPTFPPTIPPAKEVCKAAKADLVFMVDGSWSIGDENFNKIISFLYSTVGALNKIGTDGTQVAMVQFTDDPRTEFKLNAYKTKETLLDAIKHISYKGGNTKTGKAIKYVRDTLFTAESGTRRGIPKVIVVITDGRSQDDVNKISREMQLDGYSIFAIGVADADYSELVSIGSKPSARHVFFVDDFDAFKKIEDELITFVCETASATCPVVHKDGIDLAGFKMMEMFGLVEKDFSSVEGVSMEPGTFNVFPCYQLHKDALVSQPTRYLHPEGLPSDYTISFLFRILPDTPQEPFALWEILNKNSDPLVGVILDNGGKTLTYFNYDQSGDFQTVTFEGPEIRKIFYGSFHKLHIVVSETLVKVVIDCKQVGEKAMNASANITSDGVEVLGKMVRSRGPGGNSAPFQLQMFDIVCSTSWANTDKCCELPGLRDDESCPDLPHSCSCSETNEVALGPAGPPGGPGLRGPKGQQGEPGPKGPDGPRGEIGLPGPQGPPGPQGPSGLSIQGMPGMPGEKGEKGDTGLPGPQGIPGGVGSPGRDGSPGQRGLPGKDGSSGPPGPPGPIGIPGTPGVPGITGSMGPQGALGPPGVPGAKGERGERGDLQSQAMVRSVARQVCEQLIQSHMARYTAILNQIPSHSSSIRTVQGPPGEPGRPGSPGAPGEQGPPGTPGFPGNAGVPGTPGERGLTGIKGEKGNPGVGTQGPRGPPGPAGPSGESRPGSPGPPGSPGPRGPPGHLGVPGPQGPSGQPGYCDPSSCSAYGVRDLIPYNDYQH

SEQ ID NO: 4783 - protein, 1097 aa, Homo sapiens
MATQVMGQSSGGGGLFTSSGNIGMALPNDMYDLHDLSKAELAAPQLIMLANVALTGEVNGSCCDYLVGEERQMAELMPVGDNNFSDSEEGEGLEESADIKGEPHGLENMELRSLELSVVEPQPVFEASGAPDIYSSNKDLPPETPGAEDKGKSSKTKPFRCKPCQYEAESEEQFVHHIRVHSAKKFFVEESAEKQAKARESGSSTAEEGDFSKGPIRCDRCGYNTNRYDHYTAHLKHHTRAGDNERVYKCIICTYTTVSEYHWRKHLRNHFPRKVYTCGKCNYFSDRKNNYVQHVRTHTGERPYKCELCPYSSSQKTHLTRHMRTHSGEKPFKCDQCSYVASNQHEVTRHARQVHNGPKPLNCPHCDYKTADRSNFKKHVELHVNPRQFNCPVCDYAASKKCNLQYHFKSKHPTCPNKTMDVSKVKLKKTKKREADLPDNITNEKTEIEQTKIKGDVAGKKNEKSVKAEKRDVSKEKKPSNNVSVIQVTTRTRKSVTEVKEMDVHTGSNSEKFSKTKKSKRKLEVDSHSLHGPVNDEESSTKKKKKVESKSKNNSQEVPKGDSKVEENKKQNTCMKKSTKKKTLKNKSSKKSSKPPQKEPVEKGSAQMDPPQMGPAPTEAVQKGPVQVEPPPPMEHAQMEGAQIRPAPDEPVQMEVVQEGPAQKELLPPVEPAQMVGAQIVLAHMELPPPMETAQTEVAQMGPAPMEPAQMEVAQVESAPMQVVQKEPVQMELSPPMEVVQKEPVQIELSPPMEVVQKEPVKIELSPPIEVVQKEPVQMELSPPMGVVQKEPAQREPPPPREPPLHMEPISKKPPLRKDKKEKSNMQSERARKEQVLIEVGLVPVKDSWLLKESVSTEDLSPPSPPLPKENLREEASGDQKLLNTGEGNKEAPLQKVGAEEADESLPGLAANINESTHISSSGQNLNTPEGETLNGKHQTDSIVCEMKMDTDQNTRENLTGINSTVEEPVSPMLPPSAVEEREAVSKTALASPPATMAANESQEIDEDEGIHSHEGSDLSDNMSEGSDDSGLHGARPVPQESSRKNAKEALAVKAAKGDFVCIFCDRSFRKGKDYSKHLNRHLVNVYYLEEAAQGQE

SEQ ID NO: 4784 - protein, 577 aa, Homo sapiens
MNPVNATALYISASRLVLNYDPGDPKAFTEINRLLPYFRQSLSCCVCGHLLQDPIAPTNSTCQHYVCKTCKGKKMMMKPSCSWCKDYEQFEENKQLSILVNCYKKLCEYITQTTLARDIIEAVDCSSDILALLNDGSLFCEETEKPSDSSFTLCLTHSPLPSTSEPTTDPQASLSPMSESTLSIAIGSSVINGLPTYNGLSIDRFGINIPSPEHSNTIDVCNTVDIKTEDLSDSLPPVCDTVATDLCSTGIDICSFSEDIKPGDSLLLSVEEVLRSLETVSNTEVCCPNLQPNLEATVSNGPFLQLSSQSLSHNVFMSTSPALHGLSCTAATPKIAKLNRKRSRSESDSEKVQPLPISTIIRGPTLGASAPVTVKRESKISLQPIATVPNGGTTPKISKTVLLSTKSMKKSHEHGSKKSHSKTKPGILKKDKAVKEKIPSHHFMPGSPTKTVYKKPQEKKGCKCGRATQNPSVLTCRGQRCPCYSNRKACLDCICRGCQNSYMANGEKKLEAFAVPEKALEQTRLTLGINVTSIAVRNASTSTSVINVTGSPVTTFLAASTHDDKSLDEAIDMRFDC

SEQ ID NO: 4785 - protein, 328 aa, Homo sapiens
MLGSRAAGFARGLRAVALAWLPGWRGRSFALARAAGAPHGGDLQPPACPEPRGRQLSLSAAAVVDSAPRPLQPYLRLMRLDKPIGTWLLYLPCTWSIGLAAEPGCFPDWYMLSLFGTGAILMRGAGCTINDMWDQDYDKKVTRTANRPIAAGDISTFQSFVFLGGQLTLALGVLLCLNYYSIALGAGSLLLVITYPLMKRISYWPQLALGLTFNWGALLGWSAIKGSCDPSVCLPLYFSGVMWTLIYDTIYAHQDKRDDVLIGLKSTALRFGENTKPWLSGFSVAMLGALSLVGVNSGQTAPYYAALGAVGAHLTHQKWGLEILPRLV

SEQ ID NO: 4786 - protein, 124 aa, Homo sapiens
MPVRGPDVEAYCLRCECKYEERSSVTIKVTIIIYLSILGLLLLYMVYLTLVEPILKRRLFGHAQLIQSDDDIGDHQPFANAHDVLARSRSRANVLNKVEYAQQRWKLQVQEQRKSVFDRHVVLS

SEQ ID NO: 4787 - protein, 147 aa, Homo sapiens
MSSEPPPPPQPPTHQASVGLLDTPRSRERSPSPLRGNVVPSPLPTRRTRTFSATVRASQGPVYKGVCKCFCRSKGHGFITPADGGPDIFLHISDVEGEYVPVEGDEVTYKMCSIPPKNEKLQAVEVVITHLAPGTKHETWSGHVISS

SEQ ID NO: 4788 - protein, 219 aa, Homo sapiens
MEPGLWLLFGLTVTSAAGFVPCSQSGDAGRRGVSQAPTAARSEGDCEETVAGPGEETVAGPGEGTVAPTALQGPSPGSPGQEQAAEGAPEHHRSRRCTCFTYKDKECVYYCHLDIIWINTPEQTVPYGLSNYRGSFRGKRSAGPLPGNLQLSHRPHLRCACVGRYDKACLHFCTQTLDVSSNSRTAEKTDKEEEGKVRGANRGLCQRRLKSRTNKASRL

SEQ ID NO: 4789 - protein, 415 aa, Homo sapiens
MPTTIEREFEELDTQRRWQPLYLEIRNESHDYPHRVAKFPENRNRNRYRDVSPYDHSRVKLQNAENDYINASLVDIEEAQRSYILTQGPLPNTCCHFWLMVWQQKTKAVVMLNRIVEKESVKCAQYWPTDDQEMLFKETGFSVKLLSEDVKSYYTVHLLQLENINSGETRTISHFHYTTWPDFGVPESPASFLNFLFKVRESGSLNPDHGPAVIHCSAGIGRSGTFSLVDTCLVLMEKGDDINIKQVLLNMRKYRMGLIQTPDQLRFSYMAIIEGAKCIKGDSSIQKRWKELSKEDLSPAFDHSPNKIMTEKYNGNRIGLEEEKLTGDRCTGLSSKMQDTMEENSESALRKRIREDRKATTAQKVQQMKQRLNENERKRKRWLYWQPILTKMGFMSVILVGAFVGWTLFFQQNAL

SEQ ID NO: 4790 - protein, 1040 aa, Homo sapiens
MDWLFFRNICLLIILMVVMEVNSEFIVEVKEFDIENGTTKWQTVRRQKREWIKFAAACREGEDNSKRNPIAKIRSDCESNQKITYRISGVGIDRPPYGVFTINPRTGEINITSVVDREITPLFLIYCRALNSRGEDLERPLELRVKVMDINDNAPVFSQSVYTASIEENSDANTLVVKLCATDADEENHLNSKIAYKIVSQEPSGAPMFILNRYTGEVCTMSSFLDREQHSMYNLVVRGSDRDGAADGLSSECDCRIKVLDVNDNFPTLEKTSYSASIEENCLSSELIRLQAIDLDEEGTDNWLAQYLILSGNDGNWFDIQTDPQTNEGILKVVKMLDYEQAPNIQLSIGVKNQADFHYSVASQFQMHPTPVRIQVVDVREGPAFHPSTMAFSVREGIKGSSLLNYVLGTYTAIDLDTGNPATDVRYIIGHDAGSWLKIDSRTGEIQFSREFDKKSKYIINGIYTAEILAIDDGSGKTATGTICIEVPDINDYCPNIFPERRTICIDSPSVLISVNEHSYGSPFTFCVVDEPPGIADMWDVRSTNATSAILTAKQVLSPGFYEIPILVKDSYNRACELAQMVQLYACDCDDNHMCLDSGAAGIYTEDITGDTYGPVTEDQAGVSNVGLGPAGIGMMVLGILLLILAPLLLLLCCCKQRQPEGLGTRFAPVPEGGEGVMQSWRIEGAHPEDRDVSNICAPMTASNTQDRMDSSEIYTNTYAAGGTVEGGVSGVELNTGMGTAVGLMAAGAAGASGAARKRSSTMGTLRDYADADINMAFLDSYFSEKAYAYADEDEGRPANDCLLIYDHEGVGSPVGSIGCCSWIVDDLDESCMETLDPKFRTLAEICLNTEIEPFPSHQACIPISTDLPLLGPNYFVNESSGLTPSEVEFQEEMAASEPVVHGDIIVTETYGNADPCVQPTTIIFDPQLAPNVVVTEAVMAPVYDIQGNICVPAELADYNNVIYAERVLASPGVPDMSNSSTTEGCMGPVMSGNILVGPEIQVMQMMSPDLPIGQTVGSTSPMTSRHRVTRYSNIHYTQQ

SEQ ID NO: 4791 - protein, 289 aa, Homo sapiens
MKLIILEHYSQASEWAAKYIRNRIIQFNPGPEKYFTLGLPTGSTPLGCYKKLIEYYKNGDLSFKYVKTFNMDEYVGLPRDHPESYHSFMWNNFFKHIDIHPENTHILDGNAVDLQAECDAFEEKIKAAGGIELFVGGIGPDGHIAFNEPGSSLVSRTRVKTLAMDTILANARFFDGELTKVPTMALTVGVGTVMDAREVMILITGAHKAFALYKAIEEGVNHMWTVSAFQQHPRTVFVCDEDATLELKVKTVKYFKGLMLVHNKLVDPLYSIKEKETEKSQSSKKPYSD

SEQ ID NO: 4792 - protein, 445 aa, Homo sapiens
MLKKQSAGLVLWGAILFVAWNALLLLFFWTRPAPGRPPSVSALDGDPASLTREVIRLAQDAEVELERQRGLLQQIGDALSSQRGRVPTAAPPAQPRVPVTPAPAVIPILVIACDRSTVRRCLDKLLHYRPSAELFPIIVSQDCGHEETAQAIASYGSAVTHIRQPDLSSIAVPPDHRKFQGYYKIARHYRWALGQVFRQFRFPAAVVVEDDLEVAPDFFEYFRATYPLLKADPSLWCVSAWNDNGKEQMVDASRPELLYRTDFFPGLGWLLLAELWAELEPKWPKAFWDDWMRRPEQRQGRACIRPEISRTMTFGRKGVSHGQFFDQHLKFIKLNQQFVHFTQLDLSYLQREAYDRDFLARVYGAPQLQVEKVRTNDRKELGEVRVQYTGRDSFKAFAKALGVMDDLKSGVPRAGYRGIVTFQFRGRRVHLAPPLTWEGYDPSWN

SEQ ID NO: 4793 - protein, 1624 aa, Homo sapiens
MPRPGTSGRRPLLLVLLLPLFAAATSAASPSPSPSQVVEVPGVPSRPASVAVCRCCPGQTSRRSRCIRAFCRVRSCQPKKCAGPQRCLNPVPAVPSPSPSVRKRQVSLNWQPLTLQEARALLKRRRPRGPGGRGLLRRRPPQRAPAGKAPVLCPLICHNGGVCVKPDRCLCPPDFAGKFCQLHSSGARPPAPAVPGLTRSVYTMPLANHRDDEHGVASMVSVHVEHPQEASVVVHQVERVSGPWEEADAEAVARAEAAARAEAAAPYTVLAQSAPREDGYSDASGFGYCFRELRGGECASPLPGLRTQEVCCRGAGLAWGVHDCQLCSERLGNSERVSAPDGPCPTGFERVNGSCEDVDECATGGRCQHGECANTRGGYTCVCPDGFLLDSSRSSCISQHVISEAKGPCFRVLRDGGCSLPILRNITKQICCCSRVGKAWGRGCQLCPPFGSEGFREICPAGPGYHYSASDLRYNTRPLGQEPPRVSLSQPRTLPATSRPSAGFLPTHRLEPRPEPRPDPRPGPELPLPSIPAWTGPEIPESGPSSGMCQRNPQVCGPGRCISRPSGYTCACDSGFRLSPQGTRCIDVDECRRVPPPCAPGRCENSPGSFRCVCGPGFRAGPRAAECLDVDECHRVPPPCDLGRCENTPGSFLCVCPAGYQAAPHGASCQDVDECTQSPGLCGRGACKNLPGSFRCVCPAGFRGSACEEDVDECAQEPPPCGPGRCDNTAGSFHCACPAGFRSRGPGAPCQDVDECARSPPPCTYGRCENTEGSFQCVCPMGFQPNTAGSECEDVDECENHLACPGQECVNSPGSFQCRTCPSGHHLHRGRCTDVDECSSGAPPCGPHGHCTNTEGSFRCSCAPGYRAPSGRPGPCADVNECLEGDFCFPHGECLNTDGSFACTCAPGYRPGPRGASCLDVDECSEEDLCQSGICTNTDGSFECICPPGHRAGPDLASCLDVDECRERGPALCGSQRCENSPGSYRCVRDCDPGYHAGPEGTCDDVDECQEYGPEICGAQRCENTPGSYRCTPACDPGYQPTPGGGCQDVDECRNRSFCGAHAVCQNLPGSFQCLCDQGYEGARDGRHCVDVNECETLQGVCGAALCENVEGSFLCVCPNSPEEFDPMTGRCVPPRTSAGTFPGSQPQAPASPVLPARPPPPPLPRRPSTPRQGPVGSGRRECYFDTAAPDACDNILARNVTWQECCCTVGEGWGSGCRIQQCPGTETAEYQSLCPHGRGYLAPSGDLSLRRDVDECQLFRDQVCKSGVCVNTAPGYSCYCSNGYYYHTQRLECIDNDECADEEPACEGGRCVNTVGSYHCTCEPPLVLDGSQRRCVSNESQSLDDNLGVCWQEVGADLVCSHPRLDRQATYTECCCLYGEAWGMDCALCPAQDSDDFEALCNVLRPPAYSPPRPGGFGLPYEYGPDLGPPYQGLPYGPELYPPPALPYDPYPPPPGPFARREAPYGAPRFDMPDFEDDGGPYGESEAPAPPGPGTRWPYRSRDTRRSFPEPEEPPEGGSYAGSLAEPYEELEAEECGILDGCTNGRCVRVPEGFTCRCFDGYRLDMTRMACVDINECDEAEAASPLCVNARCLNTDGSFRCICRPGFAPTHQPHHCAPARPRA

SEQ ID NO: 4794 - protein, 255 aa, Homo sapiens
MAELRVLVAVKRVIDYAVKIRVKPDRTGVVTDGVKHSMNPFCEIAVEEAVRLKEKKLVKEVIAVSCGPAQCQETIRTALAMGADRGIHVEVPPAEAERLGPLQVARVLAKLAEKEKVDLVLLGKQAIDDDCNQTGQMTAGFLDWPQGTFASQVTLEGDKLKVEREIDGGLETLRLKLPAVVTADLRLNEPRYATLPNIMKAKKKKIEVIKPGDLGVDLTSKLSVISVEDPPQRTAGVKVETTEDLVAKLKEIGRI

SEQ ID NO: 4795 - protein, 860 aa, Homo sapiens
MSRGGSYPHLLWDVRKRSLGLEDPSRLRSRYLGRREFIQRLKLEATLNVHDGCVNTICWNDTGEYILSGSDDTKLVISNPYSRKVLTTIRSGHRANIFSAKFLPCTNDKQIVSCSGDGVIFYTNVEQDAETNRQCQFTCHYGTTYEIMTVPNDPYTFLSCGEDGTVRWFDTRIKTSCTKEDCKDDILINCRRAATSVAICPPIPYYLAVGCSDSSVRIYDRRMLGTRATGNYAGRGTTGMVARFIPSHLNNKSCRVTSLCYSEDGQEILVSYSSDYIYLFDPKDDTARELKTPSAEERREELRQPPVKRLRLRGDWSDTGPRARPESERERDGEQSPNVSLMQRMSDMLSRWFEEASEVAQSNRGRGRSRPRGGTSQSDISTLPTVPSSPDLEVSETAMEVDTPAEQFLQPSTSSTMSAQAHSTSSPTESPHSTPLLSSPDSEQRQSVEASGHHTHHQSDNNNEKLSPKPGTGEPVLSLHYSTEGTTTSTIKLNFTDEWSSIASSSRGIGSHCKSEGQEESFVPQSSVQPPEGDSETKAPEESSEDVTKYQEGVSAENPVENHINITQSDKFTAKPLDSNSGERNDLNLDRSCGVPEESASSEKAKEPETSDQTSTESATNENNTNPEPQFQTEATGPSAHEETSTRDSALQDTDDSDDDPVLIPGARYRAGPGDRRSAVARIQEFFRRRKERKEMEELDTLNIRRPLVKMVYKGHRNSRTMIKEANFWGANFVMSGSDCGHIFIWDRHTAEHLMLLEADNHVVNCLQPHPFDPILASSGIDYDIKIWSPLEESRIFNRKLADEVITRNELMLEETRNTITVPASFMLRMLASLNHIRADRLEGDRSEGSGQENENEDEE

SEQ ID NO: 4796 - protein, 613 aa, Homo sapiens
MAATAVAAAVAGTESAQGPPGPAASLELWLNKATDPSMSEQDWSAIQNFCEQVNTDPNGPTHAPWLLAHKIQSPQEKEALYALTVLEMCMNHCGEKFHSEVAKFRFLNELIKVLSPKYLGSWATGKVKGRVIEILFSWTVWFPEDIKIRDAYQMLKKQGIIKQDPKLPVDKILPPPSPWPKSSIFDADEEKSKLLTRLLKSNHPEDLQAANRLIKNLVKEEQEKSEKVSKRVSAVEEVRSHVKVLQEMLSMYRRPGQAPPDQEALQVVYERCEKLRPTLFRLASDTTDDDDALAEILQANDLLTQGVLLYKQVMEGRVTFGNRVTSSLGDIPVSRVFQNPAGCMKTCPLIDLEVDNGPAQMGTVVPSLLHQDLAALGISDAPVTGMVSGQNCCEEKRNPSSSTLPGGGVQNPSADRNLLDLLSAQPAPCPLNYVSQKSVPKEVPPGTKSSPGWSWEAGPLAPSPSSQNTPLAQVFVPLESVKPSSLPPLIVYDRNGFRILLHFSQTGAPGHPEVQVLLLTMMSTAPQPVWDIMFQVAVPKSMRVKLQPASSSKLPAFSPLMPPAVISQMLLLDNPHKEPIRLRYKLTFNQGGQPFSEVGEVKDFPDLAVLGAA

SEQ ID NO: 4797 - protein, 650 aa, Homo sapiens
MAEGTAEAPLENGGGGDSGAGALERGVAPIKRQYLTTKEQFHQFLEAKGQEKTCRETEVGDPAGNELAEPEAKRIRLEDGQTADGQTEEAAEPGEQLQTQKRARGQNKGRPHVKPTNYDKNRLCPSLIQESAAKCFFGDRCRFLHDVGRYLETKPADLGPRCVLFETFGRCPYGVTCRFAGAHLRPEGQNLVQEELAARGTQPPSIRNGLDKALQQQLRKREVRFERAEQALRRFSQGPTPAAAVPEGTAAEGAPRQENCGAQQVPAGPGTSTPPSSPVRTCGPLTDEDVVRLRPCEKKRLDIRGKLYLAPLTTCGNLPFRRICKRFGADVTCGEMAVCTNLLQGQMSEWALLKRHQCEDIFGVQLEGAFPDTMTKCAELLSRTVEVDFVDINVGCPIDLVYKKGGGCALMNRSTKFQQIVRGMNQVLDVPLTVKIRTGVQERVNLAHRLLPELRDWGVALVTLHGRSREQRYTKLADWQYIEECVQAASPMPLFGNGDILSFEDANRAMQTGVTGIMIARGALLKPWLFTEIKEQRHWDISSSERLDILRDFTNYGLEHWGSDTQGVEKTRRFLLEWLSFLCRYVPVGLLERLPQRINERPPYYLGRDYLETLMASQKAADWIRISEMLLGPVPPSFAFLPKHKANAYK

SEQ ID NO: 4798 - protein, 708 aa, Homo sapiens
MKDMPLRIHVLLGLAITTLVQAVDKKVDCPRLCTCEIRPWFTPRSIYMEASTVDCNDLGLLTFPARLPANTQILLLQTNNIAKIEYSTDFPVNLTGLDLSQNNLSSVTNINVKKMPQLLSVYLEENKLTELPEKCLSELSNLQELYINHNLLSTISPGAFIGLHNLLRLHLNSNRLQMINSKWFDALPNLEILMIGENPIIRIKDMNFKPLINLRSLVIAGINLTEIPDNALVGLENLESISFYDNRLIKVPHVALQKVVNLKFLDLNKNPINRIRRGDFSNMLHLKELGINNMPELISIDSLAVDNLPDLRKIEATNNPRLSYIHPNAFFRLPKLESLMLNSNALSALYHGTIESLPNLKEISIHSNPIRCDCVIRWMNMNKTNIRFMEPDSLFCVDPPEFQGQNVRQVHFRDMMEICLPLIAPESFPSNLNVEAGSYVSFHCRATAEPQPEIYWITPSGQKLLPNTLTDKFYVHSEGTLDINGVTPKEGGLYTCIATNLVGADLKSVMIKVDGSFPQDNNGSLNIKIRDIQANSVLVSWKASSKILKSSVKWTAFVKTENSHAAQSARIPSDVKVYNLTHLNPSTEYKICIDIPTIYQKNRKKCVNVTTKGLHPDQKEYEKNNTTTLMACLGGLLGIIGVICLISCLSPEMNCDGGHSYVRNYLQKPTFALGELYPPLINLWEAGKEKSTSLKVKATVIGLPTNMS

SEQ ID NO: 4799 - protein, 301 aa, Homo sapiens
MFSHLPFDCVLLLLLLLLTRSSEVEYRAEVGQNAYLPCFYTPAAPGNLVPVCWGKGACPVFECGNVVLRTDERDVNYWTSRYWLNGDFRKGDVSLTIENVTLADSGIYCCRIQIPGIMNDEKFNLKLVIKPAKVTPAPTRQRDFTAAFPRMLTTRGHGPAETQTLGSLPDINLTQISTLANELRDSRLANDLRDSGATIRIGIYIGAGICAGLALALIFGALIFKWYSHSKEKIQNLSLISLANLPPSGLANAVAEGIRSEENIYTIEENVYEVEEPNEYYCYVSSRQQPSQPLGCRFAMP

SEQ ID NO: 4800 - protein, 257 aa, Homo sapiens
MLLTLAGGALFFPGLFALCTWALRRSQPGWSRTDCVMISTRLVSSVHAVLATGSGIVIIRSCDDVITGRHWLAREYVWFLIPYMIYDSYAMYLCEWCRTRDQNRAPSLTLRNFLSRNRLMITHHAVILFVLVPVAQRLRGDLGDFFVGCIFTAELSTPFVSLGRVLIQLKQQHTLLYKVNGILTLATFLSCRILLFPFMYWSYGRQQGLSLLQVPFSIPFYCNVANAFLVAPQIYWFCLLCRKAVRLFDTPQAKKDG

SEQ ID NO: 4801 - protein, 240 aa, Homo sapiens
MAGPPRLLLLPLLLALARGLPGALAAQEVQQSPHCTTVPVGASVNITCSTSGGLRGIYLRQLGPQPQDIIYYEDGVVPTTDRRFRGRIDFSGSQDNLTITMHRLQLSDTGTYTCQAITEVNVYGSGTLVLVTEEQSQGWHRCSDAPPRASALPAPPTGSALPDPQTASALPDPPAASALPAALAVISFLLGLGLGVACVLARTQIKKLCSWRDKNSAACVVYEDMSHSRCNTLSSPNQYQ

SEQ ID NO: 4802 - protein, 309 aa, Homo sapiens
MVGFKATDVPPTATVKFLGAGTAACIADLITFPLDTAKVRLQIQGESQGPVRATASAQYRGVMGTILTMVRTEGPRSLYNGLVAGLQRQMSFASVRIGLYDSVKQFYTKGSEHASIGSRLLAGSTTGALAVAVAQPTDVVKVRFQAQARAGGGRRYQSTVNAYKTIAREEGFRGLWKGTSPNVARNAIVNCAELVTYDLIKDALLKANLMTDDLPCHFTSAFGAGFCTTVIASPVDVVKTRYMNSALGQYSSAGHCALTMLQKEGPRAFYKGFMPSFLRLGSWNVVMFVTYEQLKRALMAACTSREAPF

SEQ ID NO: 4803 - protein, 864 aa, Homo sapiens
MVRSGARPGQVLSSGRHTGPAKLTNGKKATYLRKIPRFNADSGYSIHSDSESQAETVHGLDGCASLLRDILRNEDSASSDNKKQIPNEASARSERDTSDLEQNWSLQDHYRMYSPIIYQALCEHVQTQMSLMNDLTSKNIPNGIPAVPCHAPSHSESQATPHSSYGLCTSTPVWSLQRPPCPPKVHSEVQTDGNSQFASQGKTVSATCTDVLRNSFNTSPGVPCSLPKTDISAIPTLQQLGLVNGILPQQGIHKETDLLKCIQTYLSLFRSHGKETHLDSQTHRSPTQSQPAFLATNEEKCAREQIREATSERKDLNIHVRDTKTVKDVQKAKNVNKTAEKVRIIKYLLGELKALVAEQEDSEIQRLITEMEACISVLPTVSGNTDIQVEIALAMQPLRSENAQLRRQLRILNQQLREQQKTQKPSGAVDCNLELFSLQSLNMSLQNQLEESLKSQELLQSKNEELLKVIENQKDENKKFSSIFKDKDQTILENKQQYDIEITRIKIELEEALVNVKSSQFKLETAEKENQILGITLRQRDAEVTRLRELTRTLQTSMAKLLSDLSVDSARCKPGNNLTKSLLNIHDKQLQHDPAPAHTSIMSYLNKLETNYSFTHSEPLSTIKNEETIEPDKTYENVLSSRGPQNSNTRGMEEASAPGIISALSKQDSDEGSETMALIEDEHNLDNTIYIPFARSTPEKKSPLSKRLSPQPQIRAATTQLVSNSGLAVSGKENKLCTPVICSSSTKEAEDAPEKLSRASDMKDTQLLKKIKEAIGKIPAATKEPEEQTACHGPSGCLSNSLQVKGNTVCDGSVFTSDLMSDWSISSFSTFTSRDEQDFRNGLAALDANIARLQKSLRTGLLEK

SEQ ID NO: 4804 - protein, 1268 aa, Homo sapiens
MSSVAVLTQESFAEHRSGLVPQQIKVATLNSEEESDPPTYKDAFPPLPEKAACLESAQEPAGAWGNKIRPIKASVITQVFHVPLEERKYKDMNQFGEGEQAKICLEIMQRTGAHLELSLAKDQGLSIMVSGKLDAVMKARKDIVARLQTQASATVAIPKEHHRFVIGKNGEKLQDLELKTATKIQIPRPDDPSNQIKITGTKEGIEKARHEVLLISAEQDKRAVERLEVEKAFHPFIAGPYNRLVGEIMQETGTRINIPPPSVNRTEIVFTGEKEQLAQAVARIKKIYEEKKKKTTTIAVEVKKSQHKYVIGPKGNSLQEILERTGVSVEIPPSDSISETVILRGEPEKLGQALTEVYAKANSFTVSSVAAPSWLHRFIIGKKGQNLAKITQQMPKVHIEFTEGEDKITLEGPTEDVNVAQEQIEGMVKDLINRMDYVEINIDHKFHRHLIGKSGANINRIKDQYKVSVRIPPDSEKSNLIRIEGDPQGVQQAKRELLELASRMENERTKDLIIEQRFHRTIIGQKGERIREIRDKFPEVIINFPDPAQKSDIVQLRGPKNEVEKCTKYMQKMVADLVENSYSISVPIFKQFHKNIIGKGGANIKKIREESNTKIDLPAENSNSETIIITGKRANCEAARSRILSIQKDLANIAEVEVSIPAKLHNSLIGTKGRLIRSIMEECGGVHIHFPVEGSGSDTVVIRGPSSDVEKAKKQLLHLAEEKQTKSFTVDIRAKPEYHKFLIGKGGGKIRKVRDSTGARVIFPAAEDKDQDLITIIGKEDAVREAQKELEALIQNLDNVVEDSMLVDPKHHRHFVIRRGQVLREIAEEYGGVMVSFPRSGTQSDKVTLKGAKDCVEAAKKRIQEIIEDLEAQVTLECAIPQKFHRSVMGPKGSRIQQITRDFSVQIKFPDREENAVHSTEPVVQENGDEAGEGREAKDCDPGSPRRCDIIIISGRKEKCEAAKEALEALVPVTIEVEVPFDLHRYVIGQKGSGIRKMMDEFEVNIHVPAPELQSDIIAITGLAANLDRAKAGLLERVKELQAEQEDRALRSFKLSVTVDPKYHPKIIGRKGAVITQIRLEHDVNIQFPDKDDGNQPQDQITITGYEKNTEAARDAILRIVGELEQMVSEDVPLDHRVHARIIGARGKAIRKIMDEFKVDIRFPQSGAPDPNCVTVTGLPENVEEAIDHILNLEEEYLADVVDSEALQVYMKPPAHEEAKAPSRGFVVRDAPWTASSSEKAPDMSSSEEFPSFGAQVAPKTLPWGPKR

SEQ ID NO: 4805 - protein, 562 aa, Homo sapiens
MAASAKRKQEEKHLKMLRDMTGLPHNRKCFDCDQRGPTYVNMTVGSFVCTSCSGSLRGLNPPHRVKSISMTTFTQQEIEFLQKHGNEVCKQIWLGLFDDRSSAIPDFRDPQKVKEFLQEKYEKKRWYVPPEQAKVVASVHASISGSSASSTSSTPEVKPLKSLLGDSAPTLHLNKGTPSQSPVVGRSQGQQQEKKQFDLLSDLGSDIFAAPAPQSTATANFANFAHFNSHAAQNSANADFANFDAFGQSSGSSNFGGFPTASHSPFQPQTTGGSAASVNANFAHFDNFPKSSSADFGTFNTSQSHQTASAVSKVSTNKAGLQTADKYAALANLDNIFSAGQGGDQGSGFGTTGKAPVGSVVSVPSQSSASSDKYAALAELDSVFSSAATSSNAYTSTSNASSNVFGTVPVVASAQTQPASSSVPAPFGATPSTNPFVAAAGPSVASSTNPFQTNARGATAATFGTASMSMPTGFGTPAPYSLPTSFSGSFQQPAFPAQAAFPQQTAFSQQPNGAGFAAFGQTKPVVTPFGQVAAAGVSSNPFMTGAPTGQFPTGSSSTNPFL

SEQ ID NO: 4806 - protein, 934 aa, Homo sapiens
MVPEAWRSGLVSTGRVVGVLLLLGALNKASTVIHYEIPEEREKGFAVGNVVANLGLDLGSLSARRFRVVSGASRRFFEVNRETGEMFVNDRLDREELCGTLPSCTVTLELVVENPLELFSVEVVIQDINDNNPAFPTQEMKLEISEAVAPGTRFPLESAHDPDVGSNSLQTYELSRNEYFALRVQTREDSTKYAELVLERALDREREPSLQLVLTALDGGTPALSASLPIHIKVLDANDNAPVFNQSLYRARVLEDAPSGTRVVQVLATDLDEGPNGEIIYSFGSHNRAGVRQLFALDLVTGMLTIKGRLDFEDTKLHEIYIQAKDKGANPEGAHCKVLVEVVDVNDNAPEITVTSVYSPVPEDAPLGTVIALLSVTDLDAGENGLVTCEVPPGLPFSLTSSLKNYFTLKTSADLDRETVPEYNLSITARDAGTPSLSALTIVRVQVSDINDNPPQSSQSSYDVYIEENNLPGAPILNLSVWDPDAPQNARLSFFLLEQGAETGLVGRYFTINRDNGIVSSLVPLDYEDRREFELTAHISDGGTPVLATNISVNIFVTDRNDNAPQVLYPRPGGSSVEMLPRGTSAGHLVSRVVGWDADAGHNAWLSYSLLGSPNQSLFAIGLHTGQISTARPVQDTDSPRQTLTVLIKDNGEPSLSTTATLTVSVTEDSPEARAEFPSGSAPREQKKNLTFYLLLSLILVSVGFVVTVFGVIIFKVYKWKQSRDLYRAPVSSLYRTPGPSLHADAVRGGLMSPHLYHQVYLTTDSRRSDPLLKKPGAASPLASRQNTLRSCDPVFYRQVLGAESAPPGQQAPPNTDWRFSQAQRPGTSGSQNGDDTGTWPNNQFDTEMLQAMILASASEAADGSSTLGGGAGTMGLSARYGPQFTLQHVPDYRQNVYIPGSNATLTNAAGKRDGKAPAGGNGNKKKSGKKEKK

SEQ ID NO: 4807 - protein, 659 aa, Homo sapiens
MALVTVSRSPPGSGASTPVGPWDQAVQRRSRLQRRQSFAVLRGAVLGLQDGGDNDDAAEASSEPTEKAPSEEELHGDQTDFGQGSQSPQKQEEQRQHLHLMVQLLRPQDDIRLAAQLEAPRPPRLRYLLVVSTREGEGLSQDETVLLGVDFPDSSSPSCTLGLVLPLWSDTQVYLDGDGGFSVTSGGQSRIFKPISIQTMWATLQVLHQACEAALGSGLVPGGSALTWASHYQERLNSEQSCLNEWTAMADLESLRPPSAEPGGSSEQEQMEQAIRAELWKVLDVSDLESVTSKEIRQALELRLGLPLQQYRDFIDNQMLLLVAQRDRASRIFPHLYLGSEWNAANLEELQRNRVTHILNMAREIDNFYPERFTYHNVRLWDEESAQLLPHWKETHRFIEAARAQGTHVLVHCKMGVSRSAATVLAYAMKQYECSLEQALRHVQELRPIARPNPGFLRQLQIYQGILTASRQSHVWEQKVGGVSPEEHPAPEVSTPFPPLPPEPEGGGEEKVVGMEESQAAPKEEPGPRPRINLRGVMRSISLLEPSLELESTSETSDMPEVFSSHESSHEEPLQPFPQLARTKGGQQVDRGPQPALKSRQSVVTLQGSAVVANRTQAFQEQEQGQGQGQGEPCISSTPRFRKVVRQASVHDSGEEGEA

SEQ ID NO: 4808 - protein, 259 aa, Homo sapiens
MKDVDNLKSIKEEWVCETGSDNQPLGNNQQSNCEYFVDSLFEEAQKVSSKCVSPAEQKKQVDVNIKLWKNGFTVNDDFRSYSDGASQQFLNSIKKGELPSELQGIFDKEEVDVKVEDKKNEICLSTKPVFQPFSGQGHRLGSATPKIVSKAKNIEVENKNNLSAVPLNNLEPITNIQIWLANGKRIVQKFNITHRVSHIKDFIEKYQGSQRSPPFSLATALPVLRLLDETLTLEEADLQNAVIIQRLQKTASFRELSEH

SEQ ID NO: 4809 - protein, 322 aa, Homo sapiens
MVSVINTVDTSHEDMIHDAQMDYYGTRLATCSSDRSVKIFDVRNGGQILIADLRGHEGPVWQVAWAHPMYGNILASCSYDRKVIIWREENGTWEKSHEHAGHDSSVNSVCWAPHDYGLILACGSSDGAISLLTYTGEGQWEVKKINNAHTIGCNAVSWAPAVVPGSLIDHPSGQKPNYIKRFASGGCDNLIKLWKEEEDGQWKEEQKLEAHSDWVRDVAWAPSIGLPTSTIASCSQDGRVFIWTCDDASSNTWSPKLLHKFNDVVWHVSWSITANILAVSGGDNKVTLWKESVDGQWVCISDVNKGQGSVSASVTEGQQNEQ

SEQ ID NO: 4810 - protein, 1077 aa, Homo sapiens
MARLFSPRPPPSEDLFYETYYSLSQQYPLLLLLLGIVLCALAALLAVAWASGRELTSDPSFLTTVLCALGGFSLLLGLASREQRLQRWTRPLSGLVWVALLALGHAFLFTGGVVSAWDQVSYFLFVIFTAYAMLPLGMRDAAVAGLASSLSHLLVLGLYLGPQPDSRPALLPQLAANAVLFLCGNVAGVYHKALMERALRATFREALSSLHSRRRLDTEKKHQEHLLLSILPAYLAREMKAEIMARLQAGQGSRPESTNNFHSLYVKRHQGVSVLYADIVGFTRLASECSPKELVLMLNELFGKFDQIAKEHECMRIKILGDCYYCVSGLPLSLPDHAINCVRMGLDMCRAIRKLRAATGVDINMRVGVHSGSVLCGVIGLQKWQYDVWSHDVTLANHMEAGGVPGRVHITGATLALLAGAYAVEDAGMEHRDPYLRELGEPTYLVIDPRAEEEDEKGTAGGLLSSLEGLKMRPSLLMTRYLESWGAAKPFAHLSHGDSPVSTSTPLPEKTLASFSTQWSLDRSRTPRGLDDELDTGDAKFFQVIEQLNSQKQWKQSKDFNPLTLYFREKEMEKEYRLSAIPAFKYYEACTFLVFLSNFIIQMLVTNRPPALAITYSITFLLFLLILFVCFSEDLMRCVLKGPKMLHWLPALSGLVATRPGLRIALGTATILLVFAMAITSLFFFPTSSDCPFQAPNVSSMISNLSWELPGSLPLISVPYSMHCCTLGFLSCSLFLHMSFELKLLLLLLWLAASCSLFLHSHAWLSECLIVRLYLGPLDSRPGVLKEPKLMGAISFFIFFFTLLVLARQNEYYCRLDFLWKKKLRQEREETETMENLTRLLLENVLPAHVAPQFIGQNRRNEDLYHQSYECVCVLFASVPDFKEFYSESNINHEGLECLRLLNEIIADFDELLSKPKFSGVEKIKTIGSTYMAATGLNATSGQDAQQDAERSCSHLGTMVEFAVALGSKLDVINKHSFNNFRLRVGLNHGPVVAGVIGAQKPQYDIWGNTVNVASRMESTGVLGKIQVTEETAWALQSLGYTCYSRGVIKVKGKGQLCTYFLNTDLTRTGPPSATLG

SEQ ID NO: 4811 - protein, 222 aa, Homo sapiens
MKLPLLLALLFGAVSALHLRSETSTFETPLGAKTLPEDEETPEQEMEETPCRELEEEEEWGSGSEDASKKDGAVESISVPDMVDKNLTCPEEEDTVKVVGIPGCQTCRYLLVRSLQTFSQAWFTCRRCYRGNLVSIHNFNINYRIQCSVSALNQGQVWIGGRITGSGRCRRFQWVDGSRWNFAYWAAHQPWSRGGHCVALCTRGGHWRRAHCLRRLPFICSY

SEQ ID NO: 4812 - protein, 1445 aa, Homo sapiens
MEEGHGLDLTYITERIIAVSFPAGCSEESYLHNLQEVTRMLKSKHGDNYLVLNLSEKRYDLTKLNPKIMDVGWPELHAPPLDKMCTICKAQESWLNSNLQHVVVIHCRGGKGRIGVVISSYMHFTNVSASADQALDRFAMKKFYDDKVSALMQPSQKRYVQFLSGLLSGSVKMNASPLFLHFVILHGTPNFDTGGVCRPFLKLYQAMQPVYTSGIYNVGPENPSRICIVIEPAQLLKGDVMVKCYHKKYRSATRDVIFRLQFHTGAVQGYGLVFGKEDLDNASKDDRFPDYGKVELVFSATPEKIQGSEHLYNDHGVIVDYNTTDPLIRWDSYENLSADGEVLHTQGPVDGSLYAKVRKKSSSDPGIPGGPQAIPATNSPDHSDHTLSVSSDSGHSTASARTDKTEERLAPGTRRGLSAQEKAELDQLLSGFGLEDPGSSLKEMTDARSKYSGTRHVVPAQVHVNGDAALKDRETDILDDEMPHHDLHSVDSLGTLSSSEGPQSAHLGPFTCHKSSQNSLLSDGFGSNVGEDPQGTLVPDLGLGMDGPYERERTFGSREPKQPQPLLRKPSVSAQMQAYGQSSYSTQTWVRQQQMVVAHQYSFAPDGEARLVSRCPADNPGLVQAQPRVPLTPTRGTSSRVAVQRGVGSGPHPPDTQQPSPSKAFKPRFPGDQVVNGAGPELSTGPSPGSPTLDIDQSIEQLNRLILELDPTFEPIPTHMNALGSQANGSVSPDSVGGGLRASSRLPDTGEGPSRATGRQGSSAEQPLGGRLRKLSLGQYDNDAGGQLPFSKCAWGKAGVDYAPNLPPFPSPADVKETMTPGYPQDLDIIDGRILSSKESMCSTPAFPVSPETPYVKTALRHPPFSPPEPPLSSPASQHKGGREPRSCPETLTHAVGMSESPIGPKSTMLRADASSTPSFQQAFASSCTISSNGPGQRRESSSSAERQWVESSPKPMVSLLGSGRPTGSPLSAEFSGTRKDSPVLSCFPPSELQAPFHSHELSLAEPPDSLAPPSSQAFLGFGTAPVGSGLPPEEDLGALLANSHGASPTPSIPLTATGAADNGFLSHNFLTVAPGHSSHHSPGLQGQGVTLPGQPPLPEKKRASEGDRSLGSVSPSSSGFSSPHSGSTISIPFPNVLPDFSKASEAASPLPDSPGDKLVIVKFVQDTSKFWYKADISREQAIAMLKDKEPGSFIVRDSHSFRGAYGLAMKVATPPPSVLQLNKKAGDLANELVRHFLIECTPKGVRLKGCSNEPYFGSLTALVCQHSITPLALPCKLLIPERDPLEEIAESSPQTAANSAAELLKQGAACNVWYLNSVEMESLTGHQAIQKALSITLVQEPPPVSTVVHFKVSAQGITLTDNQRKLFFRRHYPVNSVIFCALDPQDRKWIKDGPSSKVFGFVARKQGSATDNVCHLFAEHDPEQPASAIVNFVSKVMIGSPKKV

SEQ ID NO: 4813 - protein, 527 aa, Homo sapiens
MESAAALHFSRPASLLLLLLSLCALVSAQFIVVGPTDPILATVGENTTLRCHLSPEKNAEDMEVRWFRSQFSPAVFVYKGGRERTEEQMEEYRGRTTFVSKDISRGSVALVIHNITAQENGTYRCYFQEGRSYDEAILHLVVAGLGSKPLISMRGHEDGGIRLECISRGWYPKPLTVWRDPYGGVAPALKEVSMPDADGLFMVTTAVIIRDKSVRNMSCSINNTLLGQKKESVIFIPESFMPSVSPCAVALPIIVVILMIPIAVCIYWINKLQKEKKILSGEKEFERETREIALKELEKERVQKEEELQVKEKLQEELRWRRTFLHAVDVVLDPDTAHPDLFLSEDRRSVRRCPFRHLGESVPDNPERFDSQPCVLGRESFASGKHYWEVEVENVIEWTVGVCRDSVERKGEVLLIPQNGFWTLEMHKGQYRAVSSPDRILPLKESLCRVGVFLDYEAGDVSFYNMRDRSHIYTCPRSAFSVPVRPFFRLGCEDSPIFICPALTGANGVTVPEEGLTLHRVGTHQSL

SEQ ID NO: 4814 - protein, 956 aa, Homo sapiens
MASKRKSTTPCMIPVKTVVLQDASMEAQPAETLPEGPQQDLPPEASAASSEAAQNPSSTDGSTLANGHRSTLDGYLYSCKYCDFRSHDMTQFVGHMNSEHTDFNKDPTFVCSGCSFLAKTPEGLSLHNATCHSGEASFVWNVAKPDNHVVVEQSIPESTSTPDLAGEPSAEGADGQAEIIITKTPIMKIMKGKAEAKKIHTLKENVPSQPVGEALPKLSTGEMEVREGDHSFINGAVPVSQASASSAKNPHAANGPLIGTVPVLPAGIAQFLSLQQQPPVHAQHHVHQPLPTAKALPKVMIPLSSIPTYNAAMDSNSFLKNSFHKFPYPTKAELCYLTVVTKYPEEQLKIWFTAQRLKQGISWSPEEIEDARKKMFNTVIQSVPQPTITVLNTPLVASAGNVQHLIQAALPGHVVGQPEGTGGGLLVTQPLMANGLQATSSPLPLTVTSVPKQPGVAPINTVCSNTTSAVKVVNAAQSLLTACPSITSQAFLDASIYKNKKSHEQLSALKGSFCRNQFPGQSEVEHLTKVTGLSTREVRKWFSDRRYHCRNLKGSRAMIPGDHSSIIIDSVPEVSFSPSSKVPEVTCIPTTATLATHPSAKRQSWHQTPDFTPTKYKERAPEQLRALESSFAQNPLPLDEELDRLRSETKMTRREIDSWFSERRKKVNAEETKKAEENASQEEEEAAEDEGGEEDLASELRVSGENGSLEMPSSHILAERKVSPIKINLKNLRVTEANGRNEIPGLGACDPEDDESNKLAEQLPGKVSCKKTAQQRHLLRQLFVQTQWPSNQDYDSIMAQTGLPRPEVVRWFGDSRYALKNGQLKWYEDYKRGNFPPGLLVIAPGNRELLQDYYMTHKMLYEEDLQNLCDKTQMSSQQVKQWFAEKMGEETRAVADTGSEDQGPGTGELTAVHKGMGDTYSEVSENSESWEPRVPEASSEPFDTSSPQAGRQLETD

SEQ ID NO: 4815 - protein, 168 aa, Homo sapiens
MAEGSRIPQARALLQQCLHARLQIRPADGDVAAQWVEVQRGLVIYVCFFKGADKELLPKMVNTLLNVKLSETENGKHVSILDLPGNILIIPQATLGGRLKGRNMQYHSNSGKEEGFELYSQFVTLCEKEVAANSKCAEARVVVEHGTYGNRQVLKLDTNGPFTHLIEF

SEQ ID NO: 4816 - protein, 496 aa, Homo sapiens
MALWRGSAYAGFLALAVGCVFLLEPELPGSALRSLWSSLCLGPAPAPPGPVSPEGRLAAAWDALIVRPVRRWRRVAVGVNACVDVVLSGVKLLQALGLSPGNGKDHSILHSRNDLEEAFIHFMGKGAAAERFFSDKETFHDIAQVASEFPGAQHYVGGNAALIGQKFAANSDLKVLLCGPVGPKLHELLDDNVFVPPESLQEVDEFHLILEYQAGEEWGQLKAPHANRFIFSHDLSNGAMNMLEVFVSSLEEFQPDLVVLSGLHMMEGQSKELQRKRLLEVVTSISDIPTGIPVHLELASMTNRELMSSIVHQVFPAVTSLGLNEQELLFLTQSASGPHSSLSSWNGVPDVGMVSDILFWILKEHGRSKSRASDLTRIHFHTLVYHILATVDGHWANQLAAVAAGARVAGTQACATETIDTSRVSLRAPQEFMTSHSEAGSRIVLNPNKPVVEWHREGISFHFTPVLVCKDPIRTVGLGDAISAEGLFYSEVHPHY

SEQ ID NO: 4817 - protein, 689 aa, Homo sapiens
MADLEAVLADVSYLMAMEKSKATPAARASKKILLPEPSIRSVMQKYLEDRGEVTFEKIFSQKLGYLLFRDFCLNHLEEARPLVEFYEEIKKYEKLETEEERVARSREIFDSYIMKELLACSHPFSKSATEHVQGHLGKKQVPPDLFQPYIEEICQNLRGDVFQKFIESDKFTRFCQWKNVELNIHLTMNDFSVHRIIGRGGFGEVYGCRKADTGKMYAMKCLDKKRIKMKQGETLALNERIMLSLVSTGDCPFIVCMSYAFHTPDKLSFILDLMNGGDLHYHLSQHGVFSEADMRFYAAEIILGLEHMHNRFVVYRDLKPANILLDEHGHVRISDLGLACDFSKKKPHASVGTHGYMAPEVLQKGVAYDSSADWFSLGCMLFKLLRGHSPFRQHKTKDKHEIDRMTLTMAVELPDSFSPELRSLLEGLLQRDVNRRLGCLGRGAQEVKESPFFRSLDWQMVFLQKYPPPLIPPRGEVNAADAFDIGSFDEEDTKGIKLLDSDQELYRNFPLTISERWQQEVAETVFDTINAETDRLEARKKAKNKQLGHEEDYALGKDCIMHGYMSKMGNPFLTQWQRRYFYLFPNRLEWRGEGEAPQSLLTMEEIQSVEETQIKERKCLLLKIRGGKQFILQCDSDPELVQWKKELRDAYREAQQLVQRVPKMKNKPRSPVVELSKVPLVQRGSANGL

SEQ ID NO: 4818 - protein, 537 aa, Homo sapiens
MGGAGILLLLLAGAGVVVAWRPPKGKCPLRCSCSKDSALCEGSPDLPVSFSPTLLSLSLVRTGVTQLKAGSFLRIPSLHLLLFTSNSFSVIEDDAFAGLSHLQYLFIEDNEIGSISKNALRGLRSLTHLSLANNHLETLPRFLFRGLDTLTHVDLRGNPFQCDCRVLWLLQWMPTVNASVGTGACAGPASLSHMQLHHLDPKTFKCRAIELSWFQTVGESALSVEPFSYQGEPHIVLAQPFAGRCLILSWDYSLQRFRPEEELPAASVVSCKPLVLGPSLFVLAARLWGGSQLWARPSPGLRLAPTQTLAPRRLLRPNDAELLWLEGQPCFVVADASKAGSTTLLCRDGPGFYPHQSLHAWHRDTDAEALELDGRPHLLLASASQRPVLFHWTGGRFERRTDIPEAEDVYATRHFQAGGDVFLCLTRYIGDSMVMRWDGSMFRLLQQLPSRGAHVFQPLLIARDQLAILGSDFAFSQVLRLEPDKGLLEPLQELGPPALVAPRAFAHITMAGRRFLFAACFKGPTQIYQHHEIDLSA

SEQ ID NO: 4819 - protein, 185 aa, Homo sapiens
MSAFNLLHLVTKSQPVALRACGLPSGSCRDKKNCKVVFSQQELRKRLTPLQYHVTQEKGTESAFEGEYTHHKDPGIYKCVVCGTPLFKSETKFDSGSGWPSFHDVINSEAITFTDDFSYGMHRVETSCSQCGAHLGHIFDDGPRPTGKRYCINSAALSFTPADSSGTAEGGSGVASPAQADKAEL

SEQ ID NO: 4820 - protein, 953 aa, Homo sapiens
MEESSSVAMLVPDIGEQEAILTAESIISPSLEIDEQRKTKPDPLIHVIQKLSKIVENEKSQKCLLIGKKRPRSSAATHSLETQELCEIPAKVIQSPAADTRRAEMSQTNFTPDTLAQNEGKAMSYQCSLCKFLSSSFSVLKDHIKQHGQQNEVILMCSECHITSRSQEELEAHVVNDHDNDANIHTQSKAQQCVSPSSSLCRKTTERNETIPDIPVSVDNLQTHTVQTASVAEMGRRKWYAYEQYGMYRCLFCSYTCGQQRMLKTHAWKHAGEVDCSYPIFENENEPLGLLDSSAAAAPGGVDAVVIAIGESELSIHNGPSVQVQICSSEQLSSSSPLEQSAERGVHLSQSVTLDPNEEEMLEVISDAEENLIPDSLLTSAQKIISSSPNKKGHVNVIVERLPSAEETLSQKRFLMNTEMEEGKDLSLTEAQIGREGMDDVYRADKCTVDIGGLIIGWSSSEKKDELMNKGLATDENAPPGRRRTNSESLRLHSLAAEALVTMPIRAAELTRANLGHYGDINLLDPDTSQRQVDSTLAAYSKMMSPLKNSSDGLTSLNQSNSTLVALPEGRQELSDGQVKTGISMSLLTVIEKLRERTDQNASDDDILKELQDNAQCQPNSDTSLSGNNVVEYIPNAERPYRCRLCHYTSGNKGYIKQHLRVHRQRQPYQCPICEHIADNSKDLESHMIHHCKTRIYQCKQCEESFHYKSQLRNHEREQHSLPDTLSIATSNEPRISSDTADGKCVQEGNKSSVQKQYRCDVCDYTSTTYVGVRNHRRIHNSDKPYRCSLCGYVCSHPPSLKSHMWKHASDQNYNYEQVNKAINDAISQSGRVLGKSPGKTQLKSSEESADPVTGSSENAVSSSELMSQTPSEVLGTNENEKLSPTSNTSYSLEKISSLAPPSMEYCVLLFCCCICGFESTSKENLLDHMKEHEGEIVNIILNKDHNTALNTN

SEQ ID NO: 4821 - protein, 350 aa, Homo sapiens
MKPLVLLVALLLWPSSVPAYPSITVTPDEEQNLNHYIQVLENLVRSVPSGEPGREKKSNSPKHVYSIASKGSKFKELVTHGDASTENDVLTNPISEETTTFPTGGFTPEIGKKKHTESTPFWSIKPNNVSIVLHAEEPYIENEEPEPEPEPAAKQTEAPRMLPVVTESSTSPYVTSYKSPVTTLDKSTGIGISTESEDVPQLSGETAIEKPEEFGKHPESWNNDDILKKILDINSQVQQALLSDTSNPAYREDIEASKDHLKRSLALAAAAEHKLKTMYKSQLLPVGRTSNKIDDIETVINMLCNSRSKLYEYLDIKCVPPEMREKAATVFNTLKNMCRSRRVTALLKVY

SEQ ID NO: 4822 - protein, 148 aa, Homo sapiens
MKLLVLAVLLTVAAADSGISPRAVWQFRKMIKCVIPGSDPFLEYNNYGCYCGLGGSGTPVDELDKCCQTHDNCYDQAKKLDSCKFLLDNPYTHTYSYSCSGSAITCSSKNKECEAFICNCDRNAAICFSKAPYNKAHKNLDTKKYCQS

SEQ ID NO: 4823 - protein, 314 aa, Homo sapiens
MAFVTRQFMRSVSSSSTASASAKKIIVKHVTVIGGGLMGAGIAQVAAATGHTVVLVDQTEDILAKSKKGIEESLRKVAKKKFAENLKAGDEFVEKTLSTIATSTDAASVVHSTDLVVEAIVENLKVKNELFKRLDKFAAEHTIFASNTSSLQITSIANATTRQDRFAGLHFFNPVPVMKLVEVIKTPMTSQKTFESLVDFSKALGKHPVSCKDTPGFIVNRLLVPYLMEAIRLYERGDASKEDIDTAMKLGAGYPMGPFELLDYVGLDTTKFIVDGWHEMDAENPLHQPSPSLNKLVAENKFGKKTGEGFYKYK

SEQ ID NO: 4824 - protein, 245 aa, Homo sapiens
MDGTRTSLDIEEYSDTEVQKNQVLTLEEWQDKWVNGKTAFHQEQGHQLLKKHLDTFLKGKSGLRVFFPLCGKAVEMKWFADRGHSVVGVEISELGIQEFFTEQNLSYSEEPITEIPGTKVFKSSSGNISLYCCSIFDLPRTNIGKFDMIWDRGALVAINPGDRKCYADTMFSLLGKKFQYLLCVLSYDPTKHPGPPFYVPHAEIERLFGKICNIRCLEKVDAFEERHKSWGIDCLFEKLYLLTEK

SEQ ID NO: 4825 - protein, 279 aa, Homo sapiens [sequence omitted]

SEQ ID NO: 4826 - protein, 199 aa, Homo sapiens
MALNGAEVDDFSWEPPTEAETKVLQARRERQDRISRLMGDYLLRGYRMLGETCADCGTILLQDKQRKIYCVACQELDSDVDKDNPALNAQAALSQAREHQLASASELPLGSRPAPQPPVPRPEHCEGAAAGLKAAQGPPAPAVPPNTDVMACTQTALLQKLTWASAELGSSTSLETSIQLCGLIRACAEALRSLQQLQH

SEQ ID NO: 4827 - protein, 118 aa, Homo sapiens
MKVVGNYRVNTANSSTDTSGEHLTCLRSQLFVAYRNGRVDEAVSLGFLDCWIGGDLTNFKGCYLTNQLPIQIFTAIFDMNTDVIILSQFMYYRLKNQKKKISEEDLRKELHFCCLHWP

SEQ ID NO: 4828 - protein, 763 aa, Homo sapiens
MNQKTILVLLILAVITIFALVCVLLVGRGGDGGEPSQLPHCPSVSPSAQPWTHPGQSQLFADLSREELTAVMRFLTQRLGPGLVDAAQARPSDNCVFSVELQLPPKAAALAHLDRGSPPPAREALAIVFFGRQPQPNVSELVVGPLPHPSYMRDVTVERHGGPLPYHRRPVLFQEYLDIDQMIFNRELPQASGLLHHCCFYKHRGRNLVTMTTAPRGLQSGDRATWFGLYYNISGAGFFLHHVGLELLVNHKALDPARWTIQKVFYQGRYYDSLAQLEAQFEAGLVNVVLIPDNGTGGSWSLKSPVPPGPAPPLQFYPQGPRFSVQGSRVASSLWTFSFGLGAFSGPRIFDVRFQGERLVYEISLQEALAIYGGNSPAAMTTRYVDGGFGMGKYTTPLTRGVDCPYLATYVDWHFLLESQAPKTIRDAFCVFEQNQGLPLRRHHSDLYSHYFGGLAETVLVVRSMSTLLNYDYVWDTVFHPSGAIEIRFYATGYISSAFLFGATGKYGNQVSEHTLGTVHTHSAHFKVDLDVAGLENWVWAEDMVFVPMAVPWSPEHQLQRLQVTRKLLEMEEQAAFLVGSATPRYLYLASNHSNKWGHPRGYRIQMLSFAGEPLPQNSSMARGFSWERYQLAVTQRKEEEPSSSSVFNQNDPWAPTVDFSDFINNETIAGKDLVAWVTAGFLHIPHAEDIPNTVTVGNGVGFFLRPYNFFDEDPSFYSADSIYFRGDQDAGACEVNPLACLPQAAACAPDLPAFSHGGFSHN

SEQ ID NO: 4829 - protein, 168 aa, Homo sapiens
MGPRARPALLLLMLLQTAVLQGRLLLPPLVKVTHHVTSSVTTLRCRALNYYPQNITMKWLKDKQPMDAKEFEPKDVLPNGDGTYQGWITLAVPPGEEQRYTCQVEHPGLDQPLIVIWEPSPSGTLVIGVISGIAVFVVILFIGILFIILRKRQGSRGAMGHYVLAERE

SEQ ID NO: 4830 - protein, 1682 aa, Homo sapiens
MNQNTTEPVAATETLAEVPEHVLRGLPEEVRLFPSAVDKTRIGVWATKPILKGKKFGPFVGDKKKRSQVKNNVYMWEVYYPNLGWMCIDATDPEKGNWLRYVNWACSGEEQNLFPLEINRAIYYKTLKPIAPGEELLVWYNGEDNPEIAAAIEEERASARSKRSSPKSRKGKKKSQENKNKGNKIQDIQLKTSEPDFTSANMRDSAEGPKEDEEKPSASALEQPATLQEVASQEVPPELATPAPAWEPQPEPDERLEAAACEVNDLGEEEEEEEEEDEEEEEDDDDDELEDEGEEEASMPNENSVKEPEIRCDEKPEDLLEEPKTTSEETLEDCSEVTPAMQIPRTKEEANGDVFETFMFPCQHCERKFTTKQGLERHMHIHISTVNHAFKCKYCGKAFGTQINRRRHERRHEAGLKRKPSQTLQPSEDLADGKASGENVASKDDSSPPSLGPDCLIMNSEKASQDTINSSVVEENGEVKELHPCKYCKKVFGTHTNMRRHQRRVHERHLIPKGVRRKGGLEEPQPPAEQAQATQNVYVPSTEPEEEGEADDVYIMDISSNISENLNYYIDGKIQTNNNTSNCDVIEMESASADLYGINCLLTPVTVEITQNIKTTQVPVTEDLPKEPLGSTNSEAKKRRTASPPALPKIKAETDSDPMVPSCSLSLPLSISTTEAVSFHKEKSVYLSSKLKQLLQTQDKLTPAGISATEIAKLGPVCVSAPASMLPVTSSRFKRRTSSPPSSPQHSPALRDFGKPSDGKAAWTDAGLTSKKSKLESHSDSPAWSLSGRDERETVSPPCFDEYKMSKEWTASSAFSSVCNQQPLDLSSGVKQKAEGTGKTPVQWESVLDLSVHKKHCSDSEGKEFKESHSVQPTCSAVKKRKPTTCMLQKVLLNEYNGIDLPVENPADGTRSPSPCKSLEAQPDPDLGPGSGFPAPTVESTPDVCPSSPALQTPSLSSGQLPPLLIPTDPSSPPPCPPVLTVATPPPPLLPTVPLPAPSSSASPHPCPSPLSNATAQSPLPILSPTVSPSPSPIPPVEPLMSAASPGPPTLSSSSSSSSSSSSFSSSSSSSSPSPPPLSAISSVVSSGDNLEASLPMISFKQEELENEGLKPREEPQSAAEQDVVVQETFNKNFVCNVCESPFLSIKDLTKHLSIHAEEWPFKCEFCVQLFKDKTDLSEHRFLLHGVGNIFVCSVCKKEFAFLCNLQQHQRDLHPDKVCTHHEFESGTLRPQNFTDPSKAHVEHMQSLPEDPLETSKEEEELNDSSEELYTTIKIMASGIKTKDPDVRLGLNQHYPSFKPPPFQYHHRNPMGIGVTATNFTTHNIPQTFTTAIRCTKCGKGVDNMPELHKHILACASASDKKRYTPKKNPVPLKQTVQPKNGVVVLDNSGKNAFRRMGQPKRLNFSVELSKMSSNKLKLNALKKKNQLVQKAILQKNKSAKQKADLKNACESSSHICPYCNREFTYIGSLNKHAAFSCPKKPLSPPKKKVSHSSKKGGHSSPASSDKNSNSNHRRRTADAEIKMQSMQTPLGKTRARSSGPTQVPLPSSSFRSKQNVKFAASVKSKKPSSSSLRNSSPIRMAKITHVEGKKPKAVAKNHSAQLSSKTSRSLHVRVQKSKAVLQSKSTLASKKRTDRFNIKSRERSGGPVTRSLQLAAAADLSENKREDGSAKQELKDFRNFL

SEQ ID NO: 4831 - protein, 345 aa, Homo sapiens
MAQHHLWILLLCLQTWPEAAGKDSEIFTVNGILGESVTFPVNIQEPRQVKIIAWTSKTSVAYVTPGDSETAPVVTVTHRNYYERIHALGPNYNLVISDLRMEDAGDYKADINTQADPYTTTKRYNLQIYRRLGKPKITQSLMASVNSTCNVTLTCSVEKEEKNVTYNWSPLGEEGNVLQIFQTPEDQELTYTCTAQNPVSNNSDSISARQLCADIAMGFRTHHTGLLSVLAMFFLLVLILSSVFLFRLFKRRQGRIFPEGSCLNTFTKNPYAASKKTIYTYIMASRNTQPAESRIYDEILQSKVLPSKEEPVNTVYSEVQFADKMGKASTQDSKPPGTSSYEIVI

SEQ ID NO: 4832 - protein, 373 aa, Homo sapiens
MGSQVSVESGALHVVIVGGGFGGIAAASQLQALNVPFMLVDMKDSFHHNVAALRASVETGFAKKTFISYSVTFKDNFRQGLVVGIDLKNQMVLLQGGEALPFSHLILATGSTGPFPGKFNEVSSQQAAIQAYEDMVRQVQRSRFIVVVGGGSAGVEMAAEIKTEYPEKEVTLIHSQVALADKELLPSVRQEVKEILLRKGVQLLLSERVSNLEELPLNEYREYIKVQTDKGTEVATNLVILCTGIKINSSAYRKAFESRLASSGALRVNEHLQVEGHSNVYAIGDCADVRTPKMAYLAGLHANIAVANIVNSVKQRPLQAYKPGALTFLLSMGRNDGVGQISGFYVGRLMVRLTKSRDLFVSTSWKTMRQSPP

SEQ ID NO: 4833 - protein, 224 aa, Homo sapiens
MRTQSLLLLGALLAVGSQLPAVFGRKKGEKSGGCPPDDGPCLLSVPDQCVEDSQCPLTRKCCYRACFRQCVPRVSVKLGSCPEDQLRCLSPMNHLCHKDSDCSGKKRCCHSACGRDCRDPARGTAPGCPGQANSDLGSVALHLSWGPTERVHDGRPGALPAGQHYLYQRWFQPSDNHWPADTSLQPIHPWFLLLGVKVHSLSSEEGLCITPVLCTTAIRASHPS

SEQ ID NO: 4834 - protein, 901 aa, Homo sapiens
MEANQCPLVVEPSYPDLVINVGEVTLGEENRKKLQKIQRDQEKERVMRAACALLNSGGGVIRMAKKVEHPVEMGLDLEQSLRELIQSSDLQAFFETKQQGRCFYIFVKSWSSGPFPEDRSVKPRLCSLSSSLYRRSETSVRSMDSREAFCFLKTKRKPKILEEGPFHKIHKGVYQELPNSDPADPNSDPADLIFQKDYLEYGEILPFPESQLVEFKQFSTKHFQEYVKRTIPEYVPAFANTGGGYLFIGVDDKSREVLGCAKENVDPDSLRRKIEQAIYKLPCVHFCQPQRPITFTLKIVNVLKRGELYGYACMIRVNPFCCAVFSEAPNSWIVEDKYVCSLTTEKWVGMMTDTDPDLLQLSEDFECQLSLSSGPPLSRPVYSKKGLEHKKELQQLLFSVPPGYLRYTPESLWRDLISEHRGLEELINKQMQPFFRGILIFSRSWAVDLNLQEKPGVICDALLIAQNSTPILYTILREQDAEGQDYCTRTAFTLKQKLVNMGGYTGKVCVRAKVLCLSPESSAEALEAAVSPMDYPASYSLAGTQHMEALLQSLVIVLLGFRSLLSDQLGCEVLNLLTAQQYEIFSRSLRKNRELFVHGLPGSGKTIMAMKIMEKIRNVFHCEAHRILYVCENQPLRNFISDRNICRAETRKTFLRENFEHIQHIVIDEAQNFRTEDGDWYGKAKSITRRAKGGPGILWIFLDYFQTSHLDCSGLPPLSDQYPREELTRIVRNADPIAKYLQKEMQVIRSNPSFNIPTGCLEVFPEAEWSQGVQGTLRIKKYLTVEQIMTCVADTCRRFFDRGYSPKDVAVLVSTAKEVEHYKYELLKAMRKKRVVQLSDACDMLGDHIVLDSVRRFSGLERSIVFGIHPRTADPAILPNVLICLASRAKQHLYIFPWGGH

SEQ ID NO: 4835 - protein, 895 aa, Homo sapiens
MRMSVGLSLLLPLSGRTFLLLLSVVMAQSHWPSEPSEAVRDWENQLEASMHSVLSDLHEAVPTVVGIPDGTAVVGRSFRVTIPTDLIASSGDIIKVSAAGKEALPSWLHWDSQSHTLEGLPLDTDKGVHYISVSATRLGANGSHIPQTSSVFSIEVYPEDHSELQSVRTASPDPGEVVSSACAADEPVTVLTVILDADLTKMTPKQRIDLLHRMRSFSEVELHNMKLVPVVNNRLFDMSAFMAGPGNAKKVVENGALLSWKLGCSLNQNSVPDIHGVEAPAREGAMSAQLGYPVVGWHIANKKPPLPKRVRRQIHATPTPVTAIGPPTTAIQEPPSRIVPTPTSPAIAPPTETMAPPVRDPVPGKPTVTIRTRGAIIQTPTLGPIQPTRVSEAGTTVPGQIRPTMTIPGYVEPTAVATPPTTTTKKPRVSTPKPATPSTDSTTTTTRRPTKKPRTPRPVPRVTTKVSITRLETASPPTRIRTTTSGVPRGGEPNQRPELKNHIDRVDAWVGTYFEVKIPSDTFYDHEDTTTDKLKLTLKLREQQLVGEKSWVQFNSNSQLMYGLPDSSHVGKHEYFMHATDKGGLSAVDAFEIHVHRRPQGDRAPARFKAKFVGDPALVLNDIHKKIALVKKLAFAFGDRNCSTITLQNITRGSIVVEWTNNTLPLEPCPKEQIAGLSRRIAEDDGKPRPAFSNALEPDFKATSITVTGSGSCRHLQFIPVVPPRRVPSEAPPTEVPDRDPEKSSEDDVYLHTVIPAVVVAAILLIAGIIAMICYRKKRKGKLTLEDQATFIKKGVPIIFADELDDSKPPPSSSMPLILQEEKAPLPPPEYPNQSVPETTPLNQDTMGEYTPLRDEDPNAPPYQPPPPFTAPMEGKGSRPKNMTPYRSPPPYVPP

SEQ ID NO: 4836 - protein, 433 aa, Homo sapiens
MEAVYLVVNGLGLVLDVLTLVLDLNFLLVSSLLASLAWLLAFVYNLPHTVLTSLLHLGRGVLLSLLALIEAVVRFTCGGLQALCTLLYSCCSGLESLKLLGHLASHGALRSREILHRGVLNVVSSGHALLRQACDICAIAMSLVAYVINSLVNICLIGTQNLFSLVLALWDAVTGPLWRMTDVVAAFLAHISSSAVAMAILLWTPCQLALELLASAARLLASFVLVNLTGLVLLACVLAVTVTVLHPDFTLRLATQALSQLHARPSYHRLREDVMRLSRLALGSEAWRRVWSRSLQLASWPNRGGAPGAPQGDPMRVFSVRTRRQDTLPEAGRRSEAEEEEARTIRVTPVRGRERLNEEEPPGGQDPWKLLKEQEERKKCVICQDQSKTVLLLPCRHLCLCQACTEILMRHPVYHRNCPLCRRGILQTLNVYL

SEQ ID NO: 4837 - protein, 480 aa, Homo sapiens
MSAEVIHQVEEALDTDEKEMLLFLCRDVAIDVVPPNVRDLLDILRERGKLSVGDLAELLYRVRRFDLLKRILKMDRKAVETHLLRNPHLVSDYRVLMAEIGEDLDKSDVSSLIFLMKDYMGRGKISKEKSFLDLVVELEKLNLVAPDQLDLLEKCLKNIHRIDLKTKIQKYKQSVQGAGTSYRNVLQAAIQKSLKDPSNNFRLHNGRSKEQRLKEQLGAQQEPVKKSIQESEAFLPQSIPEERYKMKSKPLGICLIIDCIGNETELLRDTFTSLGYEVQKFLHLSMHGISQILGQFACMPEHRDYDSFVCVLVSRGGSQSVYGVDQTHSGLPLHHIRRMFMGDSCPYLAGKPKMFFIQNYVVSEGQLEDSSLLEVDGPAMKNVEFKAQKRGLCTVHREADFFWSLCTADMSLLEQSHSSPSLYLQCLSQKLRQERKRPLLDLHIELNGYMYDWNSRVSAKEKYYVWLQHTLRKKLILSYT

SEQ ID NO: 4838 - protein, 271 aa, Homo sapiens
MGNGGRSGLQQGKGNVDGVAATPTAASASCQYRCIECNQEAKELYRDYNHGVLKITICKSCQKPVDKYIEYDPVIILINAILCKAQAYRHILFNTQINIHGKLCIFCLLCEAYLRWWQLQDSNQNTAPDDLIRYAKEWDFYRMFAIAALEQTAYFIGIFTFLWVERPMTAKKKPNFILLLKALLLSSYGKLLLIPAVIWEHDYTSVCLKLIKVFVLTSNFQAIRVTLNINRKLSFLAVLSGLLLESIMVYFFQSMEWDVGSDYAIFKSQDF

SEQ ID NO: 4839 - protein, 472 aa, Homo sapiens
MAGKVRSLLPPLLLAAAGLAGLLLLCVPTRDVREPPALKYGIVLDAGSSHTSMFIYKWPADKENDTGIVGQHSSCDVPGGGISSYADNPSGASQSLVGCLEQALQDVPKERHAGTPLYLGATAGMRLLNLTNPEASTSVLMAVTHTLTQYPFDFRGARILSGQEEGVFGWVTANYLLENFIKYGWVGRWFRPRKGTLGAMDLGGASTQITFETTSPAEDRASEVQLHLYGQHYRVYTHSFLCYGRDQVLQRLLASALQTHGFHPCWPRGFSTQVLLGDVYQSPCTMAQRPQNFNSSARVSLSGSSDPHLCRDLVSGLFSFSSCPFSRCSFNGVFQPPVAGNFVAFSAFFYTVDFLRTSMGLPVATLQQLEAAAVNVCNQTWAQQLLSRGYGFDERAFGGVIFQKKAADTAVGWALGYMLNLTNLIPADPPGLRKGTDFSSWVVLLLLFASALLAALVLLLRQVHSAKLPSTI

SEQ ID NO: 4840 - protein, 2322 aa, Homo sapiens
MQSGPRPPLPAPGLALALTLTMLARLASAASFFGENHLEVPVATALTDIDLQLQFSTSQPEALLLLAAGPADHLLLQLYSGRLQVRLVLGQEELRLQTPAETLLSDSIPHTVVLTVVEGWATLSVDGFLNASSAVPGAPLEVPYGLFVGGTGTLGLPYLRGTSRPLRGCLHAATLNGRSLLRPLTPDVHEGCAEEFSASDDVALGFSGPHSLAAFPAWGTQDEGTLEFTLTTQSRQAPLAFQAGGRRGDFIYVDIFEGHLRAVVEKGQGTVLLHNSVPVADGQPHEVSVHINAHRLEISVDQYPTHTSNRGVLSYLEPRGSLLLGGLDAEASRHLQEHRLGLTPEATNASLLGCMEDLSVNGQRRGLREALLTRNMAAGCRLEEEEYEDDAYGHYEAFSTLAPEAWPAMELPEPCVPEPGLPPVFANFTQLLTISPLVVAEGGTAWLEWRHVQPTLDLMEAELRKSQVLFSVTRGARHGELELDIPGAQARKMFTLLDVVNRKARFIHDGSEDTSDQLVLEVSVTARVPMPSCLRRGQTYLLPIQVNPVNDPPHIIFPHGSLMVILEHTQKPLGPEVFQAYDPDSACEGLTFQVLGTSSGLPVERRDQPGEPATEFSCRELEAGSLVYVHRGGPAQDLTFRVSDGLQASPPATLKVVAIRPAIQIHRSTGLRLAQGSAMPILPANLSVETNAVGQDVSVLFRVTGALQFGELQKQGAGGVEGAEWWATQAFHQRDVEQGRVRYLSTDPQHHAYDTVENLALEVQVGQEILSNLSFPVTIQRATVWMLRLEPLHTQNTQQETLTTAHLEATLEEAGPSPPTFHYEVVQAPRKGNLQLQGTRLSDGQGFTQDDIQAGRVTYGATARASEAVEDTFRFRVTAPPYFSPLYTFPIHIGGDPDAPVLTNVLLVVPEGGEGVLSADHLFVKSLNSASYLYEVMERPRHGRLAWRGTQDKTTMVTSFTNEDLLRGRLVYQHDDSETTEDDIPFVATRQGESSGDMAWEEVRGVFRVAIQPVNDHAPVQTISRIFHVARGGRRLLTTDDVAFSDADSGFADAQLVLTRKDLLFGSIVAVDEPTRPIYRFTQEDLRKRRVLFVHSGADRGWIQLQVSDGQHQATALLEVQASEPYLRVANGSSLVVPQGGQGTIDTAVLHLDTNLDIRSGDEVHYHVTAGPRWGQLVRAGQPATAFSQQDLLDGAVLYSHNGSLSPRDTMAFSVEAGPVHTDATLQVTIALEGPLAPLKLVRHKKIYVFQGEAAEIRRDQLEAAQEAVPPADIVFSVKSPPSAGYLVMVSRGALADEPPSLDPVQSFSQEAVDTGRVLYLHSRPEAWSDAFSLDVASGLGAPLEGVLVELEVLPAAIPLEAQNFSVPEGGSLTLAPPLLRVSGPYFPTLLGLSLQVLEPPQHGALQKEDGPQARTLSAFSWRMVEEQLIRYVHDGSETLTDSFVLMANASEMDRQSHPVAFTVTVLPVNDQPPILTTNTGLQMWEGATAPIPAEALRSTDGDSGSEDLVYTIEQPSNGRVVLRGAPGTEVRSFTQAQLDGGLVLFSHRGTLDGGFRFRLSDGEHTSPGHFFRVTAQKQVLLSLKGSQTLTVCPGSVQPLSSQTLRASSSAGTDPQLLLYRVVRGPQLGRLFHAQQDSTGEALVNFTQAEVYAGNILYEHEMPPEPFWEAHDTLELQLSSPPARDVAATLAVAVSFEAACPQRPSHLWKNKGLWVPEGQRARITVAALDASNLLASVPSPQRSEHDVLFQVTQFPSRGQLLVSEEPLHAGQPHFLQSQLAAGQLVYAHGGGGTQQDGFHFRAHLQGPAGASVAGPQTSEAFAITVRDVNERPPQPQASVPLRLTRGSRAPISRAQLSVVDPDSAPGEIEYEVQRAPHNGFLSLVGGGLGPVTRFTQADVDSGRLAFVANGSSVAGIFQLSMSDGASPPLPMSLAVDILPSAIEVQLRAPLEVPQALGRSSLSQQQLRVVSDREEPEAAYRLIQGPQYGHLLVGGRPTSAFSQFQIDQGEVVFAFTNFSSSHDHFRVLALARGVNASAVVNVTVRALLHVWAGGPWPQGATLRLDPTVLDAGELANRTGSVPRFRLLEGPRHGRVVRVPRARTEPGGSQLVEQFTQQDLEDGRLGLEVGRPEGRAPGPAGDSLTLELWAQGVPPAVASLDFATEPYNAARPYSVALLSVPEAARTEAGKPESSTPTGEPGPMASSPEPAVAKGGFLSFLEANMFSVIIPMCLVLLLLALILPLLFYLRKRNKTGKHDVQVLTAKPRNGLAGDTETFRKVEPGQAIPLTAVPGQGPPPGGQPDPELLQFCRTPNPALKNGQYWV

SEQ ID NO: 4841 - protein, 348 aa, Homo sapiens
MGKDYYKILGIPSGANEDEIKKAYRKMALKYHPDKNKEPNAEEKFKEIAEAYDVLSDPKKRGLYDQYGEEGLKTGGGTSGGSSGSFHYTFHGDPHATFASFFGGSNPFDIFFASSRSTRPFSGFDPDDMDVDEDEDPFGAFGRFGFNGLSRGPRRAPEPLYPRRKVQDPPVVHELRVSLEEIYHGSTKRMKITRRRLNPDGRTVRTEDKILHIVIKRGWKEGTKITFPKEGDATPDNIPADIVFVLKDKPHAHFRRDGTNVLYSALISLKEALCGCTVNIPTIDGRVIPLPCNDVIKPGTVKRLRGEGLPFPKVPTQRGDLIVEFKVRFPDRLTPQTRQILKQHLPCS

SEQ ID NO: 4842 - protein, 828 aa, Homo sapiens
MLQGTCSVLLLWGILGAIQAQQQEVISPDTTERNNNCPEKTDCPIHVYFVLDTSESVTMQSPTDILLFHMKQFVPQFISQLQNEFYLDQVALSWRYGGLHFSDQVEVFSPPGSDRASFIKNLQGISSFRRGTFTDCALANMTEQIRQDRSKGTVHFAVVITDGHVTGSPCGGIKLQAERAREEGIRLFAVAPNQNLKEQGLRDIASTPHELYRNDYATMLPDSTEIDQDTINRIIKVMKHEAYGECYKVSCLEIPGPSGPKGYRGQKGAKGNMGEPGEPGQKGRQGDPGIEGPIGFPGPKGVPGFKGEKGEFGADGRKGAPGLAGKNGTDGQKGKLGRIGPPGCKGDPGNRGPDGYPGEAGSPGERGDQGGKGDPGRPGRRGPPGEIGAKGSKGYQGNSGAPGSPGVKGAKGGPGPRGPKGEPGRRGDPGTKGSPGSDGPKGEKGDPGPEGPRGLAGEVGNKGAKGDRGLPGPRGPQGALGEPGKQGSRGDPGDAGPRGDSGQPGPKGDPGRPGFSYPGPRGAPGEKGEPGPRGPEGGRGDFGLKGEPGRKGEKGEPADPGPPGEPGPRGPRGVPGPEGEPGPPGDPGLTECDVMTYVRETCGCCDCEKRCGALDVVFVIDSSESIGYTNFTLEKNFVINVVNRLGAIAKDPKSETGTRVGVVQYSHEGTFEAIQLDDERIDSLSSFKEAVKNLEWIAGGTWTPSALKFAYDRLIKESRRQKTRVFAVVITDGRHDPRDDDLNLRALCDRDVTVTAIGIGDMFHEKHESENLYSIACDKPQQVRNMTLFSDLVAEKFIDDMEDVLCPDPQIVCPDLPCQTGLDGAVLC

SEQ ID NO: 4843 - protein, 220 aa, Homo sapiens
MSAAGAGAGVEAGFSSEELLSLRFPLHRACRDGDLATLCSLLQQTPHAHLASEDSFYGWTPVHWAAHFGKLECLVQLVRAGATLNVSTTRYAQTPAHIAAFGGHPQCLVWLIQAGANINKPDCEGETPIHKAARSGSLECISALVANGAHVEFISQSSVHSCLPGELQHGVTFDPSVLIQCLKPEKCQWPDSSRHCTNPGFPRVCPVSLEPPELSSEPFL

SEQ ID NO: 4844 - protein, 635 aa, Homo sapiens
MAPPLLLLLLASGAAACPLPCVCQNLSESLSTLCAHRGLLFVPPNVDRRTVELRLADNFIQALGPPDFRNMTGLVDLTLSRNAITRIGARAFGDLESLRSLHLDGNRLVELGTGSLRGPVNLQHLILSGNQLGRIAPGAFDDFLESLEDLDLSYNNLRQVPWAGIGAMPALHTLNLDHNLIDALPPGAFAQLGQLSRLDLTSNRLATLAPDPLFSRGRDAEASPAPLVLSFSGNPLHCNCELLWLRRLARPDDLETCASPPGLAGRYFWAVPEGEFSCEPPLIARHTQRLWVLEGQRATLRCRALGDPAPTMHWVGPDDRLVGNSSRARAFPNGTLEIGVTGAGDAGGYTCIATNPAGEATARVELRVLALPHGGNSSAEGGRPGPSDIAASARTAAEGEGTLESEPAVQVTEVTATSGLVSWGPGRPADPVWMFQIQYNSSEDETLIYRIVPASSHHFLLKHLVPGADYDLCLLALSPAAGPSDLTATRLLGCAHFSTLPASPLCHALQAHVLGGTLTVAVGGVLVAALLVFTVALLVRGRGAGNGRLPLKLSHVQSQTNGGPSPTPKAHPPRSPPPRPQRSCSLDLGDAGCYGYARRLGGAWARRSHSVHGGLLGAGCRGVGGSAERLEESVV

SEQ ID NO: 4845 - protein, 910 aa, Homo sapiens
MGTPRAQHPPPPQLLFLILLSCPWIQGLPLKEEEILPEPGSETPTVASEALAELLHGALLRRGPEMGYLPGSDRDPTLATPPAGQTLAVPSLPRATEPGTGPLTTAVTPNGVRGAGPTAPELLTPPPGTTAPPPPSPASPGPPLGPEGGEEETTTTIITTTTVTTTVTSPVLCNNNISEGEGYVESPDLGSPVSRTLGLLDCTYSIHVYPGYGIEIQVQTLNLSQEEELLVLAGGGSPGLAPRLLANSSMLGEGQVLRSPTNRLLLHFQSPRVPRGGGFRIHYQAYLLSCGFPPRPAHGDVSVTDLHPGGTATFHCDSGYQLQGEETLICLNGTRPSWNGETPSCMASCGGTIHNATLGRIVSPEPGGAVGPNLTCRWVIEAAEGRRLHLHFERVSLDEDNDRLMVRSGGSPLSPVIYDSDMDDVPERGLISDAQSLYVELLSETPANPLLLSLRFEAFEEDRCFAPFLAHGNVTTTDPEYRPGALATFSCLPGYALEPPGPPNAIECVDPTEPHWNDTEPACKAMCGGELSEPAGVVLSPDWPQSYSPGQDCVWGVHVQEEKRILLQVEILNVREGDMLTLFDGDGPSARVLAQLRGPQPRRRLLSSGPDLTLQFQAPPGPPNPGLGQGFVLHFKEVPRNDTCPELPPPEWGWRTASHGDLIRGTVLTYQCEPGYELLGSDILTCQWDLSWSAAPPACQKIMTCADPGEIANGHRTASDAGFPVGSHVQYRCLPGYSLEGAAMLTCYSRDTGTPKWSDRVPKCALKYEPCLNPGVPENGYQTLYKHHYQAGESLRFFCYEGFELIGEVTITCVPGHPSQWTSQPPLCKVTQTTDPSRQLEGGNLALAILLPLGLVIVLGSGVYIYYTKLQGKSLFGFSGSHSYSPITVESDFSNPLYEAGDTREYEVSI

SEQ ID NO: 4846 - protein, 587 aa, Homo sapiens
MLLCTARLVGLQLLISCCWAFACHSTESSPDFTLPGDYLLAGLFPLHSGCLQVRHRPEVTLCDRSCSFNEHGYHLFQAMRLGVEEINNSTALLPNITLGYQLYDVCSDSANVYATLRVLSLPGQHHIELQGDLLHYSPTVLAVIGPDSTNRAATTAALLSPFLVPMLLEQIHKVHFLLHKDTVAFNDNRDPLSSYNIIAWDWNGPKWTFTVLGSSTWSPVQLNINETKIQWHGKDNQVPKSVCSSDCLEGHQRVVTGFHHCCFECVPCGAGTFLNKSDLYRCQPCGKEEWAPEGSQTCFPRTVVFLALREHTSWVLLAANTLLLLLLLGTAGLFAWHLDTPVVRSAGGRLCFLMLGSLAAGSGSLYGFFGEPTRPACLLRQALFALGFTIFLSCLTVRSFQLIIIFKFSTKVPTFYHAWVQNHGAGLFVMISSAAQLLICLTWLVVWTPLPAREYQRFPHLVMLECTETNSLGFILAFLYNGLLSISAFACSYLGKDLPENYNEAKCVTFSLLFNFVSWIAFFTTASVYDGKYLPAANMMAGLSSLSSGFGGYFLPKCYVILCRPDLNSTEHFQASIQDYTRRCGST

SEQ ID NO: 4847 - protein, 260 aa, Homo sapiens
MLFLALGSPWAVELPLCGRRTALCAAAALRGPRASVSRASSSSGPSGPVAGWSTGPSGAARLLRRPGRAQIPVYWEGYVRFLNTPSDKSEDGRLIYTGNMARAVFGVKCFSYSTSLIGLTFLPYIFTQNNAISESVPLPIQIIFYGIMGSFTVITPVLLHFITKGYVIRLYHEATTDTYKAITYNAMLAETSTVFHQNDVKIPDAKHVFTTFYAKTKSLLVNPVLFPNREDYIHLMGYDKEEFILYMEETSEEKRHKDDK

SEQ ID NO: 4848 - protein, 325 aa, Homo sapiens
MAASCVLLHTGQKMPLIGLGTWKSEPGQVKAAVKYALSVGYRHIDCAAIYGNEPEIGEALKEDVGPGKAVPREELFVTSKLWNTKHHPEDVEPALRKTLADLQLEYLDLYLMHWPYAFERGDNPFPKNADGTICYDSTHYKETWKALEALVAKGLVQALGLSNFNSRQIDDILSVASVRPAVLQVECHPYLAQNELIAHCQARGLEVTAYSPLGSSDRAWRDPDEPVLLEEPVVLALAEKYGRSPAQILLRWQVQRKVICIPKSITPSRILQNIKVFDFTFSPEEMKQLNALNKNWRYIVPMLTVDGKRVPRDAGHPLYPFNDPY

SEQ ID NO: 4849 - protein, 195 aa, Homo sapiens
MSAARPQFSIDDAFELSLEDGGPGPESSGVARFGPLHFERRARFEVADEDKQSRLRYQNLENDEDGAQASPEPDGGVGTRDSSRTSIRSSQWSFSTISSSTQRSYNTCCSWTQHPLIQKNRRVVLASFLLLLLGLVLILVGVGLEATPSPGVSSAIFFVPGFLLLVPGVYHVIFIYCAVKGHRGFQFFYLPYFEK

SEQ ID NO: 4850 - protein, 458 aa, Homo sapiens
MSTEGGFGGTSSSDAQQSLQSFWPRVMEEIRNLTVKDFRVQELPLARIKKIMKLDEDVKMISAEAPVLFAKAAQIFITELTLRAWIHTEDNKRRTLQRNDIAMAITKFDQFDFLIDIVPRDELKPPKRQEEVRQSVTPAEPVQYYFTLAQQPTAVQVQGQQQGQQTTSSTTTIQPGQIIIAQPQQGQTTPVTMQVGEGQQVQIVQAQPQGQAQQAQSGTGQTMQVMQQIITNTGEIQQIPVQLNAGQLQYIRLAQPVSGTQVVQGQIQTLATNAQQGQRNASQGKPRRCLKETLQITQTEVQQGQQQFSQFTDGQRNSVQQARVSELTGEAEPREVKATGNSTPCTSSLPTTHPPSHRAGASCVCCSQPQQSSTSPPPSDALQWVVVEVSGTPNQLETHRELHAPLPGMTSLSPLHPSQQLYQIQQVTMPAGQDLAQPMFIQSANQPSDGQAPQVTGD

SEQ ID NO: 4851 - protein, 621 aa, Homo sapiens
MSGCGLFLRTTAAARACRGLVVSTANRRLLRTSPPVRAFAKELFLGKIKKKEVFPFPEVSQDELNEINQFLGPVEKFFTEEVDSRKIDQEGKIPDETLEKLKSLGLFGLQVPEEYGGLGFSNTMYSRLGEIISMDGSITVTLAAHQAIGLKGIILAGTEEQKAKYLPKLASGEHIAAFCLTEPASGSDAASIRSRATLSEDKKHYILNGSKVWITNGGLANIFTVFAKTEVVDSDGSVKDKITAFIVERDFGGVTNGKPEDKLGIRGSNTCEVHFENTKIPVENILGEVGDGFKVAMNILNSGRFSMGSVVAGLLKRLIEMTAEYACTRKQFNKRLSEFGLIQEKFALMAQKAYVMESMTYLTAGMLDQPGFPDCSIEAAMVKVFSSEAAWQCVSEALQILGGLGYTRDYPYERILRDTRILLIFEGTNEILRMYIALTGLQHAGRILTTRIHELKQAKVSTVMDTVGRRLRDSLGRTVDLGLTGNHGVVHPSLADSANKFEENTYCFGRTVETLLLRFGKTIMEEQLVLKRVANILINLYGMTAVLSRASRSIRIGLRNHDHEVLLANTFCVEAYLQNLFSLSQLDKYAPENLDEQIKKVSQQILEKRAYICAHPLDRTC

SEQ ID NO: 4852 - protein, 553 aa, Homo sapiens
MATDTSQGELVHPKALPLIVGAQLIHADKLGEKVEDSTMPIRRTVNSTRETPPKSKLAEGEEEKPEPDISSEESVSTVEEQENETPPATSSEAEQPKGEPENEEKEENKSSEETKKDEKDQSKEKEKKVKKTIPSWATLSASQLARAQKQTPMASSPRPKMDAILTEAIKACFQKSGASVVAIRKYIIHKYPSLELERRGYLLKQALKRELNRGVIKQVKGKGASGSFVVVQKSRKTPQKSRNRKNRSSAVDPEPQVKLEDVLPLAFTRLCEPKEASYSLIRKYVSQYYPKLRVDIRPQLLKNALQRAVERGQLEQITGKGASGTFQLKKSGEKPLLGGSLMEYAILSAIAAMNEPKTCSTTALKKYVLENHPGTNSNYQMHLLKKTLQKCEKNGWMEQISGKGFSGTFQLCFPYYPSPGVLFPKKEPDDSRDEDEDEDESSEEDSEDEEPPPKRRLQKKTPAKSPGKAASVKQRGSKPAPKVSAAQRGKARPLPKKAPPKAKTPAKKTRPSSTVIKKPSGGSSKKPATSARKEVKLPGKGKSTMKKSFRVKK

SEQ ID NO: 4853 - protein, 167 aa, Homo sapiens
MHWGTLCGFLWLWPYLFYVQAVPIQKVQDDTKTLIKTIVTRINDISHTQSVSSKQKVTGLDFIPGLHPILTLSKMDQTLAVYQQILTSMPSRNVIQISNDLENLRDLLHVLAFSKSCHLPWASGLETLDSLGGVLEASGYSTEVVALSRLQGSLQDMLWQLDLSPGC

SEQ ID NO: 4854 - protein, 452 aa, Homo sapiens
MAAPSAGSWSTFQHKELMAADRGRRILGVCGMHPHHQETLKKNRVVLAKQLLLSELLEHLLEKDIITLEMRELIQAKVGSFSQNVELLNLLPKRGPQAFDAFCEALRETKQGHLEDMLLTTLSGLQHVLPPLSCDYDLSLPFPVCESCPLYKKLRLSTDTVEHSLDNKDGPVCLQVKPCTPEFYQTHFQLAYRLQSRPRGLALVLSNVHFTGEKELEFRSGGDVDHSTLVTLFKLLGYDVHVLCDQTAQEMQEKLQNFAQLPAHRVTDSCIVALLSHGVEGAIYGVDGKLLQLQEVFQLFDNANCPSLQNKPKMFFIQACRGDETDRGVDQQDGKNHAGSPGCEESDAGKEKLPKMRLPTRSDMICGYACLKGTAAMRNTKRGSWYIEALAQVFSERACDMHVADMLVKVNALIKDREGYAPGTEFHRCKEMSEYCSTLCRHLYLFPGHPPT

SEQ ID NO: 4855 - protein, 1523 aa, Homo sapiens
MTSVWKRLQRVGKRAAKFQFVACYHELVLECTKKWQPDKLVVVWTRRNRRICSKAHSWQPGIQNPYRGTVVWMVPENVDISVTLYRDPHVDQYEAKEWTFIIENESKGQRKVLATAEVDLARHAGPVPVQVPVRLRLKPKSVKVVQAELSLTLSGVLLREGRATDDDMQSLASLMSVKPSDVGNLDDFAESDEDEAHGPGAPEARARVPQPDPSRELKTLCEEEEEGQGRPQQAVASPSNAEDTSPAPVSAPAPPARTSRGQGSERANEAGGQVGPEAPRPPETSPEMRSSRQPAQDTAPTPAPRLRKGSDALRPPVPQGEDEVPKASGAPPAGLGSARETQAQACPQEGTEAHGARLGPSIEDKGSGDPFGRQRLKAEEMDTEDRPEASGVDTEPRSGGREANTKRSGVRAGEAEESSAVCQVDAEQRSKVRHVDTKGPEATGVMPEARCRGTPEAPPRGSQGRLGVRTRDEAPSGLSLPPAEPAGHSGQLGDLEGARAAAGQEREGAEVRGGAPGIEGTGLEQGPSVGAISTRPQVSSWQGALLSTAQGAISRGLGGWEAEAGGSGDLETETEVVGLEVLGTQEKEVEGSGFPETRTLEIEILGALEKEAARSRVLESEVAGTAQCEGLETQETEVGVIETPGTETEVLGTQKTEAGGSGVLQTRTTIAETEVLVTQEISGDLGPLKIEDTIQSEMLGTQETEVEASRVPESEAEGTEAKILGTQEITARDSGVREIEAEIAESDILVAQEIEVGLLGVLGIETGAAEGAILGTQEIASRDSGVPGLEADTTGIQVKEVGGSEVPEIATGTAETEILGTQEIASRSSGVPGLESEVAGAQETEVGGSGISGPEAGMAEARVLMTRKTEIIVPEAEKEEAQTSGVQEAETRVGSALKYEALRAPVTQPRVLGSQEAKAEISGVQGSETQVLRVQEAEAGVWGMSEGKSGAWGAQEAEMKVLESPENKSGTFKAQEAEAGVLGNEKGKEAEGSLTEASLPEAQVASGAGAGAPRASSPEKAEEDRRLPGSQAPPALVSSSQSLLEWCQEVTTGYRGVRITNFTTSWRNGLAFCAILHRFYPDKIDYASLDPLNIKQNNKQAFDGFAALGVSRLLEPADMVLLSVPDKLIVMTYLCQIRAFCTGQELQLVQLEGGGGAGTYRVGSAQPSPPDDLDAGGLAQRLRGHGAEGPQEPKEAADRADGAAPGVASRNAVAGRASKDGGAEAPRESRPAEVPAEGLVNGAGAPGGGGVRLRRPSVNGEPGSVPPPRAHGSFSHVRDADLLKKRRSRLRNSSSFSMDDPDAGAMGAAAAEGQAPDPSPAPGPPTAADSQQPPGGSSPSEEPPPSPGEEAGLQRFQDTSQYVCAELQALEQEQRQIDGRAAEVEMQLRSLMESGANKLQEEVLIQEWFTLVNKKNALIRRQDQLQLLMEEQDLERRFELLSRELRAMLAIEDWQKTSAQQHREQLLLEELVSLVNQRDELVRDLDHKERIALEEDERLERGLEQRRRKLSRQLSRRERCVLS

SEQ ID NO: 4856 - protein, 217 aa, Homo sapiens
MATGSRTSLLLAFGLLCLPWLQEGSAFPTIPLSRLFDNAMLRAHRLHQLAFDTYQEFEEAYIPKEQKYSFLQNPQTSLCFSESIPTPSNREETQQKSNLELLRISLLLIQSWLEPVQFLRSVFANSLVYGASDSNVYDLLKDLEEGIQTLMGRLEDGSPRTGQIFKQTYSKFDTNSHNDDALLKNYGLLYCFRKDMDKVETFLRIVQCRSVEGSCGF

SEQ ID NO: 4857 - protein, 667 aa, Homo sapiens
METLESELTCPICLELFEDPLLLPCAHSLCFNCAHRILVSHCATNESVESITAFQCPTCRHVITLSQRGLDGLKRNVTLQNIIDRFQKASVSGPNSPSETRRERAFDANTMTSAEKVLCQFCDQDPAQDAVKTCVTCEVSYCDECLKATHPNKKPFTGHRLIEPIPDSHIRGLMCLEHEDEKVNMYCVTDDQLICALCKLVGRHRDHQVAALSERYDKLKQNLESNLTNLIKRNTELETLLAKLIQTCQHVEVNASRQEAKLTEECDLLIEIIQQRRQIIGTKIKEGKVMRLRKLAQQIANCKQCIERSASLISQAEHSLKENDHARFLQTAKNITERVSMATASSQVLIPEINLNDTFDTFALDFSREKKLLECLDYLTAPNPPTIREELCTASYDTITVHWTSDDEFSVVSYELQYTIFTGQANVVSLCNSADSWMIVPNIKQNHYTVHGLQSGTKYIFMVKAINQAGSRSSEPGKLKTNSQPFKLDPKSAHRKLKVSHDNLTVERDESSSKKSHTPERFTSQGSYGVAGNVFIDSGRHYWEVVISGSTWYAIGLAYKSAPKHEWIGKNSASWALCRCNNNWVVRHNSKEIPIEPAPHLRRVGILLDYDNGSIAFYDALNSIHLYTFDVAFAQPVCPTFTVWNKCLTIITGLPIPDHLDCTEQLP

SEQ ID NO: 4858 - protein, 467 aa, Homo sapiens
MATGADVRDILELGGPEGDAASGTISKKDIINPDKKKSKKSSETLTFKRPEGMHREVYALLYSDKKDAPPLLPSDTGQGYRTVKAKLGSKKVRPWKWMPFTNPARKDGAMFFHWRRAAEEGKDYPFARFNKTVQVPVYSEQEYQLYLHDDAWTKAETDHLFDLSRRFDLRFVVIHDRYDHQQFKKRSVEDLKERYYHICAKLANVRAVPGTDLKIPVFDAGHERRRKEQLERLYNRTPEQVAEEEYLLQELRKIEARKKEREKRSQDLQKLITAADTTAEQRRTERKAPKKKLPQKKEAEKPAVPETAGIKFPDFKSAGVTLRSQRMKLPSSVGQKKIKALEQMLLELGVELSPTPTEELVHMFNELRSDLVLLYELKQACANCEYELQMLRHRHEALARAGVLGGPATPASGPGPASAEPAVTEPGLGPDPKDTIIDVVGAPLTPNSRKRRESASSSSSVKKAKKP

SEQ ID NO: 4859 - protein, 397 aa, Homo sapiens
MRCPKCLLCLSALLTLLGLKVYIEWTSESRLSKAYPSPRGTPPSPTPANPEPTLPANLSTRLGQTIPLPFAYWNQQQWRLGSLPSGDSTETGGCQAWGAAAATEIPDFASYPKDLRRFLLSAACRSFPQWLPGGGGSQVSSCSDTDVPYLLLAVKSEPGRFAERQAVRETWGSPAPGIRLLFLLGSPVGEAGPDLDSLVAWESRRYSDLLLWDFLDVPFNQTLKDLLLLAWLGRHCPTVSFVLRAQDDAFVHTPALLAHLRALPPASARSLYLGEVFTQAMPLRKPGGPFYVPESFFEGGYPAYASGGGYVIAGRLAPWLLRAAARVAPFPFEDVYTGLCIRALGLVPQAHPGFLTAWPADRTADHCAFRNLLLVRPLGPQASIRLWKQLQDPRLQC

SEQ ID NO: 4860 - protein, 69 aa, Homo sapiens
MRIFYYLHFLCYVTFILPATCTLVNADRCTKRYGRCKRDCLESEKQIDICSLPRKICCTEKLYEEDDMF

SEQ ID NO: 4861 - protein, 349 aa, Homo sapiens
MSKSKDDAPHELESQFILRLPPEYASTVRRAVQSGHVNLKDRLTIELHPDGRHGIVRVDRVPLASKLVDLPCVMESLKTIDKKTFYKTADICQMLVSTVDGDLYPPVEEPVASTDPKASKKKDKDKEKKFIWNHGITLPLKNVRKRRFRKTAKKKYIESPDVEKEVKRLLSTDAEAVSTRWEIIAEDETKEAENQGLDISSPGMSGHRQGHDSLEHDELREIFNDLSSSSEDEDETQHQDEEDINIIDTEEDLERQLQDKLNESDEQHQENEGTNQLVMGIQKQIDNMKGKLQETQDRAKRQEDLIMKVENLALKNRFQAVLDELKQKEDREKEQLSSLQEELESLLEK

SEQ ID NO: 4862 - protein, 207 aa, Homo sapiens
MAKTYDYLFKLLLIGDSGVGKTCLLFRFSEDAFNTTFISTIGIDFKIRTIELDGKKIKLQIWDTAGQERFRTITTAYYRGAMGIMLVYDITNEKSFDNIKNWIRNIEEHASSDVERMILGNKCDMNDKRQVSKERGEKLAIDYGIKFLETSAKSSANVEEAFFTLARDIMTKLNRKMNDSNSAGAGGPVKITENRSKKTSFFRCSLL

SEQ ID NO: 4863 - protein, 1174 aa, Homo sapiens
MYDADEDMQYDEDDDEITPDLWQEACWIVISSYFDEKGLVRQQLDSFDEFIQMSVQRIVEDAPPIDLQAEAQHASGEVEEPPRYLLKFEQIYLSKPTHWERDGAPSPMMPNEARLRNLTYSAPLYVDITKTVIKEGEEQLQTQHQKTFIGKIPIMLRSTYCLLNGLTDRDLCELNECPLDPGGYFIINGSEKVLIAQEKMATNTVYVFAKKDSKYAYTGECRSCLENSSRPTSTIWVSMLARGGQGAKKSAIGQRIVATLPYIKQEVPIIIVFRALGFVSDRDILEHIIYDFEDPEMMEMVKPSLDEAFVIQEQNVALNFIGSRGAKPGVTKEKRIKYAKEVLQKEMLPHVGVSDFCETKKAYFLGYMVHRLLLAALGRRELDDRDHYGNKRLDLAGPLLAFLFRGMFKNLLKEVRIYAQKFIDRGKDFNLELAIKTRIISDGLKYSLATGNWGDQKKAHQARAGVSQVLNRLTFASTLSHLRRLNSPIGRDGKLAKPRQLHNTLWGMVCPAETPEGHAVGLVKNLALMAYISVGSQPSPILEFLEEWSMENLEEISPAAIADATKIFVNGCWVGIHKDPEQLMNTLRKLRRQMDIIVSEVSMIRDIREREIRIYTDAGRICRPLLIVEKQKLLLKKRHIDQLKEREYNNYSWQDLVASGVVEYIDTLEEETVMLAMTPDDLQEKEVAYCSTYTHCEIHPSMILGVCASIIPFPDHNQSPRNTYQSAMGKQAMGVYITNFHVRMDTLAHVLYYPQKPLVTTRSMEYLRFRELPAGINSIVAIASYTGYNQEDSVIMNRSAVDRGFFRSVFYRSYKEQESKKGFDQEEVFEKPTRETCQGMRHAIYDKLDDDGLIAPGVRVSGDDVIIGKTVTLPENEDELESTNRRYTKRDCSTFLRTSETGIVDQVMVTLNQEGYKFCKIRVRSVRIPQIGDKFASRHGQKGTCGIQYRQEDMPFTCEGITPDIIINPHAIPSRMTIGHLIECLQGKVSANKGEIGDATPFNDAVNVQKISNLLSDYGYHLRGNEVLYNGFTGRKITSQIFIGPTYYQRLKHMVDDKIHSRARGPIQILNRQPMEGRSRDGGLRFGEMERDCQIAHGAAQFLRERLFEASDPYQVHVCNLCGIMAIANTRTHTYECRGCRNKTQISLVRMPYACKLLFQELMSMSIAPRMMSV

SEQ ID NO: 4864 - protein, 588 aa, Homo sapiens
MSSCVSSQPSSNRAAPQDELGGRGSSSSESQKPCEALRGLSSLSIHLGMESFIVVTECEPGCAVDLGLARDRPLEADGQEVPLDTSGSQARPHLSGRKLSLQERSQGGLAAGGSLDMNGRCICPSLPYSPVSSPQSSPRLPRRPTVESHHVSITGMQDCVQLNQYTLKDEIGKGSYGVVKLAYNENDNTYYAMKVLSKKKLIRQAGFPRRPPPRGTRPAPGGCIQPRGPIEQVYQEIAILKKLDHPNVVKLVEVLDDPNEDHLYMVFELVNQGPVMEVPTLKPLSEDQARFYFQDLIKGIEYLHYQKIIHRDIKPSNLLVGEDGHIKIADFGVSNEFKGSDALLSNTVGTPAFMAPESLSETRKIFSGKALDVWAMGVTLYCFVFGQCPFMDERIMCLHSKIKSQALEFPDQPDIAEDLKDLITRMLDKNPESRIVVPEIKLHPWVTRHGAEPLPSEDENCTLVEVTEEEVENSVKHIPSLATVILVKTMIRKRSFGNPFEGSRREERSLSAPGNLLTKKPTRECESLSELKEARQRRQPPGHRPAPRGGGGSALVRGSPCVESCWAPAPGSPARMHPLRPEEAMEPE

SEQ ID NO: 4865 - protein, 259 aa, Homo sapiens
MKLNERSVAHYALSDSPADHMGFLRTWGGPGTPPTPSGTGRRCWFVLKGNLLFSFESREGRAPLSLVVLEGCTVELAEAPVPEEFAFAICFDAPGVRPHLLAAEGPAAQEAWVKVLSRASFGYMRLVVRELESQLQDARQSLALQRRSSWKSVASRCKPQAPNHRAAGLENGHCLSKDSSPVGLVEEAGSRSAGWGLAEWELQGPASLLLGKGQSPVSPETSCFSTLHDWYGQEIVELRQCWQKRAQGSHSKCEEQDRP

SEQ ID NO: 4866 - protein, 301 aa, Homo sapiens
MATTKRVLYVGGLAEEVDDKVLHAAFIPFGDITDIQIPLDYETEKHRGFAFVEFELAEDAAAAIDNMNESELFGRTIRVNLAKPMRIKEGSSRPVWSDDDWLKKFSGKTLEENKEEEGSEPPKAETQEGEPIAKKARSNPQVYMDIKIGNKPAGRIQMLLRSDVVPMTAENFRCLCTHEKGFGFKGSSFHRIIPQFMCQGGDFTNHNGTGGKSIYGKKFDDENFILKHTGPGLLSMANSGPNTNGSQFFLTCDKTDWLDGKHVVFGEVTEGLDVLRQIEAQGSKDGKPKQKVIIADCGEYV

SEQ ID NO: 4867 - protein, 385 aa, Homo sapiens
MWGFRLLRSPPLLLLLPQLGIGNASSCSQARTMNPGGSGGARCSLSAEVRRRQCLQLSTVPGADPQRSNELLLLAAAGEGLERQDLPGDPAKEEPQPPPQHHVLYFPGDVQNYHEIMTRHPENYQWENWSLENVATILAHRFPNSYIWVIKCSRMHLHKFSCYDNFVKSNMFGAPEHNTDFGAFKHLYMLLVNAFNLSQNSLSKKSLNVWNKDSIASNCRSSPSHTTNGCQGEKVRTCEKSDESAMSFYPPSLNDASFTLIGFSKGCVVLNQLLFELKEAKKDKNIDAFIKSIRTMYWLDGGHSGGSNTWVTYPEVLKEFAQTGIIVHTHVTPYQVRDPMRSWIGKEHKKFVQILGDLGMQVTSQIHFTKEAPSIENHFRVHEVF

SEQ ID NO: 4868 - protein, 124 aa, Homo sapiens
MVLCWLLLLVMALPPGTTGVKDCVFCELTDSMQCPGTYMHCGDDEDCFTGHGVAPGTGPVINKGCLRATSCGLEEPVSYRGVTYSLTTNCCTGRLCNRAPSSQTVGATTSLALGLGMLLPPRLL

SEQ ID NO: 4869 - protein, 263 aa, Homo sapiens
MAELQLDPAMAGLGGGGGSGVGDGGGPVRGPPSPRPAGPTPRGHGRPAAAVAQPLEPGPGPPERAGGGGAARWVRLNVGGTYFVTTRQTLGREPKSFLCRLCCQEDPELDSDKDETGAYLIDRDPTYFGPILNYLRHGKLIITKELAEEGVLEEAEFYNIASLVRLVKERIRDNENRTSQGPVKHVYRVLQCQEEELTQMVSTMSDGWKFEQLISIGSSYNYGNEDQAEFLCVVSRELNNSTNGIVIEPSEKAKILQERGSRM

SEQ ID NO: 4870 - protein, 919 aa, Homo sapiens
MAADVFMCSPRRPRSRGRQVLLKPQVSEDDDDSDTDEPSPPPASGAATPARAHASAAPPPPRAGPGREEPPRRQQIIHSGHFMVSSPHREHPPKKGYDFDTVNKQTCQTYSFGKTSSCHLSIDASLTKLFECMTLAYSGKLVSPKWKNFKGLKLQWRDKIRLNNAIWRAWYMQYLEKRKNPVCHFVTPLDGSVDVDEHRRPEAITTEGKYWKSRIEIVIREYHKWRTYFKKRLQQHKDEDLSSLVQDDDMLYWHKHGDGWKTPVPMEEDPLLDTDMLMSEFSDTLFSTLSSHQPVAWPNPREIAHLGNADMIQPGLIPLQPNLDFMDTFEPFQDLFSSSRSIFGSMLPASASAPVPDPNNPPAQESILPTTALPTVSLPDSLIAPPTAPSLAHMDEQGCEHTSRTEDPFIQPTDFGPSEPPLSVPQPFLPVFTMPLLSPSPAPPPISPVLPLVPPPATALNPPAPPTFHQPQKFAGVNKAPSVITHTASATLTHDAPATTFSQSQGLVITTHHPAPSAAPCGLALSPVTRPPQPRLTFVHPKPVSLTGGRPKQPHKIVPAPKPEPVSLVLKNARIAPAAFSGQPQAVIMTSGPLKREGMLASTVSQSNVVIAPAAIARAPGVPEFHSSILVTDLGHGTSSPPAPVSRLFPSTAQDPLGKGEQVPLHGGSPQVTVTGPSRDCPNSGQASPCASEQSPSPQSPQNNCSGKSDPKNVAALKNRQMKHISAEQKRRFNIKMCFDMLNSLISNNSKLTSHAITLQKTVEYITKLQQERGQMQEEARRLREEIEELNATIISCQQLLPATGVPVTRRQFDHMKDMFDEYVKTRTLQNWKFWIFSIIIKPLFESFKGMVSTSSLEELHRTALSWLDQHCSLPILRPMVLSTLRQLSTSTSILTDPAQLPEQASKAVTRIGKRLGES

SEQ ID NO: 4871 - protein, 268 aa, Homo sapiens
MLLLAAAFLVAFVLLLYMVSPLISPKPLALPGAHVVVTGGSSGIGKCIAIECYKQGAFITLVARNEDKLLQAKKEIEMHSINDKQVVLCISVDVSQDYNQVENVIKQAQEKLGPVDMLVNCAGMAVSGKFEDLEVSTFEVKPYNVYITVAYPPDTDTPGFAEENRTKPLETRLISETTSVCKPEQVAKQIVKDAIQGNFNSSLGSDGYMLSALTCGMAPVTSITEGLQQVVTMGLFRTIALFYLGSFDSIVRRCMMQREKSENADKTA

SEQ ID NO: 4872 - protein, 994 aa, Homo sapiens
MRPVALLLLPSLLALLAHGLSLEAPTVGKGQAPGIEETDGELTAAPTPEQPERGVHFVTTAPTLKLLNHHPLLEEFLQEGLEKGDEELRPALPFQPDPPAPFTPSPLPRLANQDSRPVFTSPTPAMAAVPTQPQSKEGPWSPESESPMLRITAPLPPGPSMAVPTLGPGEIASTTPPSRAWTPTQEGPGDMGRPWVAEVVSQGAGIGIQGTITSSTASGDDEETTTTTTIITTTITTVQTPGPCSWNFSGPEGSLDSPTDLSSPTDVGLDCFFYISVYPGYGVEIKVQNISLREGETVTVEGLGGPDPLPLANQSFLLRGQVIRSPTHQAALRFQSLPPPAGPGTFHFHYQAYLLSCHFPRRPAYGDVTVTSLHPGGSARFHCATGYQLKGARHLTCLNATQPFWDSKEPVCIAACGGVIRNATTGRIVSPGFPGNYSNNLTCHWLLEAPEGQRLHLHFEKVSLAEDDDRLIIRNGDNVEAPPVYDSYEVEYLPIEGLLSSGKHFFVELSTDSSGAAAGMALRYEAFQQGHCYEPFVKYGNFSSSTPTYPVGTTVEFSCDPGYTLEQGSIIIECVDPHDPQWNETEPACRAVCSGEITDSAGVVLSPNWPEPYGRGQDCIWGVHVEEDKRIMLDIRVLRIGPGDVLTFYDGDDLTARVLGQYSGPRSHFKLFTSMADVTIQFQSDPGTSVLGYQQGFVIHFFEVPRNDTCPELPEIPNGWKSPSQPELVHGTVVTYQCYPGYQVVGSSVLMCQWDLTWSEDLPSCQRVTSCHDPGDVEHSRRLISSPKFPVGATVQYICDQGFVLMGSSILTCHDRQAGSPKWSDRAPKCLLEQLKPCHGLSAPENGARSPEKQLHPAGATIHFSCAPGYVLKGQASIKCVPGHPSHWSDPPPICRAASLDGFYNSRSLDVAKAPAASSTLDAAHIAAAIFLPLVAMVLLVGGVYFYFSRLQGKSSLQLPRPRPRPYNRITIESAFDNPTYETGSLSFAGDERI

SEQ ID NO: 4873 - protein, 2570 aa, Homo sapiens
MAGPRGLLPLCLLAFCLAGFSFVRGQVLFKGCDVKTTFVTHVPCTSCAAIKKQTCPSGWLRELPDQITQDCRYEVQLGGSMVSMSGCRRKCRKQVVQKACCPGYWGSRCHECPGGAETPCNGHGTCLDGMDRNGTCVCQENFRGSACQECQDPNRFGPDCQSVCSCVHGVCNHGPRGDGSCLCFAGYTGPHCDQELPVCQELRCPQNTQCSAEAPSCRCLPGYTQQGSECRAPNPCWPSPCSLLAQCSVSPKGQAQCHCPENYHGDGMVCLPKDPCTDNLGGCPSNSTLCVYQKPGQAFCTCRPGLVSINSNASAGCFAFCSPFSCDRSATCQVTADGKTSCVCRESEVGDGRACYGHLLHEVQKATQTGRVFLQLRVAVAMMDQGCREILTTAGPFTVLVPSVSSFSSRTMNASLAQQLCRQHIIAGQHILEDTRTQQTRRWWTLAGQEITVTFNQFTKYSYKYKDQPQQTFNIYKANNIAANGVFHVVTGLRWQAPSGTPGDPKRTIGQILASTEAFSRFETILENCGLPSILDGPGPFTVFAPSNEAVDSLRDGRLIYLFTAGLSKLQELVRYHIYNHGQLTVEKLISKGRILTMANQVLAVNISEEGRILLGPEGVPLQRVDVMAANGVIHMLDGILLPPTILPILPKHCSEEQHKIVAGSCVDCQALNTSTCPPNSVKLDIFPKECVYIHDPTGLNVLKKGCASYCNQTIMEQGCCKGFFGPDCTQCPGGFSNPCYGKGNCSDGIQGNGACLCFPDYKGIACHICSNPNKHGEQCQEDCGCVHGLCDNRPGSGGVCQQGTCAPGFSGRFCNESMGDCGPTGLAQHCHLHARCVSQEGVARCRCLDGFEGDGFSCTPSNPCSHPDRGGCSENAECVPGSLGTHHCTCHKGWSGDGRVCVAIDECELDMRGGCHTDALCSYVGPGQSRCTCKLGFAGDGYQCSPIDPCRAGNGGCHGLATCRAVGGGQRVCTCPPGFGGDGFSCYGDIFRELEANAHFSIFYQWLKSAGITLPADRRVTALVPSEAAVRQLSPEDRAFWLQPRTLPNLVRAHFLQGALFEEELARLGGQEVATLNPTTRWEIRNISGRVWVQNASVDVADLLATNGVLHILSQVLLPPRGDVPGGQGLLQQLDLVPAFSLFRELLQHHGLVPQIEAATAYTIFVPTNRSLEAQGNSSHLDADTVRHHVVLGEALSMETLRKGGHRNSLLGPAHWIVFYNHSGQPEVNHVPLEGPMLEAPGRSLIGLSGVLTVGSSRCLHSHAEALREKCVNCTRRFRCTQGFQLQDTPRKSCVYRSGFSFSRGCSYTCAKKIQVPDCCPGFFGTLCEPCPGGLGGVCSGHGQCQDRFLGSGECHCHEGFHGTACEVCELGRYGPNCTGVCDCAHGLCQEGLQGDGSCVCNVGWQGLRCDQKITSPQCPRKCDPNANCVQDSAGASTCACAAGYSGNGIFCSEVDPCAHGHGGCSPHANCTKVAPGQRTCTCQDGYMGDGELCQEINSCLIHHGGCHIHAECIPTGPQQVSCSCREGYSGDGIRTCELLDPCSKNNGGCSPYATCKSTGDGQRTCTCDTAHTVGDGLTCRARVGLELLRDKHASFFSLRLLEYKELKGDGPFTIFVPHADLMSNLSQDELARIRAHRQLVFRYHVVGCRRLRSEDLLEQGYATALSGHPLRFSEREGSIYLNDFARVVSSDHEAVNGILHFIDRVLLPPEALHWEPDDAPIPRRNVTAAAQGFGYKIFSGLLKVAGLLPLLREASHRPFTMLWPTDAAFRALPPDRQAWLYHEDHRDKLAAILRGHMIRNVEALASDLPNLGPLRTMHGTPISFSCSRTRAGELMVGEDDARIVQRHLPFEGGLAYGIDQLLEPPGLGARCDHFETRPLRLNTCSICGLEPPCPEGSQEQGSPEACWRFYPKFWTSPPLHSLGLRSVWVHPSLWGRPQGLGRGCHRNCVTTTWKPSCCPGHYGSECQACPGGPSSPCSDRGVCMDGMSGSGQCLCRSGFAGTACELCAPGAFGPHCQACRCTVHGRCDEGLGGSGSCFCDEGWTGPRCEVQLELQPVCTPPCAPEAVCRAGNSCECSLGYEGDGRVCTVADLCQDGHGGCSEHANCSQVGTMVTCTCLPDYEGDGWSCRARNPCTDGHRGGCSEHANCLSTGLNTRRCECHAGYVGDGLQCLEESEPPVDRCLGQPPPCHSDAMCTDLHFQEKRAGVFHLQATSGPYGLNFSEAEAACEAQGAVLASFPQLSAAQQLGFHLCLMGWLANGSTAHPVVFPVADCGNGRVGIVSLGARKNLSERWDAYCFRVQDVACRCRNGFVGDGISTCNGKLLDVLAATANFSTFYGMLLGYANATQRGLDFLDFLDDELTYKTLFVPVNEGFVDNMTLSGPDLELHASNATLLSANASQGKLLPAHSGLSLIISDAGPDNSSWAPVAPGTVVVSRIIVWDIMAFNGIIHALASPLLAPPQPQAVLAPEAPPVAAGVGAVLAAGALLGLVAGALYLRARGKPMGFGFSAFQAEDDADDDFSPWQEGTNPTLVSVPNPVFGSDTFCEPFDDSLLEEDFPDTQRILTVK

SEQ ID NO: 4874 - protein, 565 aa, Homo sapiens
MSGRSKRESRGSTRGKRESESRGSSGRVKRERDREREPEAASSRGSPVRVKREFEPASAREAPASVVPFVRVKREREVDEDSEPEREVRAKNGRVDSEDRRSRHCPYLDTINRSVLDFDFEKLCSISLSHINAYACLVCGKYFQGRGLKSHAYIHSVQFSHHVFLNLHTLKFYCLPDNYEIIDSSLEDITYVLKPTFTKQQIANLDKQAKLSRAYDGTTYLPGIVGLNNIKANDYANAVLQALSNVPPLRNYFLEEDNYKNIKRPPGDIMFLLVQRFGELMRKLWNPRNFKAHVSPHEMLQAVVLCSKKTFQITKQGDGVDFLSWFLNALHSALGGTKKKKKTIVTDVFQGSMRIFTKKLPHPDLPAEEKEQLLHNDEYQETMVESTFMYLTLDLPTAPLYKDEKEQLIIPQVPLFNILAKFNGITEKEYKTYKENFLKRFQLTKLPPYLIFCIKRFTKNNFFVEKNPTIVNFPITNVDLREYLSEEVQAVHKNTTYDLIANIVHDGKPSEGSYRIHVLHHGTGKWYELQDLQVTDILPQMITLSEAYIQIWKRRDNDETNQQGA

SEQ ID NO: 4875 - protein, 356 aa, Homo sapiens
MAGVACLGKAADADEWCDSGLGSLGPDAAAPGGPGLGAELGPGLSWAPLVFGYVTEDGDTALHLAVIHQHEPFLDFLLGFSAGTEYMDLQNDLGQTALHLAAILGETSTVEKLYAAGAGLCVAERRGHTALHLACRVGAHACARALLQPRPRRPREAPDTYLAQGPDRTPDTNHTPVALYPDSDLEKEEEESEEDWKLQLEAENYEGHTPLHVAVIHKDVEMVRLLRDAGADLDKPEPTCGRSPLHLAVEAQAADVLELLLRAGANPAARMYGGRTPLGSAMLRPNPILARLLRAHGAPEPEGEDEKSGPCSSSSDSDSGDEGDEYDDIVVHSSRSQTRLPPTPASKPLPDDPRPV

SEQ ID NO: 4876 - protein, 355 aa, Homo sapiens
MGCTVSAEDKAAAERSKMIDKNLREDGEKAAREVKLLLLGAGESGKSTIVKQMKIIHEDGYSEEECRQYRAVVYSNTIQSIMAIVKAMGNLQIDFADPSRADDARQLFALSCTAEEQGVLPDDLSGVIRRLWADHGVQACFGRSREYQLNDSAAYYLNDLERIAQSDYIPTQQDVLRTRVKTTGIVETHFTFKDLHFKMFDVGGQRSERKKWIHCFEGVTAIIFCVALSAYDLVLAEDEEMNRMHESMKLFDSICNNKWFTDTSIILFLNKKDLFEEKITHSPLTICFPEYTGANKYDEAASYIQSKFEDLNKRKDTKEIYTHFTCATDTKNVQFVFDAVTDVIIKNNLKDCGLF

SEQ ID NO: 4877 - protein, 636 aa, Homo sapiens
MNPSAPSYPMASLYVGDLHPDVTEAMLYEKFSPAGPILSIRVCRDMITRRSLGYAYVNFQQPADAERALDTMNFDVIKGKPVRIMWSQRDPSLRKSGVGNIFIKNLDKSIDNKALYDTFSAFGNILSCKVVCDENGSKGYGFVHFETQEAAERAIEKMNGMLLNDRKVFVGRFKSRKEREAELGARAKEFTNVYIKNFGEDMDDERLKDLFGKFGPALSVKVMTDESGKSKGFGFVSFERHEDAQKAVDEMNGKELNGKQIYVGRAQKKVERQTELKRKFEQMKQDRITRYQGVNLYVKNLDDGIDDERLRKEFSPFGTITSAKVMMEGGRSKGFGFVCFSSPEEATKAVTEMNGRIVATKPLYVALAQRKEERQAHLTNQYMQRMASVRAVPNPVINPYQPAPPSGYFMAAIPQTQNRAAYYPPSQIAQLRPSPRWTAQGARPHPFQNMPGAIRPAAPRPPFSTMRPASSQVPRVMSTQRVANTSTQTMGPRPAAAAAAATPAVRTVPQYKYAAGVRNPQQHLNAQPQVTMQQPAVHVQGQEPLTASMLASAPPQEQKQMLGERLFPLIQAMHPTLAGKITGMLLEIDNSELLHMLESPESLRSKVDEAVAVLQAHQAKEAAQKAVNSATGVPTV

SEQ ID NO: 4878 - protein, 566 aa, Homo sapiens
MDEGGTPLLPDSLVYQIFLSLGPADVLAAGLVCRQWQAVSRDEFLWREQFYRYYQVARDVPRHPAAMSWYEEFQRLYDTVPCVEVQTLREHTDQVLHLSFSHSGYQFASCSKDCTVKIWSNDLTISLLHSADMRPYNWSYTQFSQFNKDDSLLLASGVFLGPHNSSSGEIAVISLDSFALLSRVRNKPYDVFGCWLTETSLISGNLHRIGDITSCSVLWLNNAFQDVESENVNVVKRLFKIQNLNASTVRTVMVADCSRFDSPDLLLEAGDPATSPCRIFDLGSDNEEVVAGPAPAHAKEGLRHFLDRVLEGRAQPQLSERMLETKVAELLAQGHTKPPERSATGAKSKYLIFTTGCLTYSPHQIGIKQILPHQMTTAGPVLGEGRGSDAFFDALDHVIDIHGHIIGMGLSPDNRYLYVNSRAWPNGAVVADPMQPPPIAEEIDLLVFDLKTMREVRRALRAHRAYTPNDECFFIFLDVSRDFVASGAEDRHGYIWDRHYNICLARLRHEDVVNSVVFSPQEQELLLTASDDATIKAWRSPRTMRVLQAPRPRPRTFFSWLASQRR

SEQ ID NO: 4879 - protein, 1584 aa, Homo sapiens
MRGQAAAPGPVWILAPLLLLLLLLGRRARAAAGADAGPGPEPCATLVQGKFFGYFSAAAVFPANASRCSWTLRNPDPRRYTLYMKVAKAPVPCSGPGRVRTYQFDSFLESTRTYLGVESFDEVLRLCDPSAPLAFLQASKQFLQMRRQQPPQHDGLRPRAGPPGPTDDFSVEYLVVGNRNPSRAACQMLCRWLDACLAGSRSSHPCGIMQTPCACLGGEAGGPAAGPLAPRGDVCLRDAVAGGPENCLTSLTQDRGGHGATGGWKLWSLWGECTRDCGGGLQTRTRTCLPAPGVEGGGCEGVLEEGRQCNREACGPAGRTSSRSQSLRSTDARRREELGDELQQFGFPAPQTGDPAAEEWSPWSVCSSTCGEGWQTRTRFCVSSSYSTQCSGPLREQRLCNNSAVCPVHGAWDEWSPWSLCSSTCGRGFRDRTRTCRPPQFGGNPCEGPEKQTKFCNIALCPGRAVDGNWNEWSSWSACSASCSQGRQQRTRECNGPSYGGAECQGHWVETRDCFLQQCPVDGKWQAWASWGSCSVTCGAGSQRRERVCSGPFFGGAACQGPQDEYRQCGTQRCPEPHEICDEDNFGAVIWKETPAGEVAAVRCPRNATGLILRRCELDEEGIAYWEPPTYIRCVSIDYRNIQMMTREHLAKAQRGLPGEGVSEVIQTLVEISQDGTSYSGDLLSTIDVLRNMTEIFRRAYYSPTPGDVQNFVQILSNLLAEENRDKWEEAQLAGPNAKELFRLVEDFVDVIGFRMKDLRDAYQVTDNLVLSIHKLPASGATDISFPMKGWRATGDWAKVPEDRVTVSKSVFSTGLTEADEASVFVVGTVLYRNLGSFLALQRNTTVLNSKVISVTVKPPPRSLRTPLEIEFAHMYNGTTNQTCILWDETDVPSSSAPPQLGPWSWRGCRTVPLDALRTRCLCDRLSTFAILAQLSADANMEKATLPSVTLIVGCGVSSLTLLMLVIIYVSVWRYIRSERSVILINFCLSIISSNALILIGQTQTRNKVVCTLVAAFLHFFFLSSFCWVLTEAWQSYMAVTGHLRNRLIRKRFLCLGWGLPALVVAISVGFTKAKGYSTMNYCWLSLEGGLLYAFVGPAAAVVLVNMVIGILVFNKLVSKDGITDKKLKERAGASLWSSCVVLPLLALTWMSAVLAVTDRRSALFQILFAVFDSLEGFVIVMVHCILRREVQDAVKCRVVDRQEEGNGDSGGSFQNGHAQLMTDFEKDVDLACRSVLNKDIAACRTATITGTLKRPSLPEEEKLKLAHAKGPPTNFNSLPANVSKLHLHGSPRYPGGPLPDFPNHSLTLKRDKAPKSSFVGDGDIFKKLDSELSRAQEKALDTSYVILPTATATLRPKPKEEPKYSIHIDQMPQTRLIHLSTAPEASLPARSPPSRQPPSGGPPEAPPAQPPPPPPPPPPPPQQPLPPPPNLEPAPPSLGDPGEPAAHPGPSTGPSTKNENVATLSVSSLERRKSRYAELDFEKIMHTRKRHQDMFQDLNRKLQHAAEKDKEVLGPDSKPEKQQTPNKRPWESLRKAHGTPTWVKKELEPLQPSPLELRSVEWERSGATIPLVGQDIIDLQTEV

SEQ ID NO: 4880 - protein, 286 aa, Homo sapiens
MAARVLRARGAAWAGGLLQRAAPCSLLPRLRTWTSSSNRSREDSWLKSLFVRKVDPRKDAHSNLLAKKETSNLYKLQFHNVKPECLEAYNKICQEVLPKIHEDKHYPCTLVGTWNTWYGEQDQAVHLWRYEGGYPALTEVMNKLRENKEFLEFRKARSDMLLSRKNQLLLEFSFWNEPVPRSGPNIYELRSYQLRPGTMIEWGNYWARAIRFRQDGNEAVGGFFSQIGQLYMVHHLWAYRDLQTREDIRNAAWHKHGWEELVYYTVPLIQEMESRIMIPLKTSPLQ

SEQ ID NO: 4881 - protein, 2382 aa, Homo sapiens
MSGGAAEKQSSTPGSLFLSPPAPAPKNGSSSDSSVGEKLGAAAADAVTGRTEEYRRRRHTMDKDSRGAAATTTTTEHRFFRRSVICDSNATALELPGLPLSLPQPSIPAAVPQSAPPEPHREETVTATATSQVAQQPPAAAAPGEQAVAGPAPSTVPSSTSKDRPVSQPSLVGSKEEPPPARSGSGGGSAKEPQEERSQQQDDIEELETKAVGMSNDGRFLKFDIEIGRGSFKTVYKGLDTETTVEVAWCELQDRKLTKSERQRFKEEAEMLKGLQHPNIVRFYDSWESTVKGKKCIVLVTELMTSGTLKTYLKRFKVMKIKVLRSWCRQILKGLQFLHTRTPPIIHRDLKCDNIFITGPTGSVKIGDLGLATLKRASFAKSVIGTPEFMAPEMYEEKYDESVDVYAFGMCMLEMATSEYPYSECQNAAQIYRRVTSGVKPASFDKVAIPEVKEIIEGCIRQNKDERYSIKDLLNHAFFQEETGVRVELAEEDDGEKIAIKLWLRIEDIKKLKGKYKDNEAIEFSFDLERDVPEDVAQEMVESGYVCEGDHKTMAKAIKDRVSLIKRKREQRQLVREEQEKKKQEESSLKQQVEQSSASQTGIKQLPSASTGIPTASTTSASVSTQVEPEEPEADQHQQLQYQQPSISVLSDGTVDSGQGSSVFTESRVSSQQTVSYGSQHEQAHSTGTVPGHIPSTVQAQSQPHGVYPPSSVAQGQSQGQPSSSSLTGVSSSQPIQHPQQQQGIQQTAPPQQTVQYSLSQTSTSSEATTAQPVSQPQAPQVLPQVSAGKQLPVSQPVPTIQGEPQIPVATQPSVVPVHSGAHFLPVGQPLPTPLLPQYPVSQIPISTPHVSTAQTGFSSLPITMAAGITQPLLTLASSATTAAIPGVSTVVPSQLPTLLQPVTQLPSQVHPQLLQPAVQSMGIPANLGQAAEVPLSSGDVLYQGFPPRLPPQYPGDSNIAPSSNVASVCIHSTVLSPPMPTEVLATPGYFPTVVQPYVESNLLVPMGGVGGQVQVSQPGGSLAQAPTTSSQQAVLESTQGVSQVAPAEPVAVAQTQATQPTTLASSVDSAHSDVASGMSDGNENVPSSSGRHEGRTTKRHYRKSVRSRSRHEKTSRPKLRILNVSNKGDRVVECQLETHNRKMVTFKFDLDGDNPEEIATIMVNNDFILAIERESFVDQVREIIEKADEMLSEDVSVEPEGDQGLESLQGKDDYGFSGSQKLEGEFKQPIPASSMPQQIGIPTSSLTQVVHSAGRRFIVSPVPESRLRESKVFPSEITDTVAASTAQSPGMNLSHSASSLSLQQAFSELRRAQMTEGPNTAPPNFSHTGPTFPVVPPFLSSIAGVPTTAAATAPVPATSSPPNDISTSVIQSEVTVPTEEGIAGVATSTGVVTSGGLPIPPVSESPVLSSVVSSITIPAVVSISTTSPSLQVPTSTSEIVVSSTALYPSVTVSATSASAGGSTATPGPKPPAVVSQQAAGSTTVGATLTSVSTTTSFPSTASQLCIQLSSSTSTPTLAETVVVSAHSLDKTSHSSTTGLAFSLSAPSSSSSPGAGVSSYISQPGGLHPLVIPSVIASTPILPQAAGPTSTPLLPQVPSIPPLVQPVANVPAVQQTLIHSQPQPALLPNQPHTHCPEVDSDTQPKAPGIDDIKTLEEKLRSLFSEHSSSGAQHASVSLETSLVIESTVTPGIPTTAVAPSKLLTSTTSTCLPPTNLPLGTVALPVTPVVTPGQVSTPVSTTTSGVKPGTAPSKPPLTKAPVLPVGTELPAGTLPSEQLPPFPGPSLTQSQQPLEDLDAQLRRTLSPEMITVTSAVGPVSMAAPTAITEAGTQPQKGVSQVKEGPVLATSSGAGVFKMGRFQVSVAADGAQKEGKNKSEDAKSVHFESSTSESSVLSSSSPESTLVKPEPNGITIPGISSDVPESAHKTTASEAKSDTGQPTKVGRFQVTTTANKVGRFSVSKTEDKITDTKKEGPVASPPFMDLEQAVLPAVIPKKEKPELSEPSHLNGPSSDPEAAFLSRDVDDGSGSPHSPHQLSSKSLPSQNLSQSLSNSFNSSYMSSDNESDIEDEDLKLELRRLRDKHLKEIQDLQSRQKHEIESLYTKLGKVPPAVIIPPAAPLSGRRRRPTKSKGSKSSRSSSLGNKSPQLSGNLSGQSAASVLHPQQTLHPPGNIPESGQNQLLQPLKPSPSSDNLYSAFTSDGAISVPSLSAPGQGTSSTNTVGATVNSQAAQAQPPAMTSSRKGTFTDDLHKLVDNWARDAMNLSGRRGSKGHMNYEGPGMARKFSAPGQLCISMTSNLGGSAPISAASATSLGHFTKSMCPPQQYGFPATPFGAQWSGTGGPAPQPLGQFQPVGTASLQNFNISNLQKSISNPPGSNLRTT

SEQ ID NO: 4882 - protein, 305 aa, Homo sapiens
MSALLRLLRTGAPAAACLRLGTSAGTGSRRAMALYHTEERGQPCSQNYRLFFKNVTGHYISPFHDIPLKVNSKEENGIPMKKARNDEYENLFNMIVEIPRWTNAKMEIATKEPMNPIKQYVKDGKLRYVANIFPYKGYIWNYGTLPQILSCGEVIHVKILGILALIDEGETDWKLIAINANDPEASKFHDIDDVKKFKPGYLEATLNWFRLYKVPDGKPENQFAFNGEFKNKAFALEVIKSTHQCWKALLMKKCNGGAINCTNVQISDSPFRCTQEEARSLVESVSSSPNKESNEEEQVWHFLGK

SEQ ID NO: 4883 - protein, 295 aa, Homo sapiens
MWGARRSSVSSSWNAASLLQLLLAALLAAGARASGEYCHGWLDAQGVWRIGFQCPERFDGGDATICCGSCALRYCCSSAEARLDQGGCDNDRQQGAGEPGRADKDGPDGSAVPIYVPFLIVGSVFVAFIILGSLVAACCCRCLRPKQDPQQSRAPGGNRLMETIPMIPSASTSRGSSSRQSSTAASSSSSANSGARAPPTRSQTNCCLPEGTMNNVYVNMPTNFSVLNCQQATQIVPHQGQYLHPPYVGYTVQHDSVPMTAVPPFMDGLQPGYRQIQSPFPHTNSEQKMYPAVTV

SEQ ID NO: 4884 - protein, 1009 aa, Homo sapiens
MDLIRGVLLRLLLLASSLGPGAVSLRAAIRKPGKVGPPLDIKLGALNCTAFSIQWKMPRHPGSPILGYTVFYSEVGADKSLQEQLHSVPLSRDIPTTEEVIGDLKPGTEYRVSIAAYSQAGKGRLSSPRHVTTLSQDSCLPPAAPQQPHVIVVSDSEVALSWKPGASEGSAPIQYYSVEFIRPDFDKKWTSIHERIQMDSMVIKGLDPDTNYQFAVRAMNSHGPSPRSWPSDIIRTLCPEEAGSGRYGPRYITDMGAGEDDEGFEDDLDLDISFEEVKPLPATKGGNKKFLVESKKMSISNPKTISRLIPPTSASLPVTTVAPQPIPIQRKGKNGVAIMSRLFDMPCDETLCSADSFCVNDYTWGGSRCQCTLGKGGESCSEDIVIQYPQFFGHSYVTFEPLKNSYQAFQITLEFRAEAEDGLLLYCGENEHGRGDFMSLAIIRRSLQFRFNCGTGVAIIVSETKIKLGGWHTVMLYRDGLNGLLQLNNGTPVTGQSQGQYSKITFRTPLYLGGAPSAYWLVRATGTNRGFQGCVQSLAVNGRRIDMRPWPLGKALSGADVGECSSGICDEASCIHGGTCTAIKADSYICLCPLGFKGRHCEDAFTLTIPQFRESLRSYAATPWPLEPQHYLSFMEFEITFRPDSGDGVLLYSYDTGSKDFLSINLAGGHVEFRFDCGSGTGVLRSEDPLTLGNWHELRVSRTAKNGILQVDKQKIVEGMAEGGFTQIKCNTDIFIGGVPNYDDVKKNSGVLKPFSGSIQKIILNDRTIHVKHDFTSGVNVENAAHPCVRAPCAHGGSCRPRKEGYDCDCPLGFEGLHCQKAIIEAIEIPQFIGRSYLTYDNPDILKRVSGSRSNVFMRFKTTAKDGLLLWRGDSPMRPNSDFISLGLRDGALVFSYNLGSGVASIMVNGSFNDGRWHRVKAVRDGQSGKITVDDYGARTGKSPGMMRQLNINGALYVGGMKEIALHTNRQYMRGLVGCISHFTLSTDYHISLVEDAVDGKNINTCGAK

SEQ ID NO: 4885 - protein, 533 aa, Homo sapiens
MIHGRSVLHIVASLIILHLSGATKKGTEKQTTSETQKSVQCGTWTKHAEGGIFTSPNYPSKYPPDRECIYIIEAAPRQCIELYFDEKYSIEPSWECKFDHIEVRDGPFGFSPIIGRFCGQQNPPVIKSSGRFLWIKFFADGELESMGFSARYNFTPDPDFKDLGALKPLPACEFEMGGSEGIVESIQIMKEGKATASEAVDCKWYIRAPPRSKIYLRFLDYEMQNSNECKRNFVAVYDGSSSVEDLKAKFCSTVANDVMLRTGLGVIRMWADEGSRNSRFQMLFTSFQEPPCEGNTFFCHSNMCINNTLVCNGLQNCVYPWDENHCKEKRKTSLLDQLTNTSGTVIGVTSCIVIILIIISVIVQIKQPRKKYVQRKSDFDQTVFQEVFEPPHYELCTLRGTGATADFADVADDFENYHKLRRSSSKCIHDHHCGSQLSSTKGSRSNLSTRDASILTEMPTQPGKPLIPPMNRRNILVMKHSYSQDAADACDIDEIEEVPTTSHRLSRHDKAVQRFCLIGSLSKHESEYNTTRV

SEQ ID NO: 4886 - protein, 946 aa, Homo sapiens
MVPWVRTMGQKLKQRLRLDVGREICRQYPLFCFLLLCLSAASLLLNRYIHILMIFWSFVAGVVTFYCSLGPDSLLPNIFFTIKYKPKQLGLQELFPQGHSCAVCGKVKCKRHRPSLLLENYQPWLDLKISSKVDASLSEVLELVLENFVYPWYRDVTDDESFVDELRITLRFFASVLIRRIHKVDIPSIITKKLLKAAMKHIEVIVKARQKVKNTEFLQQAALEEYGPELHVALRSRRDELHYLRKLTELLFPYILPPKATDCRSLTLLIREILSGSVFLPSLDFLADPDTVNHLLIIFIDDSPPEKATEPASPLVPFLQKFAEPRNKKPSVLKLELKQIREQQDLLFRFMNFLKQEGAVHVLQFCLTVEEFNDRILRPELSNDEMLSLHEELQKIYKTYCLDESIDKIRFDPFIVEEIQRIAEGPYIDVVKLQTMRCLFEAYEHVLSLLENVFTPMFCHSDEYFRQLLRGAESPTRNSKLNRGSLSLDDFRNTQKRGESFGISRIGSKIKGVFKSTTMEGAMLPNYGVAEGEDDFIEEGIVVMEDDSPVEAVSTPNTPRNLAAWKISIPYVDFFEDPSSERKEKKERIPVFCIDVERNDRRAVGHEPEHWSVYRRYLEFYVLESKLTEFHGAFPDAQLPSKRIIGPKNYEFLKSKREEFQEYLQKLLQHPELSNSQLLADFLSPNGGETQFLDKILPDVNLGKIIKSVPGKLMKEKGQHLEPFIMNFINSCESPKPKPSRPELTILSPTSENNKKLFNDLFKNNANRAENTERKQNQNYFMEVMTVEGVYDYLMYVGRVVFQVPDWLHHLLMGTRILFKNTLEMYTDYYLQCKLEQLFQEHRLVSLITLLRDAIFCENTEPRSLQDKQKGAKQTFEEMMNYIPDLLVKCIGEETKYESIRLLFDGLQQPVLNKQLTYVLLDIVIQELFPELNKVQKEVTSVTSWM

SEQ ID NO: 4887 - protein, 621 aa, Homo sapiens
MSRQNLVALTVTTLLGVAVGGFVLWKGIQRRRRSKTSPVTQQPQQKVLGSRELPPPEDDQLHSSAPRSSWKERILKAKVVTVSQEAEWDQIEPLLRSELEDFPVLGIDCEWVNLEGKASPLSLLQMASPSGLCVLVRLPKLICGGKTLPRTLLDILADGTILKVGVGCSEDASKLLQDYGLVVRGCLDLRYLAMRQRNNLLCNGLSLKSLAETVLNFPLDKSLLLRCSNWDAETLTEDQVIYAARDAQISVALFLHLLGYPFSRNSPGEKNDDHSSWRKVLEKCQGVVDIPFRSKGMSRLGEEVNGEATESQQKPRNKKSKMDGMVPGNHQGRDPRKHKRKPLGVGYSARKSPLYDNCFLHAPDGQPLCTCDRRKAQWYLDKGIGELVSEEPFVVKLRFEPAGRPESPGDYYLMVKENLCVVCGKRDSYIRKNVIPHEYRKHFPIEMKDHNSHDVLLLCTSCHAISNYYDNHLKQQLAKEFQAPIGSEEGLRLLEDPERRQVRSGARALLNAESLPTQRKEELLQALREFYNTDVVTEEMLQEAASLETRISNENYVPHGLKVVQCHSQGGLRSLMQLESRWRQHFLDSMQPKHLPQQWSVDHNHQKLLRKFGEDLPIQLS

SEQ ID NO: 4888 - protein, 711 aa, Homo sapiens
MHLKPYWKLQKKEHPPEVSRETQRTPMNHQKAVNDETCKASHITSSVFPSASLGKASSRKPFGILSPNVLCSMSGKSPVESSLNVKTKKNAPSATIHQGEEEGPLDIWAVVKPGNTKEKIAFFASHQCSNRIGSMKIKSSWDIDGRATKRRKKSGDLKKAKVQVERMREVNSRCYQPEPFACGIEHCSVHYVSDSGDGVYAGRPLSVIQMVAFLEQRASALLASCSKNCTNSPAIVRFSGQSRGVPAVSESYSAPGACEEPTERGNLEVGEPQSEPVRVLDMVAKLESECLKRQGQREPGSLSRNNSFRRNVGRVLLANSTQADEGKTKKGVLEAPDTQVNPVGSVSVDCGPSRADRCSPKEDQAWDGASQDCPPLPAGVSFHIDSAELEPGSQTAVKNSNRYDVEMTDELVGLPFSSHTYSQASELPTDAVDCMSRELVSLTSRNPDQRKESLCISITVSKVDKDQPSILNSCEDPVPGMLFFLPPGQHLSDYSQLNESTTKESSEASQLEDAAGGDSASEEKSGSAEPFVLPASSVESTLPVLEASSWKKQVSHDFLETRFKIQQLLEPQQYMAFLPHHIMVKIFRLLPTKSLVALKCTCCYFKFIIEYYNIRPADSRWVRDPRYREDPCKQCKKKYVKGDVSLCRWHPKPYCQALPYGPGYWMCCHRSQKGFPGCKLGLHDNHWVPACHSFNRAIHKKAKGTEAEEEY

SEQ ID NO: 4889 - protein, 360 aa, Homo sapiens
MNYTESSPLRESTAIGFTPELESIIPVPSNKTTCENWREIHHLVFHVANICFAVGLVIPTTLHLHMIFLRGMLTLGCTLYIVWATLYRCALDIMIWNSVFLGVNILHLSYLLYKKRPVKIEKELSGMYRRLFEPLRVPPDLFRRLTGQFCMIQTLKKGQTYAAEDKTSVDDRLSILLKGKMKVSYRGHFLHNIYPCAFIDSPEFRSTQMHKGEKFQVTIIADDNCRFLCWSRERLTYFLESEPFLYEIFRYLIGKDITNKLYSLNDPTLNDKKAKKLEHQLSLCTQISMLEMRNSIASSSDSDDGLHQFLRGTSSMSSLHVSSPHQRASAKMKPIEEGAEDDDDVFEPASPNTLKVHQLP

SEQ ID NO: 4890 - protein, 355 aa, Homo sapiens
MSEEQFGGDGAAAAATAAVGGSAGEQEGAMVAATQGAAAAAGSGAGTGGGTASGGTEGGSAESEGAKIDASKNEEDEGHSNSSPRHSEAATAQREEWKMFIGGLSWDTTKKDLKDYFSKFGEVVDCTLKLDPITGRSRGFGFVLFKESESVDKVMDQKEHKLNGKVIDPKRAKAMKTKEPVKKIFVGGLSPDTPEEKIREYFGGFGEVESIELPMDNKTNKRRGFCFITFKEEEPVKKIMEKKYHNVGLSKCEIKVAMSKEQYQQQQQWGSRGGFAGRARGRGGGPSQNWNQGYSNYWNQGYGNYGYNSQGYGGYGGYDYTGYNNYYGYGDYSNQQSGYGKVSRRGGHQNSYKPY

SEQ ID NO: 4891 - protein, 82 aa, Homo sapiens
MSATWTLSPEPLPPSTGPPVGAGLDAEQRTVFAFVLCLLVVLVLLMVRCVRILLDPYSRMPASSWTDHKEALERGQFDYALV

SEQ ID NO: 4892 - protein, 812 aa, Homo sapiens
MGRKLDPTKEKRGPGRKARKQKGAETELVRFLPAVSDENSKRLSSRARKRAAKRRLGSVEAPKTNKSPEAKPLPGKLPKGISAGAVQTAGKKGPQSLFNAPRGKKRPAPGSDEEEEEEDSEEDGMVNHGDLWGSEDDADTVDDYGADSNSEDEEEGEALLPIERAARKQKAREAAAGIQWSEEETEDEEEEKEVTPESGPPKVEEADGGLQINVDEEPFVLPPAGEMEQDAQAPDLQRVHKRIQDIVGILRDFGAQREEGRSRSEYLNRLKKDLAIYYSYGDFLLGKLMDLFPLSELVEFLEANEVPRPVTLRTNTLKTRRRDLAQALINRGVNLDPLGKWSKTGLVVYDSSVPIGATPEYLAGHYMLQGASSMLPVMALAPQEHERILDMCCAPGGKTSYMAQLMKNTGVILANDANAERLKSVVGNLHRLGVTNTIISHYDGRQFPKVVGGFDRVLLDAPCSGTGVISKDPAVKTNKDEKDILRCAHLQKELLLSAIDSVNATSKTGGYLVYCTCSITVEENEWVVDYALKKRNVRLVPTGLDFGQEGFTRFRERRFHPSLRSTRRFYPHTHNMDGFFIAKFKKFSNSIPQSQTGNSETATPTNVDLPQVIPKSENSSQPAKKAKGAAKTKQQLQKQQHPKKASFQKLNGISKGADSELSTVPSVTKTQASSSFQDSSQPAGKAEGIREPKVTGKLKQRSPKLQSSKKVAFLRQNAPPKGTDTQTPAVLSPSKTQATLKPKDHHQPLGRAKGVEKQQLPEQPFEKAAFQKQNDTPKGPQPPTVSPIRSSRPPPAKRKKSQSRGNSQLLLS

SEQ ID NO: 4893 - protein, 364 aa, Homo sapiens
MNRAPLKRSRILHMALTGASDPSAEAEANGEKPFLLRALQIALVVSLYWVTSISMVFLNKYLLDSPSLRLDTPIFVTFYQCLVTTLLCKGLSALAACCPGAVDFPSLRLDLRVARSVLPLSVVFIGMITFNNLCLKYVGVAFYNVGRSLTTVFNVLLSYLLLKQTTSFYALLTCGIIIGGFWLGVDQEGAEGTLSWLGTVFGVLASLCVSLNAIYTTKVLPAVDGSIWRLTFYNNVNACILFLPLLLLLGELQALRDFAQLGSAHFWGMMTLGGLFGFAIGYVTGLQIKFTSPLTHNVSGTAKACAQTVLAVLYYEETKSFLWWTSNMMVLGGSSAYTWVRGWEMKKTPEEPSPKDSEKSAMGV

SEQ ID NO: 4894 - protein, 306 aa, Homo sapiens
MSEEQFGGDGAAAAATAAVGGSAGEQEGAMVAATQGAAAAAGSGAGTGGGTASGGTEGGSAESEGAKIDASKNEEDEGHSNSSPRHSEAATAQREEWKMFIGGLSWDTTKKDLKDYFSKFGEVVDCTLKLDPITGRSRGFGFVLFKESESVDKVMDQKEHKLNGKVIDPKRAKAMKTKEPVKKIFVGGLSPDTPEEKIREYFGGFGEVESIELPMDNKTNKRRGFCFITFKEEEPVKKIMEKKYHNVGLSKCEIKVAMSKEQYQQQQQWGSRGGFAGRARGRGGDQQSGYGKVSRRGGHQNSYKPY

SEQ ID NO: 4895 - protein, 141 aa, Homo sapiens
MTIMVEDIMKLLCSLSGERKMKAAVKHSGKGALVTGAMAFVGGLVGGPPGLAVGGAVGGLLGAWMTSGQFKPVPQILMELPPAEQQRLFNEAAAIIRHLEWTDAVQLTALVMGSEALQQQLLAMLVNYVTKELRAEIQYDD

SEQ ID NO: 4896 - protein, 286 aa, Homo sapiens
MSWLLFLAHRVALAALPCRRGSRGFGMFYAVRRGRKTGVFLTWNECRAQVDRFPAARFKKFATEDEAWAFVRKSASPEVSEGHENQHGQESEAKASKRLREPLDGDGHESAEPYAKHMKPSVEPAPPVSRDTFSYMGDFVVVYTDGCCSSNGRRRPRAGIGVYWGPGHPLNVGIRLPGRQTNQRAEIHAACKAIEQAKTQNINKLVLYTDSMFTINGITNWVQGWKKNGWKTSAGKEVINKEDFVALERLTQGMDIQWMHVPGHSGFIGNEEADRLAREGAKQSED

SEQ ID NO: 4897 - protein, 440 aa, Homo sapiens
MATRSCREKAQKLNEQHQLILSKLLREEDNKYCADCEAKGPRWASWNIGVFICIRCAGIHRNLGVHISRVKSVNLDQWTAEQIQCMQDMGNTKARLLYEANLPENFRRPQTDQAVEFFIRDKYEKKKYYDKNAIAITNKEKEKKKEEKKREKEPEKPAKPLTAEKLQKKDQQLEPKKSTSPKKAAEPTVDLLGLDGPAVAPVTNGNTTVPPLNDDLDIFGPMISNPLPATVMPPAQGTPSAPAAATLSTVTSGDLDLFTEQTTKSEEVAKKQLSKDSILSLYGTGTIQQQSTPGVFMGPTNIPFTSQAPAAFQGFPSMGVPVPAAPGLIGNVMGQSPSMMVGMPMPNGFMGNAQTGVMPLPQNVVGPQGGMVGQMGAPQSKFGLPQAQQPQWSLSQMNQQMAGMSISSATPTAGFGQPSSTTAGWSGSSSGQTLSTQLWK

SEQ ID NO: 4898 - protein, 271 aa, Homo sapiens
MAPRALPGSAVLAAAVFVGGAVSSPLVAPDNGSSRTLHSRTETTPSPSNDTGNGHPEYIAYALVPVFFIMGLFGVLICHLLKKKGYRCTTEAEQDIEEEKVEKIELNDSVNENSDTVGQIVHYIMKNEANADVLKAMVADNSLYDPESPVTPSTPGSPPVSPGPLSPGGTPGKHVCGHHLHTVGGVVERDVCHRCRHKRWHFIKPTNKSRESRPRRQGEVTVLSVGRFRVTKVEHKSNQKERRSLMSVSGAETVNGEVPATPVKRERSGTE

SEQ ID NO: 4899 - protein, 770 aa, Homo sapiens
MSNEVETSATNGQPDQQAAPKAPSKKEKKKGPEKTDEYLLARFKGDGVKYKAKLIGIDDVPDARGDKMSQDSMMKLKGMAAAGRSQGQHKQRIWVNISLSGIKIIDEKTGVIEHEHPVNKISFIARDVTDNRAFGYVCGGEGQHQFFAIKTGQQAEPLVVDLKDLFQVIYNVKKKEEEKKKIEEASKAVENGSEALMILDDQTNKLKSGVDQMDLFGDMSTPPDLNSPTESKDILLVDLNSEIDTNQNSLRENPFLTNGITSCSLPRPTPQASFLPENAFSANLNFFPTPNPDPFRDDPFTQPDQSTPSSFDSLKSPDQKKENSSSSSTPLSNGPLNGDVDYFGQQFDQISNRTGKQEAQAGPWPFSSSQTQPAVRTQNGVSEREQNGFSVKSSPNPFVGSPPKGLSIQNGVKQDLESSVQSSPHDSIAIIPPPQSTKPGRGRRTAKSSANDLLASDIFAPPVSEPSGQASPTGQPTALQPNPLDLFKTSAPAPVGPLVGLGGVTVTLPQAGPWNTASLVFNQSPSMAPGAMMGGQPSGFSQPVIFGTSPAVSGWNQPSPFAASTPPPVPVVWGPSASVAPNAWSTTSPLGNPFQSNIFPAPAVSTQPPSMHSSLLVTPPQPPPRAGPPKDISSDAFTALDPLGDKEIKDVKEMFKDFQLRQPPAVPARKGEQTSSGTLSAFASYFNSKVGIPQENADHDDFDANQLLNKINEPPKPAPRQVSLPVTKSTDNAFENPFFKDSFGSSQASVASSQPVSSEMYRDPFGNPFA

SEQ ID NO: 4900 - protein, 645 aa, Homo sapiens
MDFSFSFMQGIMGNTIQQPPQLIDSANIRQEDAFDNNSDIAEDGGQTPYEATLQQGFQYPATTEDLPPLTNGYPSSISVYETQTKYQSYNQYPNGSANGFGAVRNFSPTDYYHSEIPNTRPHEILEKPSPPQPPPPPSVPQTVIPKKTGSPEIKLKITKTIQNGRELFESSLCGDLLNEVQASEHTKSKHESRKEKRKKSNKHDSSRSEERKSHKIPKLEPEEQNRPNERVDTVSEKPREEPVLKEEAPVQPILSSVPTTEVSTGVKFQVGDLVWSKVGTYPWWPCMVSSDPQLEVHTKINTRGAREYHVQFFSNQPERAWVHEKRVREYKGHKQYEELLAEATKQASNHSEKQKIRKPRPQRERAQWDIGIAHAEKALKMTREERIEQYTFIYIDKQPEEALSQAKKSVASKTEVKKTRRPRSVLNTQPEQTNAGEVASSLSSTEIRRHSQRRHTSAEEEEPPPVKIAWKTAAARKSLPASITMHKGSLDLQKCNMSPVVKIEQVFALQNATGDGKFIDQFVYSTKGIGNKTEISVRGQDRLIISTPNQRNEKPTQSVSSPEATSGSTGSVEKKQQRRSIRTRSESEKSTEVVPKKKIKKEQVETVPQATVKTGLQKGSADRGVQGSVRFSDSSVSAAIEETVD

SEQ ID NO: 4901 - protein, 557 aa, Homo sapiens
MPPPRLLFFLLFLTPMEVRPEEPLVVKVEEGDNAVLQCLKGTSDGPTQQLTWSRESPLKPFLKLSLGLPGLGIHMRPLAIWLFIFNVSQQMGGFYLCQPGPPSEKAWQPGWTVNVEGSGELFRWNVSDLGGLGCGLKNRSSEGPSSPSGKLMSPKLYVWAKDRPEIWEGEPPCLPPRDSLNQSLSQDLTMAPGSTLWLSCGVPPDSVSRGPLSWTHVHPKGPKSLLSLELKDDRPARDMWVMETGLLLPRATAQDAGKYYCHRGNLTMSFHLEITARPVLWHWLLRTGGWKVSAVTLAYLIFCLCSLVGILHLQRALVLRRKRKRMTDPTRRFFKVTPPPGSGPQNQYGNVLSLPTPTSGLGRAQRWAAGLGGTAPSYGNPSSDVQADGALGSRSPPGVGPEEEEGEGYEEPDSEEDSEFYENDSNLGQDQLSQDGSGYENPEDEPLGPEDEDSFSNAESYENEDEELTQPVARTMDFLSPHGSAWDPSREATSLAGSQSYEDMRGILYAAPQLRSIRGQPGPNHEEDADSYENMDNPDGPDPAWGGGGRMGTWSTR

SEQ ID NO: 4902 - protein, 4128 aa, Homo sapiens [sequence omitted]

SEQ ID NO: 4903 - protein, 421 aa, Homo sapiens
MPRCTYQLEQNPGFLPDGPGVHARAHCQDLSGPYGHEFATSESLGGRVGKTRAPQSGARSRMERAGPAGEEGGAREGRLLPRAPGAWVLRACAERAALEVGAASADTGVRGCGARGPAPLLASAGGGRARDGTWGVRTKGSGAALPSRPASRAAPRPEASSPPLPLEKARGGLSGPQGGRARGAMAHVGSRKRSRSRSRSRGRGSEKRKKKSRKDTSRNCSASTSQGRKASTAPGAEASPSPCITERSKQKARRRTRSSSSSSSSSSSSSSSSSSSSSSSSSDGRKKRGKYKDKRRKKKKKRKKLKKKGKEKAEAQQVEALPGPSLDQWHRSAGEEEDGPVLTDEQKSRIQAMKPMTKEEWDARQSIIRKVVDPETGRTRLIKGDGEVLEEIVTKERHREINKQATRGDCLAFQMRAGLLP

SEQ ID NO: 4904 - protein, 299 aa, Homo sapiens
MVRCLGPALLLLLLLGSASSVGGNRCVDAAEACTADARCQRLRSEYVAQCLGRAAQGGCPRARCRRALRRFFARGPPALTHALLFCPCAGPACAERRRQTFVPSCAFSGPGPAPPSCLEPLNFCERSRVCRCARAAAGPWRGWGRGLSPAHRPPAAQASPPGLSGLVHPSAQRPRRLPAGPGRPLPARLRGPRGVPAGTAVTPNYVDNVSARVAPWCDCGASGNRREDCEAFRGLFTRNRCLDGAIQAFASGWPPVLLDQLNPQGDPEHSLLQVSSTGRALERRSLLSILPVLALPALL

SEQ ID NO: 4905 - protein, 328 aa, Homo sapiens
MRPVRLMKVFVTRRIPAEGRVALARAADCEVEQWDSDEPIPAKELERGVAGAHGLLCLLSDHVDKRILDAAGANLKVISTMSVGIDHLALDEIKKRGIRVGYTPDVLTDTTAELAVSLLLTTCRRLPEAIEEVKNGGWTSWKPLWLCGYGLTQSTVGIIGLGRIGQAIARRLKPFGVQRFLYTGRQPRPEEAAEFQAEFVSTPELAAQSDFIVVACSLTPATEGLCNKDFFQKMKETAVFINISRGDVVNQDDLYQALASGKIAAAGLDVTSPEPLPTNHPLLTLKNCVILPHIGSATHRTRNTMSLLAANNLLAGLRGEPMPSELKL

SEQ ID NO: 4906 - protein, 508 aa, Homo sapiens
MNCQQLWLGFLLPMTVSGRVLGLAEVAPVDYLSQYGYLQKPLEGSNNFKPEDITEALRAFQEASELPVSGQLDDATRARMRQPRCGLEDPFNQKTLKYLLLGRWRKKHLTFRILNLPSTLPPHTARAALRQAFQDWSNVAPLTFQEVQAGAADIRLSFHGRQSSYCSNTFDGPGRVLAHADIPELGSVHFDEDEFWTEGTYRGVNLRIIAAHEVGHALGLGHSRYSQALMAPVYEGYRPHFKLHPDDVAGIQALYGKKSPVIRDEEEEETELPTVPPVPTEPSPMPDPCSSELDAMMLGPRGKTYAFKGDYVWTVSDSGPGPLFRVSALWEGLPGNLDAAVYSPRTQWIHFFKGDKVWRYINFKMSPGFPKKLNRVEPNLDAALYWPLNQKVFLFKGSGYWQWDELARTDFSSYPKPIKGLFTGVPNQPSAAMSWQDGRVYFFKGKVYWRLNQQLRVEKGYPRNISHNWMHCRPRTIDTTPSGGNTTPSGTGITLDTTLSATETTFEY

SEQ ID NO: 4907 - protein, 1052 aa, Homo sapiens
MEGSEPVAAHQGEEASCSSWGTGSTNKNLPIMSTASVEIDDALYSRQRYVLGDTAMQKMAKSHVFLSGMGGLGLEIAKNLVLAGIKAVTIHDTEKCQAWDLGTNFFLSEDDVVNKRNRAEAVLKHIAELNPYVHVTSSSVPFNETTDLSFLDKYQCVVLTEMKLPLQKKINDFCRSQCPPIKFISADVHGIWSRLFCDFGDEFEVLDTTGEEPKEIFISNITQANPGIVTCLENHPHKLETGQFLTFREINGMTGLNGSIQQITVISPFSFSIGDTTELEPYLHGGIAVQVKTPKTVFFESLERQLKHPKCLIVDFSNPEAPLEIHTAMLALDQFQEKYSRKPNVGCQQDSEELLKLATSISETLEEKPDVNADIVHWLSWTAQGFLSPLAAAVGGVASQEVLKAVTGKFSPLCQWLYLEAADIVESLGKPECEEFLPRGDRYDALRACIGDTLCQKLQNLNIFLVGCGAIGCEMLKNFALLGVGTSKEKGMITVTDPDLIEKSNLNRQFLFRPHHIQKPKSYTAADATLKINSQIKIDAHLNKVCPTTETIYNDEFYTKQDVIITALDNVEARRYVDSRCLANLRPLLDSGTMGTKGHTEVIVPHLTESYNSHRDPPEEEIPFCTLKSFPAAIEHTIQWARDKFESSFSHKPSLFNKFWQTYSSAEEVLQKIQSGHSLEGCFQVIKLLSRRPRNWSQCVELARLKFEKYFNHKALQLLHCFPLDIRLKDGSLFWQSPKRPPSPIKFDLNEPLHLSFLQNAAKLYATVYCIPFAEEDLSADALLNILSEVKIQEFKPSNKVVQTDETARKPDHVPISSEDERNAIFQLEKAILSNEATKSDLQMAVLSFEKDDDHNGHIDFITAASNLRAKMYSIEPADRFKTKRIAGKIIPAIATTTATVSGLVALEMIKVTGGYPFEAYKNCFLNLAIPIVVFTETTEVRKTKIRNGISFTIWDRWTVHGKEDFTLLDFINAVKEKYGIEPTMVVQGVKMLYVPVMPGHAKRLKLTMHKLVKPTTEKKYVDLTVSFAPDIDGDEDLPGPPVRYYFSHDTD

SEQ ID NO: 4908 - protein, 68 aa, Homo sapiens
MPLLTQQIQDEDDQYSLVASLDNVRNLSTILKAIHFREHATCFATKNGIKVTVENAKCVQANAFIQGL

SEQ ID NO: 4909 - protein, 1338 aa, Homo sapiens
MSPVLHFYVRPSGHEGAAPGHTRRKLQGKLPELQGVETELCYNVNWTAEALPSAEETKKLMWLFGCPLLLDDVARESWLLPGSNDLLLEVGPRLNFSTPTSTNIVSVCRATGLGPVDRVETTRRYRLSFAHPPSAEVEAIALATLHDRMTEQHFPHPIQSFSPESMPEPLNGPINILGEGRLALEKANQELGLALDSWDLDFYTKRFQELQRNPSTVEAFDLAQSNSEHSRHWFFKGQLHVDGQKLVHSLFESIMSTQESSNPNNVLKFCDNSSAIQGKEVRFLRPEDPTRPSRFQQQQGLRHVVFTAETHNFPTGVCPFSGATTGTGGRIRDVQCTGRGAHVVAGTAGYCFGNLHIPGYNLPWEDPSFQYPGNFARPLEVAIEASNGASDYGNKFGEPVLAGFARSLGLQLPDGQRREWIKPIMFSGGIGSMEADHISKEAPEPGMEVVKVGGPVYRIGVGGGAASSVQVQGDNTSDLDFGAVQRGDPEMEQKMNRVIRACVEAPKGNPICSLHDQGAGGNGNVLKELSDPAGAIIYTSRFQLGDPTLNALEIWGAEYQESNALLLRSPNRDFLTHVSARERCPACFVGTITGDRRIVLVDDRECPVRRNGQGDAPPTPLPTPVDLELEWVLGKMPRKEFFLQRKPPMLQPLALPPGLSVHQALERVLRLPAVASKRYLTNKVDRSVGGLVAQQQCVGPLQTPLADVAVVALSHEELIGAATALGEQPVKSLLDPKVAARLAVAEALTNLVFALVTDLRDVKCSGNWMWAAKLPGEGAALADACEAMVAVMAALGVAVDGGKDSLSMAARVGTETVRAPGSLVISAYAVCPDITATVTPDLKHPEGRGHLLYVALSPGQHRLGGTALAQCFSQLGEHPPDLDLPENLVRAFSITQGLLKDRLLCSGHDVSDGGLVTCLLEMAFAGNCGLQVDVPVPRVDVLSVLFAEEPGLVLEVQEPDLAQVLKRYRDAGLHCLELGHTGEAGPHAMVRVSVNGAVVLEEPVGELRALWEETSFQLDRLQAEPRCVAEEERGLRERMGPSYCLPPTFPKASVPREPGGPSPRVAILREEGSNGDREMADAFHLAGFEVWDVTMQDLCSGAIGLDTFRGVAFVGGFSYADVLGSAKGWAAAVTFHPRAGAELRRFRKRPDTFSLGVCNGCQLLALLGWVGGDPNEDAAEMGPDSQPARPGLLLRHNLSGRYESRWASVRVGPGPALMLRGMEGAVLPVWSAHGEGYVAFSSPELQAQIEARGLAPLHWADDDGNPTEQYPLNPNGSPGGVAGICSCDGRHLAVMPHPERAVRPWQWAWRPPPFDTLTTSPWLQLFINARNWTLEGSC

SEQ ID NO: 4910 - protein, 696 aa, Homo sapiens
MHFDPGFEEQLFWGSQQAMNSGKTKSHFQLDPESQCSFGSFVSFRPDQGITLGSPQRHDARAPPPLACGPSESTLKEGIPGPRNLDLPGLWDVPAWESTQHPWPVCGESCWENNHLVMHQRGHSKDRTRRAWEKFNKRAETQMPWSSPRVQRHFRCGVCGKSFRRKLCLLRHLAAHTGRGPFRNADGEMCFRHELTHPSHRLPQQGEKPAQCTPCGKRSLPVDSTQARRCQHSREGPASWREGRGASSSVHSGQKPGSRLPQEGNSHQEGDTEALQHGAEGPCSCSECGERSPMSARLASPCRAHTGEKPFQCAHCTKRFRLRRLLQVHQHAHGGERPFSCRKCGKGFAKQCKLTEHIRVHSGEKPFRCAKCGRNFRQRGQLLRHQRLHTDEKPFQCPECGLSFRLESMLRAHRLRHGGERPFSCSECGRGFTHQCKLREHLRVHSGERPFQCLKCDKRFRLKGILKAHQHTHSKERPFSCGECGKGFTRQSKLTEHLRVHSGERPFQCPECNRSFRLKGQLLSHQRLHTGERPFQCPECDKRYRVKADMKAHQLLHSGEMPFSCECGKGFVKHSKLIEHIRTHTGEKPFQCPKCDKSFRLKAQLLSHQGLHTGERPFHCPECDKNFRERGHMLRHQRIHRPERPFACGDCGKGFIYKSKLAEHIRVHTKSCPAPNELDIKKRLSQLFAMIEADWS

SEQ ID NO: 4911 - protein, 757 aa, Homo sapiens
MAGLTAAAPRPGVLLLLLSILHPSRPGGVPGAIPGGVPGGVFYPGAGLGALGGGALGPGGKPLKPVPGGLAGAGLGAGLGAFPAVTFPGALVPGGVADAAAAYKAAKAGAGLGGVPGVGGLGVSAGAVVPQPGAGVKPGKVPGVGLPGVYPGGVLPGARFPGVGVLPGVPTGAGVKPKAPGVGGAFAGIPGVGPFGGPQPGVPLGYPIKAPKLPGGYGLPYTTGKLPYGYGPGGVAGAAGKAGYPTGTGVGPQAAAAAAAKAAAKFGAGAAGVLPGVGGAGVPGVPGAIPGIGGIAGVGTPAAAAAAAAAAKAAKYGAAAGLVPGGPGFGPGVVGVPGAGVPGVGVPGAGIPVVPGAGIPGAAVPGVVSPEAAAKAAAKAAKYGARPGVGVGGIPTYGVGAGGFPGFGVGVGGIPGVAGVPGVGGVPGVGGVPGVGISPEAQAAAAAKAAKYGVGTPAAAAAKAAAKAAQFGLVPGVGVAPGVGVAPGVGVAPGVGLAPGVGVAPGVGVAPGVGVAPGIGPGGVAAAAKSAAKVAAKAQLRAAAGLGAGIPGLGVGVGVPGLGVGAGVPGLGVGAGVPGFGAGADEGVRRSLSPELREGDPSSSQHLPSTPSSPRVPGALAAAKAAKYGAAVPGVLGGLGALGGVGIPGGVVGAGPAAAAAAAKAAAKAAQFGLVGAAGLGGLGVGGLGVPGVGGLGGIPPAAAAKAAKYGAAGLGGVLGGAGQFPLGGVAARPGFGLSPIFPGGACLGKACGRKRK

SEQ ID NO: 4912 - protein, 261 aa, Homo sapiens
MWDLVLSIALSVGCTGAVPLIQSRIVGGWECEKHSQPWQVAVYSHGWAHCGGVLVHPQWVLTAAHCLKKNSQVWLGRHNLFEPEDTGQRVPVSHSFPHPLYNMSLLKHQSLRPDEDSSHDLMLLRLSEPAKITDVVKVLGLPTQEPALGTTCYASGWGSIEPEEFLRPRSLQCVSLHLLSNDMCARAYSEKVTEFMLCAGLWTGGKDTCGGDSGGPLVCNGVLQGITSWGPEPCALPEKPAVYTKVVHYRKWIKDTIAANP

SEQ ID NO: 4913 - protein, 320 aa, Homo sapiens
MAPWTLWRCCQRVVGWVPVLFITFVVVWSYYAYVVELCVFTIFGNEENGKTVVYLVAFHLFFVMFVWSYWMTIFTSPASPSKEFYLSNSEKERYEKEFSQERQQEILRRAARALPIYTTSASKTIRYCEKCQLIKPDRAHHCSACDSCILKMDHHCPWVNNCVGFSNYKFFLLFLLYSLLYCLFVAATVLEYFIKFWTNELTDTRAKFHVLFLFFVSAMFFISVLSLFSYHCWLVGKNRTTIESFRAPTFSYGPDGNGFSLGCSKNWRQVFGDEKKYWLLPIFSSLGDGCSFPTRLVGMDPEQASVTNQNEYARRSKLQR

SEQ ID NO: 4914 - protein, 51 aa, Homo sapiens
MFRIEGLAPKLDPEEMKRKMREDVISSIRNFLIYVALLRVTPFILKKLDSI

SEQ ID NO: 4915 - protein, 845 aa, Homo sapiens
MPKAPKQQPPEPEWIGDGESTSPSDKVVKKGKKDKKIKKTFFEELAVEDKQAGEEEKVLKEKEQQQQQQQQQQKKKRDTRKGRRKKDVDDDGEEKELMERLKKLSVPTSDEEDEVPAPKPRGGKKTKGGNVFAALIQDQSEEEEEEEKHPPKPAKPEKNRINKAVSEEQQPALKGKKGKEEKSKGKAKPQNKFAALDNEEEDKEEEIIKEKEPPKQGKEKAKKAEQGSEEEGEGEEEEEEGGESKADDPYAHLSKKEKKKLKKQMEYERQVASLKAANAAENDFSVSQAEMSSRQAMLENASDIKLEKFSISAHGKELFVNADLYIVAGRRYGLVGPNGKGKTTLLKHIANRALSIPPNIDVLLCEQEVVADETPAVQAVLRADTKRLKLLEEERRLQGQLEQGDDTAAERLEKVYEELRATGAAAAEAKARRILAGLGFDPEMQNRPTQKFSGGWRMRVSLARALFMEPTLLMLDEPTNHLDLNAVIWLNNYLQGWRKTLLIVSHDQGFLDDVCTDIIHLDAQRLHYYRGNYMTFKKMYQQKQKELLKQYEKQEKKLKELKAGGKSTKQAEKQTKEALTRKQQKCRRKNQDEESQEAPELLKRPKEYTVRFTFPDPPPLSPPVLGLHGVTFGYQGQKPLFKNLDFGIDMDSRICIVGPNGVGKSTLLLLLTGKLTPTHGEMRKNHRLKIGFFNQQYAEQLRMEETPTEYLQRGFNLPYQDARKCLGRFGLESHAHTIQICKLSGGQKARVVFAELACREPDVLILDEPTNNLDIESIDALGEAINEYKGAVIVVSHDARLITETNCQLWVVEEQSVSQIDGDFEDYKREVLEALGEVMVSRPRE

SEQ ID NO: 4916 - protein, 273 aa, Homo sapiens
MLGQVVTLILLLLLKVYQGKGCQGSADHVVSISGVPLQLQPNSIQTKVDSIAWKKLLPSQNGFHHILKWENGSLPSNTSNDRFSFIVKNLSLLIKAAQQQDSGLYCLEVTSISGKVQTATFQVFVFEFRFWPFLVIIVILSALFLGTLACFCVWRRKRKEKQSETSPKEFLTIYEDVKDLKTRRNHEQEQTFPGGGSTIYSMIQSQSSAPTSQEPAYTLYSLIQPSRKSGSRKRNHSPSFNSTIYEVIGKSQPKAQNPARLSRKELENFDVYS

SEQ ID NO: 4917 - protein, 384 aa, Homo sapiens
MAAVQMDPELAKRLFFEGATVVILNMPKGTEFGIDYNSWEVGPKFRGVKMIPPGIHFLHYSSVDKANPKEVGPRMGFFLSLHQRGLTVLRWSTLREEVDLSPAPESEVEAMRANLQELDQFLGPYPYATLKKWISLTNFISEATVEKLQPENRQICAFSDVLPVLSMKHTKDRVGQNLPRCGIECKSYQEGLARLPEMKPRAGTEIRFSELPTQMFPEGATPAEITKHSMDLSYALETVLNKQFPSSPQDVLGELQFAFVCFLLGNVYEAFEHWKRLLNLLCRSEAAMMKHHTLYINLISILYHQLGEIPADFFVDIVSQDNFLTSTLQVFFSSACSIAVDATLRKKAEKFQAHLTKKFRWDFAAEPEDCAPVVVELPEGIEMG

SEQ ID NO: 4918 - protein, 119 aa, Homo sapiens
MTQQGAALQNYNNELVKCIEELCQKREELCRQIQEEEDEKQRLQNEVRQLTEKLARVNENLARKIASRNEFDRTIAETEAAYLKILESSQTLLSVLKREAGNLTKATAPDQKSSGGRDS

SEQ ID NO: 4919 - protein, 630 aa, Homo sapiens
MPLGGRASLTPQKLWLGTAKPGSLTQALNSPLTWEHAWTGVPGGTPDCLTDTFRVKRPHLRRSASNGHVPGTPVYREKEDMYDEIIELKKSLHVQKSDVDLMRTKLRRLEEENSRKDRQIEQLLDPSRGTDFVRTLAEKRPDASWVINGLKQRILKLEQQCKEKDGTISKLQTDMKTTNLEEMRIAMETYYEEVHRLQTLLASSETTGKKPLGEKKTGAKRQKKMGSALLSLSRSVQELTEENQSLKEDLDRVLSTSPTISKTQGYVEWSKPRLLRRIVELEKKLSVMESSKSHAAEPVRSHPPACLASSSALHRQPRGDRNKDHERLRGAVRDLKEERTALQEQLLQRDLEVKQLLQAKADLEKELECAREGEEERREREEVLREEIQTLTSKLQELQEMKKEEKEDCPEVPHKAQELPAPTPSSRHCEQDWPPDSSEEGLPRPRSPCSDGRRDAAARVLQAQWKVYKHKKKKAVLDEAAVVLQAAFRGHLTRTKLLASKAHGSEPPSVPGLPDQSSPVPRVPSPIAQATGSPVQEEAIVIIQSALRAHLARARHSATGKRTTTAASTRRRSASATHGDASSPPFLAALPDPSPSGPQALAPLPGDDVNSDDSDDIVIAPSLPTKNFPV

SEQ ID NO: 4920 - protein, 256 aa, Homo sapiens
MGPRARPALLLLMLLQTAVLQGRLLRSHSLHYLFMGASEQDLGLSLFEALGYVDDQLFVFYDHESRRVEPRTPWVSSRISSQMWLQLSQSLKGWDHMFTVDFWTIMENHNHSKVPPLVKVTHHVTSSVTTLRCRALNYYPQNITMKWLKDKQPMDAKEFEPKDVLPNGDGTYQGWITLAVPPGEEQRYTCQVEHPGLDQPLIVIWEPSPSGTLVIGVISGIAVFVVILFIGILFIILRKRQGSRGAMGHYVLAERE

SEQ ID NO: 4921 - protein, 447 aa, Homo sapiens
MSASKIPLFKMKDLILILCLLEMSFAVPFFPQQSGTPGMASLSLETMRQLGSLQRLNTLSQYSRYGFGKSFNSLWMHGLLPPHSSLPWMRPREHETQQYEYSLPVHPPPLPSQPSLKPQQPGLKPFLQSAAATTNQATALKEALQPPIHLGHLPLQEGELPLVQQQVAPSDKPPKPELPGVDFADPQGPSLPGMDFPDPQGPSLPGLDFADPQGSTIFQIARLISHGPMPQNKQSPLYPGMLYVPFGANQLNAPARLGIMSSEEVAGGREDPMAYGAMFPGFGGMRPGFEGMPHNPAMGGDFTLEFDSPVAATKGPENEEGGAQGSPMPEANPDNLENPAFLTELEPAPHAGLLALPKDDIPGLPRSPSGKMKGLPSVTPAAADPLMTPELADVYRTYDADMTTSVDFQEEATMDTTMAPNSLQTSMPGNKAQEPEMMHDAWHFQEP

SEQ ID NO: 4922 - protein, 914 aa, Homo sapiens
MGDSRDLCPHLDSIGEVTKEDLLLKSKGTCQSCGVTGPNLWACLQVACPYVGCGESFADHSTIHAQAKKHNLTVNLTTFRLWCYACEKEVFLEQRLAAPLLGSSSKFSEQDSPPPSHPLKAVPIAVADEGESESEDDDLKPRGLTGMKNLGNSCYMNAALQALSNCPPLTQFFLECGGLVRTDKKPALCKSYQKLVSEVWHKKRPSYVVPTSLSHGIKLVNPMFRGYAQQDTQEFLRCLMDQLHEELKEPVVATVALTEARDSDSSDTDEKREGDRSPSEDEFLSCDSSSDRGEGDGQGRGGGSSQAETELLIPDEAGRAISEKERMKDRKFSWGQQRTNSEQVDEDADVDTAMAALDDQPAEAQPPSPRSSSPCRTPEPDNDAHLRSSSRPCSPVHHHEGHAKLSSSPPRASPVRMAPSYVLKKAQVLSAGSRRRKEQRYRSVISDIFDGSILSLVQCLTCDRVSTTVETFQDLSLPIPGKEDLAKLHSAIYQNVPAKPGACGDSYAAQGWLAFIVEYIRRFVVSCTPSWFWGPVVTLEDCLAAFFAADELKGDNMYSCERCKKLRNGVKYCKVLRLPEILCIHLKRFRHEVMYSFKINSHVSFPLEGLDLRPFLAKECTSQITTYDLLSVICHHGTAGSGHYIAYCQNVINGQWYEFDDQYVTEVHETVVQNAEGYVLFYRKSSEEAMRERQQVVSLAAMREPSLLRFYVSREWLNKFNTFAEPGPITNQTFLCSHGGIPPHKYHYIDDLVVILPQNVWEHLYNRFGGGPAVNHLYVCSICQVEIEALAKRRRIEIDTFIKLNKAFQAEESPGVIYCISMQWFREWEAFVKGKDNEPPGPIDNSRIAQVKGSGHVQLKQGADYGQISEETWTYLNSLYGGGPEIAIRQSVAQPLGPENLHGEQKIEAETRAV

SEQ ID NO: 4923 - protein, 443 aa, Homo sapiens
MQRRDDPAARMSRSSGRSGSMDPSGAHPSVRQTPSRQPPLPHRSRGGGGGSRGGARASPATQPPPLLPPSATGPDATVGGPAPTPLLPPSATASVKMEPENKYLPELMAEKDSLDPSFTHAMQLLTAEIEKIQKGDSKKDDEENYLDLFSHKNMKLKERVLIPVKQYPKFNFVGKILGPQGNTIKRLQEETGAKISVLGKGSMRDKAKEEELRKGGDPKYAHLNMDLHVFIEVFGPPCEAYALMAHAMEEVKKFLVPDMMDDICQEQFLELSYLNGVPEPSRGRGVPVRGRGAAPPPPPVPRGRGVGPPRGALVRGTPVRGAITRGATVTRGVPPPPTVRGAPAPRARTAGIQRIPLPPPPAPETYEEYGYDDTYAEQSYEGYEGYYSQSQGDSEYYDYGHGEVQDSYEAYGQDDWNGTRPSLKAPPARPVKGAYREHPYGRY

SEQ ID NO: 4924 - protein, 184 aa, Homo sapiens
MMSFLLGAILTLLWAPTAQAEVLLQPDFNAEKFSGLWYVVSMASDCRVFLGKKDHLSMSTRAIRPTEEGGLHVHMEFPGADGCNQVDAEYLKVGSEGHFRVPALGYLDVRIVDTDYSSFAVLYIYKELEGALSTMVQLYSRTQDVSPQALKSFQDFYPTLGLPKDMMVMLPQSDACNPESKEAP

SEQ ID NO: 4925 - protein, 1447 aa, Homo sapiens
MAHSKTRTNDGKITYPPGVKEISDKISKEEMVRRLKMVVKTFMDMDQDSEEEKELYLNLALHLASDFFLKHPDKDVRLLVACCLADIFRIYAPEAPYTSPDKLKDIFMFITRQLKGLEDTKSPQFNRYFYLLENIAWVKSYNICFELEDSNEIFTQLYRTLFSVINNGHNQKVHMHMVDLMSSIICEGDTVSQELLDTVLVNLVPAHKNLNKQAYDLAKALLKRTAQAIEPYITNFFNQVLMLGKTSISDLSEHVFDLILELYNIDSHLLLSVLPQLEFKLKSNDNEERLQVVKLLAKMFGAKDSELASQNKPLWQCYLGRFNDIHVPIRLECVKFASHCLMNHPDLAKDLTEYLKVRSHDPEEAIRHDVIVSIVTAAKKDILLVNDHLLNFVRERTLDKRWRVRKEAMMGLAQIYKKYALQSAAGKDAAKQIAWIKDKLLHIYYQNSIDDRLLVERIFAQYMVPHNLETTERMKCLYYLYATLDLNAVKALNEMWKCQNLLRHQVKDLLDLIKQPKTDASVKAIFSKVMVITRNLPDPGKAQDFMKKFTQVLEDDEKIRKQLEVLVSPTCSCKQAEGCVREITKKLGNPKQPTNPFLEMIKFLLERIAPVHIDTESISALIKQVNKSIDGTADDEDEGVPTDQAIRAGLELLKVLSFTHPISFHSAETFESLLACLKMDDEKVAEAALQIFKNTGSKIEEDFPHIRSALLPVLHHKSKKGPPRQAKYAIHCIHAIFSSKETQFAQIFEPLHKSLDPSNLEHLITPLVTIGHIALLAPDQFAAPLKSLVATFIVKDLLMNDRLPGKKTTKLWVPDEEVSPETMVKIQAIKMMVRWLLGMKNNHSKSGTSTLRLLTTILHSDGDLTEQGKISKPDMSRLRLAAGSAIVKLAQEPCYHEIITLEQYQLCALAINDECYQVRQVFAQKLHKGLSRLRLPLEYMAICALCAKDPVKERRAHARQCLVKNINVRREYLKQHAAVSEKLLSLLPEYVVPYTIHLLAHDPDYVKVQDIEQLKDVKECLWFVLEILMAKNENNSHAFIRKMVENIKQTKDAQGPDDAKMNEKLYTVCDVAMNIIMSKSTTYSLESPKDPVLPARFFTQPDKNFSNTKNYLPPEMKSFFTPGKPKTTNVLGAVNKPLSSAGKQSQTKSSRMETVSNASSSSNPSSPGRIKGRLDSSEMDHSENEDYTMSSPLPGKKSDKRDDSDLVRSELEKPRGRKKTPVTEQEEKLGMDDLTKLVQEQKPKGSQRSRKRGHTASESDEQQWPEEKRLKEDILENEDEQNSPPKKGKRGRPPKPLGGGTPKEEPTMKTSKKGSKKKSGPPAPEEEEEEERQSGNTEQKSKSKQHRVSRRAQQRAESPESSAIESTQSTPQKGRGRPSKTPSPSQPKKNVRVGRSKQAATKENDSSEEVDVFQGSSPVDDIPQEETEEEEVSTVNVRRRSAKRERR

SEQ ID NO: 4926 - protein, 538 aa, Homo sapiens
MWSGRSSFTSLVVGVFVVYVVHTCWVMYGIVYTRPCSGDANCIQPYLARRPKLQLSVYTTTRSHLGAENNIDLVLNVEDFDVESKFERTVNVSVPKKTRNNGTLYAYIFLHHAGVLPWHDGKQVHLVSPLTTYMVPKPEEINLLTGESDTQQIEAEKKPTSALDEPVSHWRPRLALNVMADNFVFDGSSLPADVHRYMKMIQLGKTVHYLPILFIDQLSNRVKDLMVINRSTTELPLTVSYDKVSLGRLRFWIHMQDAVYSLQQFGFSEKDADEVKGIFVDTNLYFLALTFFVAAFHLLFDFLAFKNDISFWKKKKSMIGMSTKAVLWRCFSTVVIFLFLLDEQTSLLVLVPAGVGAAIELWKVKKALKMTIFWRGLMPEFQFGTYSESERKTEEYDTQAMKYLSYLLYPLCVGGAVYSLLNIKYKSWYSWLINSFVNGVYAFGFLFMLPQLFVNYKLKSVAHLPWKAFTYKAFNTFIDDVFAFIITMPTSHRLACFRDDVVFLVYLYQRWLYPVDKRRVNEFGESYEEKATRAPHTD

SEQ ID NO: 4927 - protein, 440 aa, Homo sapiens
MGLGVSAEQPAGGAEGFHLHGVQENSPAQQAGLEPYFDFIITIGHSRLNKENDTLKALLKANVEKPVKLEVFNMKTMRVREVEVVPSNMWGGQGLLGASVRFCSFRRASEQVWHVLDVEPSSPAALAGLRPYTDYVVGSDQILQESEDFFTLIESHEGKPLKLMVYNSKSDSCREVTVTPNAAWGGEGSLGCGIGYGYLHRIPTQPPSYHKKPPGTPPPSALPLGAPPPDALPPGPTPEDSPSLETGSRQSDYMEALLQAPGSSMEDPLPGPGSPSHSAPDPDGLPHFMETPLQPPPPVQRVMDPGFLDVSGISLLDNSNASVWPSLPSSTELTTTAVSTSGPEDICSSSSSHERGGEATWSGSEFEVSFLDSPGAQAQADHLPQLTLPDSLTSAASPEDGLSAELLEAQAEEEPASTEGLDTGTEAEGLDSQAQISTTE

SEQ ID NO: 4928 - protein, 399 aa, Homo sapiens
MEPPGRRECPFPSWRFPGLLLAAMVLLLYSFSDACEEPPTFEAMELIGKPKPYYEIGERVDYKCKKGYFYIPPLATHTICDRNHTWLPVSDDACYRETCPYIRDPLNGQAVPANGTYEFGYQMHFICNEGYYLIGEEILYCELKGSVAIWSGKPPICEKVLCTPPPKIKNGKHTFSEVEVFEYLDAVTYSCDPAPGPDPFSLIGESTIYCGDNSVWSRAAPECKVVKCRFPVVENGKQISGFGKKFYYKATVMFECDKGFYLDGSDTIVCDSNSTWDPPVPKCLKVLPPSSTKPPALSHSVSTSSTTKSPASSASGPRPTYKPPVSNYPGYPKPEEGILDSLDVWVIAVIVIAIVVGVAVICVVPYRYLQRRKKKGKADGGAEYATYQTKSTTPAEQRG

SEQ ID NO: 4929 - protein, 1356 aa, Homo sapiens
MDLKEKHLGEPPSALGLSTRKALSVLKEQLEAVLEGHLRERKKCLTWKEVWRSSFLHHSNRCSCFHWPGASLMLLAVLLLLGCCGGQPAGSRGVGLVNASALFLLLLLNLVLIGRQDRLKRREVERRLRGIIDQIQDALRDGREIQWPSAMYPDLHMPFAPSWSLHWAYRDGHLVNLPVSLLVEGDIIALRPGQESFASLRGIKDDEHIVLEPGDLFPPFSPPPSPRGEVERGPQSPQQHRLFRVLETPVIDNIRWCLDMALSRPVTALDNERFTVQSVMLHYAVPVVLAGFLITNALRFIFSAPGVTSWQYTLLQLQVNGVLPILPLLFPVLWVLATACGEARVLAQMSKASPSSLLAKFSEDTLSSYTEAVSSQEMLRCIWGHFLRVLGGTSPTLSHSSSLLHSLGSVTVLCCVDKQGILSWPNPSPETVLFFSGKVEPPHSSHEDLTDGLSTRSFCHPEPHERDALLAGSLNNTLHLSNEQERGDWPGEAPKPPEPYSHHKAHGRSKHPSGSNVSFSRDTEGGEEEPSKTQPGMESDPYEAEDFVCDYHLEMLSLSQDQQNPSCIQFDDSNWQLHLTSLKPLGLNVLLNLCDASVTERLCRFSDHLCNIALQESHSAVLPVHVPWGLCELARLIGFTPGAKELFKQENHLALYRLPSAETMKETSLGRLSCVTKRRPPLSHMISLFIKDTTTSTEQMLSHGTADVVLEACTDFWDGADIYPLSGSDRKKVLDFYQRACLSGYCSAFAYKPMNCALSSQLNGKCIELVQVPGQSSIFTMCELPSTIPIKQNARRSSWSSDEGIGEVLEKEDCMQALSGQIFMGMVSSQYQARLDIVRLIDGLVNACIRFVYFSLEDELKSKVFAEKMGLETGWNCHISLTPNGDMPGSEIPPSSPSHAGSLHDDLNQVSRDDAEGLLLMEEEGHSDLISFQPTDSDIPSFLEDSNRAKLPRGIHQVRPHLQNIDNVPLLVPLFTDCTPETMCEMIKIMQEYGEVTCCLGSSANLRNSCLFLQSDISIALDPLYPSRCSWETFGYATSISMAQASDGLSPLQLSGQLNSLPCSLTFRQEETISIIRLIEQARHATYGIRKCFLFLLQCQLTLVVIQFLSCLVQLPPLLSTTDILWLSCFCYPLLSISLLGKPPHSSIMSMATGKNLQSIPKKTQHYFLLCFLLKFSLTISSCLICFGFTLQSFCDSSRDRNLTNCSSVMLPSNDDRAPAWFEDFANGLLSAQKLTAALIVLHTVFISITHVHRTKPLWRKSPLTNLWWAVTVPVVLLGQVVQTAVDLQLWTHRDSHVHFGLEDVPLLTWLLGCLSLVLVVVTNEIVKLHEIRVRVRYQKRQKLQFETKLGMNSPF

SEQ ID NO: 4930 - protein, 235 aa, Homo sapiens
MLSATRRACQLLLLHSLFPVPRMGNSASNIVSPQEALPGRKEQTPVAAKHHVNGNRTVEPFPEGTQMAVFGMGCFWGAERKFWVLKGVYSTQVGFAGGYTSNPTYKEVCSEKTGHAEVVRVVYQPEHMSFEELLKVFWENHDPTQGMRQGNDHGTQYRSAIYPTSAKQMEAALSSKENYQKVLSEHGFGPITTDIREGQTFYYAEDYHQQYLSKNPNGYCGLGGTGVSCPVGIKK

SEQ ID NO: 4931 - protein, 1079 aa, Homo sapiens
MDDDDDSCLLDLIGDPQALNYFLHGPSNKSSNDDLTNAGYSAANSNSIFANSSNADPKSSLKGVSNQLGEGPSDGLPLSSSLQFLEDELESSPLPDLTEDQPFDILQKSLQEANITEQTLAEEAYLDASIGSSQQFAQAQLHPSSSASFTQASNVSNYSGQTLQPIGVTHVPVGASFASNTVGVQHGFMQHVGISVPSQHLSNSSQISGSGQIQLIGSFGNHPSMMTINNLDGSQIILKGSGQQAPSNVSGGLLVHRQTPNGNSLFGNSSSSPVAQPVTVPFNSTNFQTSLPVHNIIIQRGLAPNSNKVPINIQPKPIQMGQQNTYNVNNLGIQQHHVQQGISFASASSPQGSVVGPHMSVNIVNQQNTRKPVTSQAVSSTGGSIVIHSPMGQPHAPQSQFLIPTSLSVSSNSVHHVQTINGQLLQTQPSQLISGQVASEHVMLNRNSSNMLRTNQPYTGPMLNNQNTAVHLVSGQTFAASGSPVIANHASPQLVGGQMPLQQASPTVLHLSPGQSSVSQGRPGFATMPSVTSMSGPSRFPAVSSASTAHPSLGSAVQSGSSGSNFTGDQLTQPNRTPVPVSVSHRLPVSSSKSTSTFSNTPGTGTQQQFFCQAQKKCLNQTSPISAPKTTDGLRQAQIPGLLSTTLPGQDSGSKVISASLGTAQPQQEKVVGSSPGHPAVQVESHSGGQKRPAAKQLTKGAFILQQLQRDQAHTVTPDKSHFRSLSDAVQRLLSYHVCQGSMPTEEDLRKVDNEFETVATQLLKRTQAMLNKYRCLLLEDAMRINPSAEMVMIDRMFNQEERASLSRDKRLALVDPEGFQADFCCSFKLDKAAHETQFGRSDQHGSKASSSLQPPAKAQGRDRAKTGVTEPMNHDQFHLVPNHIVVSAEGNISKKTECLGRALKFDKVGLVQYQSTSEEKASRREPLKASQCSPGPEGHRKTSSRSDHGTESKLSSILADSHLEMTCNNSFQDKSLRNSPKNEVLHTDIMKGSGEPQPDLQLTKSLETTFKNILELKKAGRQPQSDPTVSGSVELDFPNFSPMASQENCLEKFIPDHSEGVVETDSILEAAVNSILEC

SEQ ID NO: 4932 - protein, 843 aa, Homo sapiens
MWTPELAILRGFPTEAERQQWKQEGVVGSESGSFLQLLLEGNYEAIFLNSMTQNIFNSTTTAEEKIDSYLEKQVVTFLDYSTDLDTTERQQLIFLLGVSSLQLFVQSNWTGPPVDLHPQDFLSSVLFQQFSEVKGLDAFVLSLLTLDGESIYSLTSKPILLLLARIILVNVRHKLTAIQSLPWWTLRCVNIHQHLLEERSPLLFTLAENCIDQVMKLQNLFVDDSGRYLAIQFHLECAYVFLYYYEYRKAKDQLDIAKDISQLQIDLTGALGKRTRFQENYVAQLILDVRREGDVLSNCEFTPAPTPQEHLTKNLELNDDTILNDIKLADCEQFQMPDLCAEEIAIILGICTNFQKNNPVHTLTEVELLAFTSCLLSQPKFWAIQTSALILRTKLEKGSTRRVERAMRQTQALADQFEDKTTSVLERLKIFYCCQVPPHWAIQRQLASLLFELGCTSSALQIFEKLEMWEDVVICYERAGQHGKAEEILRQELEKKETPSLYCLLGDVLGDHSCYDKAWELSRYRSARAQRSKALLHLRNKEFQECVECFERSVKINPMQLGVWFSLGCAYLALEDYQGSAKAFQRCVTLEPDNAEAWNNLSTSYIRLKQKVKAFRTLQEALKCNYEHWQIWENYILTSTDVGEFSEAIKAYHRLLDLRDKYKDVQVLKILVRAVIDGMTDRSGDVATGLKGKLQELFGRVTSRVTNDGEIWRLYAHVYGNGQSEKPDENEKAFQCLSKAYKCDTQSNCWEKDITSFKEVVQRALGLAHVAIKCSKNKSSSQEAVQMLSSVRLNLRGLLSKAKQLFTDVATGEMSRELADDITAMDTLVTELQDLSNQFRNQY

SEQ ID NO: 4933 - protein, 253 aa, Homo sapiens
MMMKIPWGSIPVLMLLLLLGLIDISQAQLSCTGPPAIPGIPGIPGTPGPDGQPGTPGIKGEKGLPGLAGDHGEFGEKGDPGIPGNPGKVGPKGPMGPKGGPGAPGAPGPKGESGDYKATQKIAFSATRTINVPLRRDQTIRFDHVITNMNNNYEPRSGKFTCKVPGLYYFTYHASSRGNLCVNLMRGRERAQKVVTFCDYAYNTFQVTTGGMVLKLEQGENVFLQATDKNSLLGMEGANSIFSGFLLFPDMEA

SEQ ID NO: 4934 - protein, 1437 aa, Homo sapiens
MDFSFSFMQGIMGNTIQQPPQLIDSANIRQEDAFDNNSDIAEDGGQTPYEATLQQGFQYPATTEDLPPLTNGYPSSISVYETQTKYQSYNQYPNGSANGFGAVRNFSPTDYYHSEIPNTRPHEILEKPSPPQPPPPPSVPQTVIPKKTGSPEIKLKITKTIQNGRELFESSLCGDLLNEVQASEHTKSKHESRKEKRKKSNKHDSSRSEERKSHKIPKLEPEEQNRPNERVDTVSEKPREEPVLKEEAPVQPILSSVPTTEVSTGVKFQVGDLVWSKVGTYPWWPCMVSSDPQLEVHTKINTRGAREYHVQFFSNQPERAWVHEKRVREYKGHKQYEELLAEATKQASNHSEKQKIRKPRPQRERAQWDIGIAHAEKALKMTREERIEQYTFIYIDKQPEEALSQAKKSVASKTEVKKTRRPRSVLNTQPEQTNAGEVASSLSSTEIRRHSQRRHTSAEEEEPPPVKIAWKTAAARKSLPASITMHKGSLDLQKCNMSPVVKIEQVFALQNATGDGKFIDQFVYSTKGIGNKTEISVRGQDRLIISTPNQRNEKPTQSVSSPEATSGSTGSVEKKQQRRSIRTRSESEKSTEVVPKKKIKKEQVETVPQATVKTGLQKGASEISDSCKPLKKRSRASTDVEMTSSAYRDTSDSDSRGLSDLQVGFGKQVDSPSATADADVSDVQSMDSSLSRRGTGMSKKDTVCQICESSGDSLIPCEGECCKHFHLECLGLASLPDSKFICMECKTGQHPCFSCKVSGKDVKRCSVGACGKFYHEACVRKFPTAIFESKGFRCPQHCCSACSMEKDIHKASKGRMMRCLRCPVAYHSGDACIAAGSMLVSSYILICSNHSKRSSNSSAVNVGFCFVCARGLIVQDHSDPMFSSYAYKSHYLLNESNRAELMKLPMIPSSSASKKKCEKGGRLLCCESCPASFHPECLSIEMPEGCWNCNDCKAGKKLHYKQIVWVKLGNYRWWPAEICNPRSVPLNIQGLKHDLGDFPVFFFGSHDYYWVHQGRVFPYVEGDKSFAEGQTSINKTFKKALEEAAKRFQELKAQRESKEALEIEKNSRKPPPYKHIKANKVIGKVQIQVADLSEIPRCNCKPADENPCGLESECLNRMLQYECHPQVCPAGDRCQNQCFTKRLYPDAEIIKTERRGWGLRTKRSIKKGEFVNEYVGELIDEEECRLRIKRAHENSVTNFYMLTVTKDRIIDAGPKGNYSRFMNHSCNPNCETQKWTVNGDVRVGLFALCDIPAGMELTFNYNLDCLGNGRTECHCGADNCSGFLGVRPKSACASTNEEKAKNAKLKQKRRKIKTEPKQMHEDYCFQCGDGGELVMCDKKDCPKAYHLLCLNLTQPPYGKWECPWHQCDECSSAAVSFCEFCPHSFCKDHEKGALVPSALEGRLCCSEHDPMAPVSPEYWSKIKCKWESQDHGEEVKE

SEQ ID NO: 4935 - protein, 822 aa, Homo sapiens
MAAAVVVAEGDSDSRPGQELLVAWNTVSTGLVPPAALGLVSSRTSGAVPPKEEELRAAVEVLRGHGLHSVLEEWFVEVLQNDLQANISPEFWNAISQCENSADEPQCLLLLLDAFGLLESRLDPYLRSLELLEKWTRLGLLMGTGAQGLREEVHTMLRGVLFFSTPRTFQEMIQRLYGCFLRVYMQSKRKGEGGTDPELEGELDSRYARRRYYRLLQSPLCAGCSSDKQQCWCRQALEQFHQLSQVLHRLSLLERVSAEAVTTTLHQVTRERMEDRCRGEYERSFLREFHKWIERVVGWLGKVFLQDGPARPASPEAGNTLRRWRCHVQRFFYRIYASLRIEELFSIVRDFPDSRPAIEDLKYCLERTDQRQQLLVSLKAALETRLLHPGVNTCDIITLYISAIKALRVLDPSMVILEVACEPIRRYLRTREDTVRQIVAGLTGDSDGTGDLAVELSKTDPASLETGQDSEDDSGEPEDWVPDPVDADPGKSSSKRRSSDIISLLVSIYGSKDLFINEYRSLLADRLLHQFSFSPEREIRNVELLKLRFGEAPMHFCEVMLKDMADSRRINANIREEDEKRPAEEQPPFGVYAVILSSEFWPPFKDEKLEVPEDIRAALEAYCKKYEQLKAMRTLSWKHTLGLVTMDVELADRTLSVAVTPVQAVILLYFQDQASWTLEELSKAVKMPVALLRRRMSVWLQQGVLREEPPGTFSVIEEERPQDRDNMVLIDSDDESDSGMASQADQKEEELLLFWTYIQAMLTNLESLSLDRIYNMLRMFVVTGPALAEIDLQELQGYLQKKVRDQQLVYSAGVYRLPKNCS

SEQ ID NO: 4936 - protein, 832 aa, Homo sapiens
MFALGLPFLVLLVASVESHLGVLGPKNVSQKDAEFERTYVDEVNSELVNIYTFNHTVTRNRTEGVRVSVNVLNKQKGAPLLFVVRQKEAVVSFQVPLILRGMFQRKYLYQKVERTLCQPPTKNESEIQFFYVDVSTLSPVNTTYQLRVSRMDDFVLRTGEQFSFNTTAAQPQYFKYEFPEGVDSVIVKVTSNKAFPCSVISIQDVLCPVYDLDNNVAFIGMYQTMTKKAAITVQRKDFPSNSFYVVVVVKTEDQACGGSLPFYPFAEDEPVDQGHRQKTLSVLVSQAVTSEAYVSGMLFCLGIFLSFYLLTVLLACWENWRQKKKTLLVAIDRACPESGHPRVLADSFPGSSPYEGYNYGSFENVSGSTDGLVDSAGTGDLSYGYQGRSFEPVGTRPRVDSMSSVEEDDYDTLTDIDSDKNVIRTKQYLYVADLARKDKRVLRKKYQIYFWNIATIAVFYALPVVQLVITYQTVVNVTGNQDICYYNFLCAHPLGNLSAFNNILSNLGYILLGLLFLLIILQREINHNRALLRNDLCALECGIPKHFGLFYAMGTALMMEGLLSACYHVCPNYTNFQFDTSFMYMIAGLCMLKLYQKRHPDINASAYSAYACLAIVIFFSVLGVVFGKGNTAFWIVFSIIHIIATLLLSTQLYYMGRWKLDSGIFRRILHVLYTDCIRQCSGPLYVDRMVLLVMGNVINWSLAAYGLIMRPNDFASYLLAIGICNLLLYFAFYIIMKLRSGERIKLIPLLCIVCTSVVWGFALFFFFQGLSTWQKTPAESREHNRDCILLDFFDDHDIWHFLSSIAMFGSFLVLLTLDDDLDTVQRDKIYVF

SEQ ID NO: 4937 - protein, 574 aa, Homo sapiens
MKETIQGTGSWGPEPPGPGIPPAYSSPRRERLRWPPPPKPRLKSGGGFGPDPGSGTTVPARRLPVPRPSFDASASEEEEEEEEEEDEDEEEEVAAWRLPPRWSQLGTSQRPRPSRPTHRKTCSQRRRRAMRAFRMLLYSKSTSLTFHWKLWGRHRGRRRGLAHPKNHLSPQQGGATPQVPSPCCRFDSPRGPPPPRLGLLGALMAEDGVRGSPPVPSGPPMEEDGLRWTPKSPLDPDSGLLSCTLPNGFGGQSGPEGERSLAPPDASILISNVCSIGDHVAQELFQGSDLGMAEEAERPGEKAGQHSPLREEHVTCVQSILDEFLQTYGSLIPLSTDEVVEKLEDIFQQEFSTPSRKGLVLQLIQSYQRMPGNAMVRGFRVAYKRHVLTMDDLGTLYGQNWLNDQVMNMYGDLVMDTVPEKVHFFNSFFYDKLRTKGYDGVKRWTKNVDIFNKELLLIPIHLEVHWSLISVDVRRRTITYFDSQRTLNRRCPKHIAKYLQAEAVKKDRLDFHQGWKGYFKMNVARQNNDSDCGAFVLQYCKHLALSQPFSFTQQDMPKLRRQIYKELCHCKLTV

SEQ ID NO: 4938 - protein, 412 aa, Homo sapiens
MANVADTKLYDILGVPPGASENELKKAYRKLAKEYHPDKNPNAGDKFKEISFAYEVLSNPEKRELYDRYGEQGLREGSGGGGGMDDIFSHIFGGGLFGFMGNQSRSRNGRRRGEDMMHPLKVSLEDLYNGKTTKLQLSKNVLCSACSGQGGKSGAVQKCSACRGRGVRIMIRQLAPGMVQQMQSVCSDCNGEGEVINEKDRCKKCEGKKVIKEVKILEVHVDKGMKHGQRITFTGEADQAPGVEPGDIVLLLQEKEHEVFQRDGNDLHMTYKIGLVEALCGFQFTFKHLDGRQIVVKYPPGKVIEPGCVRVVRGEGMPQYRNPFEKGDLYIKFDVQFPENNWINPDKLSELEDLLPSRPEVPNIIGETEEVELQEFDSTRGSGGGQRREAYNDSSDEESSSHHGPGVQCAHQ

SEQ ID NO: 4939 - protein, 378 aa, Homo sapiens
MDLAGLLKSQFLCHLVFCYVFIASGLIINTIQLFTLLLWPINKQLFRKINCRLSYCISSQLVMLLEWWSGTECTIFTDPRAYLKYGKENAIVVLNHKFEIDFLCGWSLSERFGLLGGSKVLAKKELAYVPIIGWMWYFTEMVFCSRKWEQDRKTVATSLQHLRDYPEKYFFLIHCEGTRFTEKKHEISMQVARAKGLPRLKHHLLPRTKGFAITVRSLRNVVSAVYDCTLNFRNNENPTLLGVLNGKKYHADLYVRRIPLEDIPEDDDECSAWLHKLYQEKDAFQEEYYRTGTFPETPMVPPRRPWTLVNWLFWASLVLYPFFQFLVSMIRSGSSLTLASFILVFFVASVGVRWMIGVTEIDKGSAYGNSDSKQKLND

SEQ ID NO: 4940 - protein, 524 aa, Homo sapiens
MSDNGELEDKPPAPPVRMSSTIFSTGGKDPLSANHSLKPLPSVPEEKKPRHKIISIFSGTEKGSKKKEKERPEISPPSDFEHTIHVGFDAVTGEFTGMPEQWARLLQTSNITKLEQKKNPQAVLDVLKFYDSNTVKQKYLSFTPPEKDGFPSGTPALNAKGTEAPAVVTEEEDDDEETAPPVIAPRPDHTKSIYTRSVIDPVPAPVGDSHVDGAAKSLDKQKKKTKMTDEEIMEKLRTIVSIGDPKKKYTRYEKIGQGASGTVFTATDVALGQEVAIKQINLQKQPKKELIINEILVMKELKNPNIVNFLDSYLVGDELFVVMEYLAGGSLTDVVTETCMDEAQIAAVCRECLQALEFLHANQVIHRDIKSDNVLLGMEGSVKLTDFGFCAQITPEQSKRSTMVGTPYWMAPEVVTRKAYGPKVDIWSLGIMAIEMVEGEPPYLNENPLRALYLIATNGTPELQNPEKLSPIFRDFLNRCLEMDVEKRGSAKELLQHPFLKLAKPLSSLTPLIMAAKEAMKSNR

SEQ ID NO: 4941 - protein, 733 aa, Homo sapiens
MTFPEADILLKSGECAGQTMLDTMEAPGHSRQLLLQLNNQRTKGFLCDVIIVVQNALFRAHKNVLAASSAYLKSLVVHDNLLNLDHDMVSPAVFRLVLDFIYTGRLADGAEAAAAAAVAPGAEPSLGAVLAAASYLQIPDLVALCKKRLKRHGKYCHLRGGGGGGGGYAPYGRPGRGLRAATPVIQACYPSPVGPPPPPAAEPPSGPEAAVNTHCAELYASGPGPAAALCASERRCSPLCGLDLSKKSPPGSAAPERPLAERELPPRPDSPPSAGPAAYKEPPLALPSLPPLPFQKLEEAAPPSDPFRGGSGSPGPEPPGRPDGPSLLYRWMKHEPGLGSYGDELGRERGSPSERCEERGGDAAVSPGGPPLGLAPPPRYPGSLDGPGAGGDGDDYKSSSEETGSSEDPSPPGGHLEGYPCPHLAYGEPESFGDNLYVCIPCGKGFPSSEQLNAHVEAHVEEEEALYGRAEAAEVAAGAAGLGPPFGGGGDKVAGAPGGLGELLRPYRCASCDKSYKDPATLRQHEKTHWLTRPYPCTICGKKFTQRGTMTRHMRSHLGLKPFACDACGMRFTRQYRLTEHMRIHSGEKPYECQVCGGKFAQQRNLISHMKMHAVGGAAGAAGALAGLGGLPGVPGPDGKGKLDFPEGVFAVARLTAEQLSLKQQDKAAAAELLAQTTHFLHDPKVALESLYPLAKFTAELGLSPDKAAEVLSQGAHLAAGPDGRTIDRFSPT

SEQ ID NO: 4942 - protein, 575 aa, Homo sapiens
MSHAAEPARDGVEASAEGPRAVFVLLEERRPADSAQLLSLNSLLPESGIVADIELENVLDPDSFYELKSQPLPLRSSLPISLQATPATPATLSASSSAGGSRTPAMSSSSSSRVLLRQQLMRAQAQEQERRERREQAAAAPFPSPAPASPAISVVGVSAGGHTLSRPPPAQVPREVLKVQTHLENPTRYHLQQARRQQVKQYLSTTLGPKLASQALTPPPGPASAQPLPAPEAAHTTGPTGSAPNSPMALLTIGSSSEKEIDDVIDEIISLESSYNDEMLSYLPGGTTGLQLPSTLPVSGNLLDVYSSQGVATPAITVSNSCPAELPNIKREISETEAKALLKERQKKDNHNLIERRRRFNINDRIKELGTLIPKSSDPEMRWNKGTILKASVDYIRKLQKEQQRSKDLESRQRSLEQANRSLQLRIQELELQAQIHGLPVPPTPGLLSLATTSASDSLKPEQLDIEEEGRPGAATFHVGGGPAQNAPHQQPPAPPSDALLDLHFPSDHLGDLGDPFHLGLEDILMEEEEGVVGGLSGGALSPLRAASDPLLSSVSPAVSKASSRRSSFSMEEES

SEQ ID NO: 4943 - protein, 261 aa, Homo sapiens
MWVPVVFLTLSVTWIGAAPLILSRIVGGWECEKHSQPWQVLVASRGRAVCGGVLVHPQWVLTAAHCIRNKSVILLGRHSLFHPEDTGQVFQVSHSFPHPLYDMSLLKNRFLRPGDDSSHDLMLLRLSEPAELTDAVKVMDLPTQEPALGTTCYASGWGSIEPEEFLTPKKLQCVDLHVISNDVCAQVHPQKVTKFMLCAGRWTGGKSTCSGDSGGPLVCNGVLQGITSWGSEPCALPERPSLYTKVVHYRKWIKDTIVANP

SEQ ID NO: 4944 - protein, 672 aa, Homo sapiens
MESRKLISATDIQYSGSLLNSLNEQRGHGLFCDVTVIVEDRKFRAHKNILSASSTYFHQLFSVAGQVVELSFIRAEIFAEILNYIYSSKIVRVRSDLLDELIKSGQLLGVKFIAELGVPLSQVKSISGTAQDGNTEPLPPDSGDKNLVIQKSKDEAQDNGATIMPIITESFSLSAEDYEMKKIIVTDSDDDDDDVIFCSEILPTKETLPSNNTVAQVQSNPGPVAISDVAPSASNNSPPLTNITPTQKLPTPVNQATLSQTQGSEKLLVSSAPTHLTPNIILLNQTPLSTPPNVSSSLPNHMPSSINLLVQNQQTPNSAILTGNKANEEEEEEIIDDDDDTISSSPDSAVSNTSLVPQADTSQNTSFDGSLIQKMQIPTLLQEPLSNSLKISDIITRNTNDPGVGSKHLMEGQKIITLDTATEIEGLSTGCKVYANIGEDTYDIVIPVKDDPDEGEARLENEIPKTSGSEMANKRMKVKHDDHYELIVDGRVYYICIVCKRSYVCLTSLRRHFNIHSWEKKYPCRYCEKVFPLAEYRTKHEIHHTGERRYQCLACGKSFINYQFMSSHIKSVHSQDPSGDSKLYRLHPCRSLQIRQYAYLSDRSSTIPAMKDDGIGYKVDTGKEPPVGTTTSTQNKPMTWEDIFIQQENDSIFKQNVTDGSTEFEFIIPESY

SEQ ID NO: 4945 - protein, 178 aa, Homo sapiens
MSRLSRSLLWAATCLGVLCVLSADKNTTQHPNVTTLAPISNVTSAPVTSLPLVTTPAPETCEGRNSCVSCFNVSVVNTTCFWIECKDESYCSHNSTVSDCQVGNTTDFCSVSTATPVPTANSTGTTNNTVTPTSQPVRKSTFDAASFIGGIVLVLGVQAVIFFLYKFCKSKERNYHTL

SEQ ID NO: 4946 - protein, 830 aa, Homo sapiens
MVEEENIRVVRCGGSELNFRRAVFSADSKYIFCVSGDFVKVYSTVTEECVHILHGHRNLVTGIQLNPNNHLQLYSCSLDGTIKLWDYIDGILIKTFIVGCKLHALFTLAQAEDSVFVIVNKEKPDIFQLVSVKLPKSSSQEVEAKELSFVLDYINQSPKCIAFGNEGVYVAAVREFYLSVYFFKKKTTSRFTLSSSRNKKHAKNNFTCVACHPTEDCIASGHMDGKIRLWRNFYDDKKYTYTCLHWHHDMVMDLAFSVTGTSLLSGGRESVLVEWRDATEKNKEFLPRLGATIEHISVSPAGDLFCTSHSDNKIIIIHRNLEASAVIQGLVKDRSIFTGLMIDPRTKALVLNGKPGHLQFYSLQSDKQLYNLDIIQQEYINDYGLIQIELTKAAFGCFGNWLATVEQRQEKETELELQMKLWMYNKKTQGFILNTKINMPHEDCITALCFCNAEKSEQPTLVTASKDGYFKVWILTDDSDIYKKAVGWTCDFVGSYHKYQATNCCFSEDGSLLAVSFEEIVTIWDSVTWELKCTFCQRAGKIRHLCFGRLTCSKYLLGATENGILCCWNLLSCALEWNAKLNVRVMEPDPNSENIAAISQSSVGSDLFVFKPSEPRPLYIQKGISREKVQWGVFVPRDVPESFTSEAYQWLNRSQFYFLTKSQSLLTFSTKSPEEKLTPTSKQLLAEESLPTTPFYFILGKHRQQQDEKLNETLENELVQLPLTENIPAISELLHTPAHVLPSAAFLCSMFVNSLLLSKETKSAKEIPEDVDMEEEKESEDSDEENDFTEKVQDTSNTGLGEDIIHQLSKSEEKELRKFRKIDYSWIAAL

SEQ ID NO: 4947 - protein, 116 aa, Homo sapiens
MSATAATAPPAAPAGEGGPPAPPPNLTSNRRLQQTQAQVDEVVDIMRVNVDKVLERDQKLSELDDRADALQAGASQFETSAAKLKRKYWWKNLKMMIILGVICAIILIIIIVYFST

SEQ ID NO: 4948 - protein, 255 aa, Homo sapiens
MASPGAGRAPPELPERNCGYREVEYWDQRYQGAADSAPYDWFGDFSSFRALLEPELRPEDRILVLGCGNSALSYELFLGGFPNVTSVDYSSVVVAAMQARHAHVPQLRWETMDVRKLDFPSASFDVVLEKGTLDALLAGERDPWTVSSEGVHTVDQVLSEVSRVLVPGGRFISMTSAAPHFRTRHYAQAYYGWSLRHATYGSGFHFHLYLMHKGGKLSVAQLALGAQILSPPRPPTSPCFLQDSDHEDFLSAIQL

SEQ ID NO: 4949 - protein, 330 aa, Homo sapiens
MWLLVSVILISRISSVGGEATFCDFPKINHGILYDEEKYKPFSQVPTGEVFYYSCEYNFVSPSKSFWTRITCTEEGWSPTPKCLRLCFFPFVENGHSESSGQTHLEGDTVQIICNTGYRLQNNENNISCVERGWSTPPKCRSTDTSCVNPPTVQNAHILSRQMSKYPSGERVRYECRSPYEMFGDEEVMCLNGNWTEPPQCKDSTGKCGPPPPIDNGDITSFPLSVYAPASSVEYQCQNLYQLEGNKRITCRNGQWSEPPKCLHPCVISREIMENYNIALRWTAKQKLYLRTGESAEFVCKRGYRLSSRSHTLRTTCWDGKLEYPTCAKR

SEQ ID NO: 4950 - protein, 582 aa, Homo sapiens
METESGNQEKVMEEESTEKKKEVEKKKRSRVKQVLADIAKQVDFWFGDANLHKDRFLREQIEKSRDGYVDISLLVSFNKMKKLTTDGKLIARALRSSAVVELDLEGTRIRRKKPLGERPKDEDERTVYVELLPKNVNHSWIERVFGKCGNVVYISIPHYKSTGDPKGFAFVEFETKEQAAKAIEFLNNPPEEAPRKPGIFPKTVKNKPIPALRVVEEKKKKKKKKGRMKKEDNIQAKEENMDTSNTSISKMKRSRPTSEGSDIESTEPQKQCSKKKKKRDRVEASSLPEVRTGKRKRSSSEDAESLAPRSKVKKIIQKDIIKEASEASKENRDIEISTEEEKDTGDLKDSSLLKTKRKHKKKHKERHKMGEEVIPLRVLSKSEWMDLKKEYLALQKASMASLKKTISQIKSESEMETDSGVPQNTGMKNEKTANREECRTQEKVNATGPQFVSGVIVKIISTEPLPGRKQVRDTLAAISEVLYVDLLEGDTECHARFKTPEDAQAVINAYTEINKKHCWKLEILSGDHEQRYWQKILVDRQAKLNQPREKKRGTEKLITKAEKIRLAKTQQASKHIRFSEYD

SEQ ID NO: 4951 - protein, 200 aa, Homo sapiens
MAASQQQASAASSAAGVSGPSSAGGPGPQQQPQPPAQLVGPAQSGLLQQQQQDFDPVQRYKMLIPQLKESLQTLMKVAAQNLIQNTNIDNGQKSSDGPIQRFDKCLEEFYALCDQLELCLRLAHECLSQSCDSAKHSPTLVPTATKPDAVQPDSLPYPQYLAVIKAQISCAKDIHTALLDCANKVTGKTPAPPAGPGGTL

SEQ ID NO: 4952 - protein, 875 aa, Homo sapiens
MGKTANSPGSGARPDPVRSFNRWKKKHSHRQNKKKQLRKQLKKPEWQVERESISRLMQNYEKINVNEITRFSDFPLSKKTLKGLQEAQYRLVTEIQKQTIGLALQGKDVLGAAKTGSGKTLAFLVPVLEALYRLQWTSTDGLGVLIISPTRELAYQTFEVLRKVGKNHDFSAGLIIGGKDLKHEAERINNINILVCTPGRLLQHMDETVSFHATDLQMLVLDEADRILDMGFADTMNAVIENLPKKRQTLLFSATQTKSVKDLARLSLKNPEYVWVHEKAKYSTPATLEQNYIVCELQQKISVLYSFLRSHLKKKSIVFFSSCKEVQYLYRVFCRLRPGVSILALHGRQQQMRRMEVYNEFVRKRAAVLFATDIAARGLDFPAVNWVLQFDCPEDANTYIHRAGRTARYKEDGEALLILLPSEKAMVQQLLQKKVPVKEIKINPEKLIDVQKKLESILAQDQDLKERAQRCFVSYVRSVYLMKDKEVFDVSKLPIPEYALSLGLAVAPRVRFLQKMQKQPTKELVRSQADKVIEPRAPSLTNDEVEEFRAYFNEKMSILQKGGKRLEGTEHRQDNDTGNEEQEEEEDDEEEMEEKLAKAKGSQAPSLPNTSEAQKIKEVPTQFLDRDEEEEDADFLKVKRHNVFGLDLKDEKTLQKKEPSKSSIKKKMTKVAEAKKVMKRNFKVNKKITFTDEGELVQQWPQMQKSAIKDAEEDDDTGGINLHKAKERLQEEDKFDKEEYRKKIKAKHREKRLKEREARREANKRQAKAKDEEEAFLDWSDDDDDDDDGFDPSTLPDPDKYRSSEDSDSEDMENKISDTKKKQGMKKRSNSEVEDVGPTSHNRKKARWDTLEPLDTGLSLAEDEELVLHLLRSQS

SEQ ID NO: 4953 - protein, 1239 aa, Homo sapiens
MANDSPAKSLVDIDLSSLRDPAGIFELVEVVGNGTYGQVYKGRHVKTGQLAAIKVMDVTEDEEEEIKLEINMLKKYSHHRNIATYYGAFIKKSPPGHDDQLWLVMEFCGAGSITDLVKNTKGNTLKEDWIAYISREILRGLAHLHIHHVIHRDIKGQNVLLTENAEVKLVDFGVSAQLDRTVGRRNTFIGTPYWMAPEVIACDENPDATYDYRSDLWSCGITAIEMAEGAPPLCDMHPMRALFLIPRNPPPRLKSKKWSKKFFSFIEGCLVKNYMQRPSTEQLLKHPFIRDQPNERQVRIQLKDHIDRTRKKRGEKDETEYEYSGSEEEEEEVPEQEGEPSSIVNVPGESTLRRDFLRLQQENKERSEALRRQQLLQEQQLREQEEYKRQLLAERQKRIEQQKEQRRRLEEQQRREREARRQQEREQRRREQEEKRRLEELERRRKEEEERRRAEEEKRRVEREQEYIRRQLEEEQRHLEVLQQQLLQEQAMLLECRWREMEEHRQAERLQRQLQQEQAYLLSLQHDHRRPHPQHSQQPPPPQQERSKPSFHAPEPKAHYEPADRAREVEDRFRKTNHSSPEAQSKQTGRVLEPPVPSRSESFSNGNSESVHPALQRPAEPQVPVRTTSRSPVLSRRDSPLQGSGQQNSQAGQRNSTSIEPRLLWERVEKLVPRPGSGSSSGSSNSGSQPGSHPGSQSGSGERFRVRSSSKSEGSPSQRLENAVKKPEDKKEVFRPLKPADLTALAKELRAVEDVRPPHKVTDYSSSSEESGTTDEEDDDVEQEGADESTSGPEDTRAASSLNLSNGETESVKTMIVHDDVESEPAMTPSKEGTLIVRQTQSASSTLQKHKSSSSFTPFIDPRLLQISPSSGTTVTSVVGFSCDGMRPEAIRQDPTRKGSVVNVNPTNTRPQSDTPEIRKYKKRFNSEILCAALWGVNLLVGTESGLMLLDRSGQGKVYPLINRRRFQQMDVLEGLNVLVTISGKKDKLRVYYLSWLRNKILHNDPEVEKKQGWTTVGDLEGCVHYKVVKYERIKFLVIALKSSVEVYAWAPKPYHKFMAFKSFGELVHKPLLVDLTVEEGQRLKVIYGSCAGFHAVDVDSGSVYDIYLPTHIQCSIKPHAIIILPNTDGMELLVCYEDEGVYVNTYGRITKDVVLQWGEMPTSVAYIRSNQTMGWGEKAIEIRSVETGHLDGVFMHKRAQRLKFLCERNDKVFFASVRSGGSSQVYFMTLGRTSLLSW

SEQ ID NO: 4954 - protein, 371 aa, Homo sapiens
MSHEKSFLVSGDNYPPPNPGYPGGPQPPMPPYAQPPYPGAPYPQPPFQPSPYGQPGYPHGPSPYPQGGYPQGPYPQGGYPQGPYPQEGYPQGPYPQGGYPQGPYPQSPFPPNPYGQPQVFPGQDPDSPQHGNYQEEGPPSYYDNQDFPATNWDDKSIRQAFIRKVFLVLTLQLSVTLSTVSVFTFVAEVKGFVRENVWTYYVSYAVFFISLIVLSCCGDFRRKHPWNLVALSVLTASLSYMVGMIASFYNTEAVIMAVGITTAVCFTVVIFSMQTRYDFTSCMGVLLVSMVVLFIFAILCIFIRNRILEIVYASLGALLFTCFLAVDTQLLLGNKQLSLSPEEYVFAALNLYTDIINIFLYILTIIGRAKE

SEQ ID NO: 4955 - protein, 845 aa, Homo sapiens
MSNSRPRSRRDAGGGAGAAGRDELVSRSLQSAEHCLGVQDFGTAYAHYLLVLSLAPELKHDVKETFQYTLFRWAEELDALSRIQDLLGCYEQALELFPDDEVICNSMGEHLFRMGFRDEAAGYFHKAVKLNPDFSDAKENFYRVANWLVERWHFIMLNDTKRNTIYNAAIQKAVCLGSKSVLDIGAGTGILSMFAKKAGAHSVYACELSKTMYELACDVVAANKMEAGIKLLHTKSLDIEIPKHIPERVSLVVTETVDAGLFGEGIVESLIHAWEHLLLQPKTKGESANCEKYGKVIPASAVIFGMAVECAEIRRHHRVGIKDIAGIHLPTNVKFQSPAYSSVDTEETIEPYTTEKMSRVPGGYLALTECFEIMTVDFNNLQELKSLATKKPDKIGIPVIKEGILDAIMVWFVLQLDDEHSLSTSPSEETCWEQAVYPVQDLADYWIKPGDHVMMEVSCQDCYLRIQSISVLGLECEMDVAKSFTQNKDLLSLGNEAELCSALANLQTSKPDAVEQTCILESTEIALLNNIPYHEGFKMAMSKVLSSLTPEKLYQTMDTHCQNEMSSGTGQSNTVQNILEPFYVLDVSEGFSVLPVIAGTLGQVKPYSSVEKDQHRIALDLISEANHFPKETLEFWLRHVEDESAMLQRPKSDKLWSIIILDVIEPSGLIQQEIMEKAAISRCLLQSGGKIFPQYVLMFGLLVESQTLLEENAVQGTERTLGLNIAPFINQFQVPIRVFLDLSSLPCIPLSKPVELLRLDLMTPYLNTSNREVKVYVCKSGRLTAIPFWYHMYLDEEIRLDTSSEASHWKQAAVVLDNPIQVEMGEELVLSIQHHKSNVSITVKQ

SEQ ID NO: 4956 - protein, 174 aa, Homo sapiens
MQAGKPILYSYFRSSCSWRVRIALALKGIDYETVPINLIKDGGQQFSKDFQALNPMKQVPTLKIDGITIHQSNLSVLKQVGEEMQLTWAQNAITCGFNALEQILQSTAGIYCVGDEVTMADLCLVPQVANAERFKVDLTPYPTISSINKRLLVLEAFQVSHPCRQPDTPTELRA

SEQ ID NO: 4957 - protein, 1290 aa, Homo sapiens
MSGPLEGADGGGDPRPGESFCPGGVPSPGPPQHRPCPGPSLADDTDANSNGSSGNESNGHESRGASQRSSHSSSSGNGKDSALLETTESSKSTNSQSPSPPSSSIAYSLLSASSEQDNPSTSGCSSEQSARARTQKELMTALRELKLRLPPERRGKGRSGTLATLQYALACVKQVQANQEYYQQWSLEEGEPCSMDMSTYTLEELEHITSEYTLQNQDTFSVAVSFLTGRIVYISEQAAVLLRCKRDVFRGTRFSELLAPQDVGVFYGSTAPSRLPTWGTGASAGSGLRDFTQEKSVFCRIRGGPDRDPGPRYQPFRLTPYVTKIRVSDGAPAQPCCLLIAERIHSGYEAPRIPPDKRIFTTRHTPSCLFQDVDERAAPLLGYLPQDLLGAPVLLFLHPEDRPLMLAIHKKILQLAGQPFDHSPIRFCARNGEYVTMDTSWAGFVHPWSRKVAFVLGRHKVRTAPLNEDVFTPPAPSPAPSLDTDIQELSEQIHRLLLQPVHSPSPTGLCGVGAVTSPGPLHSPGSSSDSNGGDAEGPGPPAPVTFQQICKDVHLVKHQGQQLFIESRARPQSRPRLPATGTFKAKALPCQSPDPELEAGSAPVQAPLALVPEEAERKEASSCSYQQINCLDSILRYLESCNLPSTTKRKCASSSSYTTSSASDDDRQRTGPVSVGTKKDPPSAALSGEGATPRKEPVVGGTLSPLALANKAESVVSVTSQCSFSSTIVHVGDKKPPESDIIMMEDLPGLAPGPAPSPAPSPTVAPDPAPDAYRPVGLTKAVLSLHTQKEEQAFLSRFRDLGRLRGLDSSSTAPSALGERGCHHGPAPPSRRHHCRSKAKRSRHHQNPRAEAPCYVSHPSPVPPSTPWPTPPATTPFPAVVQPYPLPVFSPRGGPQPLPPAPTSVPPAAFPAPLVTPMVALVLPNYLFPTPSSYPYGALQTPAEGPPTPASHSPSPSLPALAPSPPHRPDSPLFNSRCSSPLQLNLLQLEELPRAEGAAVAGGPGSSAGPPPPSAEAAEPEARLAEVTESSNQDALSGSSDLLELLLQEDSRSGTGSAASGSLGSGLGSGSGSGSHEGGSTSASITRSSQSSHTSKYFGSIDSSEAEAGAARGGAEPGDQVIKYVLQDPIWLLMANADQRVMMTYQVPSRDMTSVLKQDRERLRAMQKQQPRFSEDQRRELGAVHSWVRKGQLPRALDVMACVDCGSSTQDPGHPDDPLFSELDGLGLEPMEEGGGEQGSSGGGSGEGEGCEEAQGGAKASSSQDLAMEEEEEGRSSSSPALPTAGNCTS

SEQ ID NO: 4958 - protein, 381 aa, Homo sapiens
MEPLVTWVVPLLFLFLLSRQGAACRTSECCFQDPPYPDADSGSASGPRDLRCYRISSDRYECSWQYEGPTAGVSHFLRCCLSSGRCCYFAAGSATRLQFSDQAGVSVLYTVTLWVESWARNQTEKSPEVTLQLYNSVKYEPPLGDIKVSKLAGQLRMEWETPDNQVGAEVQFRHRTPSSPWKLGDCGPQDDDTESCLCPLEMNVAQEFQLRRRQLGSQGSSWSKWSSPVCVPPENPPQPQVRFSVEQLGQDGRRRLTLKEQPTQLELPEGCQGLAPGTEVTYRLQLHMLSCPCKAKATRTLHLGKMPYLSGAAYNVAVISSNQFGPGLNQTWHIPADTHTDGMISAHCNLRLPDSRDSPASASRVAGITGICHHTRLILYF

SEQ ID NO: 4959 - protein, 372 aa, Homo sapiens
MEQRPRGCAAVAAALLLVLLGARAQGGTRSPRCDCAGDFHKKIGLFCCRGCPAASQVALENCSAVADTRCGCKPGWFVECQVSQCVSSSPFYCQPCLDCGALHRHTRLLCSRRDTDCGTCLPGFYEHGDGCVSCPTSTLGSCPERCAAVCGWRQMFWVQVLLAGLVVPLLLGATLTYTYRHCWPHKPLVTADEAGMEALTPPPATHLSPLDSAHTLLAPPDSSEKICTVQLVGNSWTPGYPETQEALCPQVTWSWDQLPSRALGPAAAPTLSPESPAGSPAMMLQPGPQLYDVMDAVPARRWKEFVRTLGLREAEIEAVEVEIGRFRDQQYEMLKRWRQQQPAGLGAVYAALERMGLDGCVEDLRSRLQRGP

SEQ ID NO: 4960 - protein, 985 aa, Homo sapiens
MAVWSLLSARAVTAFLLLFLPRFLQAQTFSFPFQQPEKCDNNQYFDISALSCVPCGANQRQDARGTSCVCLPGFQMISNNGGPAIICKKCPENMKGVTEDGWNCISCPSDLTAEGKCHCPIGHILVERDINGTLLSQATCELCDGNENSFMVVNALGDRCVRCEPTFVNTSRSCACSEPNILTGGLCFSSTGNFPLRRISAARYGEVGMSLTSEWFAKYLQSSAAACWVYANLTSCQALGNMCVMNMNSYDFATFDACGLFQFIFENTAGLSTVHSISFWRQNLPWLFYGDQLGLAPQVLSSTSLPTNFSFKGENQNTKLKFVAASYDIRGNFLKWQTLEGGVLQLCPDTETRLNAAYSFGTTYQQNCEIPISKILIDFPTPIFYDVYLEYTDENQHQYILAVPVLNLNLQHNKIFVNQDSNSGKWLLTRRIFLVDAVSGRENDLGTQPRVIRVATQISLSVHLVPNTINGNIYPPLITIAYSDIDIKDANSQSVKVSFSVTYEMDHGEAHVQTDIALGVLGGLAVLASLLKTAGWKRRIGSPMIDLQTVVKFLVYYAGDLANVFFIITVGTGLYWLIFFKAQKSVSVLLPMPIQEERFVTYVGCAFALKALQFLHKLISQITIDVFFIDWERPKGKVLKAVEGEGGVRSATVPVSIWRTYFVANEWNEIQTVRKINSLFQVLTVLFFLEVVGFKNLALMDSSSSLSRNPPSYIAPYSCILRYAVSAALWLAIGIIQVVFFAVFYERFIEDKIRQFVDLCSMSNISVFLLSHKCFGYYIHGRSVHGHADTNMEEMNMNLKREAENLCSQRGLVPNTDGQTFEIAISNQMRQHYDRIHETLIRKNGPARLLSSSASTFEQSIKAYHMMNKFLGSFIDHVHKEMDYFIKDKLLLERILGMEFMEPMEKSIFYNDEGYSFSSVLYYGNEATLLIFDLLFFCVVDLACQNFILASFLTYLQQEIFRYIRNTVGQKNLASKTLVDQRFLI

SEQ ID NO: 4961 - protein, 1311 aa, Homo sapiens
MSLLQSALDFLAGPGSLGGASGRDQSDFVGQTVELGELRLRVRRVLAEGGFAFVYEAQDVGSGREYALKRLLSNEEEKNRAIIQEVCFMKKLSGHPNIVQFCSAASIGKEESDTGQAEFLLLTELCKGQLVEFLKKMESRGPLSCDTVLKIFYQTCRAVQHMHRQKPPIIHRDLKVENLLLSNQGTIKLCDFGSATTISHYPDYSWSAQRRALVEEEITRNTTPMYRTPEIIDLYSNFPIGEKQDIWALGCILYLLCFRQHPFEDGAKLRIVNGKYSIPPHDTQYTVFHSLIRAMLQVNPEERLSIAEVVHQLQEIAAARNVNPKSPITELLEQNGGYGSATLSRGPPPPVGPAGSGYSGGLALAEYDQPYGGFLDILRGGTERLFTNLKDTSSKVIQSVANYAKGDLDISYITSRIAVMSFPAEGVESALKNNIEDVRLFLDSKHPGHYAVYNLSPRTYRPSRFHNRVSECGWAARRAPHLHTLYNICRNMHAWLRQDHKNVCVVHCMDGRAASAVAVCSFLCFCRLFSTAEAAVYMFSMKRCPPGIWPSHKRYIEYMCDMVAEEPITPHSKPILVRAVVMTPVPLFSKQRSGCRPFCEVYVGDERVASTSQEYDKMRDFKIEDGKAVIPLGVTVQGDVLIVIYHARSTLGGRLQAKMASMKMFQIQFHTGFVPRNATTVKFAKYDLDACDIQEKYPDLFQVNLEVEVEPRDRPSREAPPWENSSMRGLNPKILFSSREEQQDILSKFGKPELPRQPGSTAQYDAGAGSPEAEPTDSDSPPSSSADASRFLHTLDWQEEKEAETGAENASSKESESALMEDRDESEVSDEGGSPISSEGQEPRADPEPPGLAAGLVQQDLVFEVETPAVLPEPVPQEDGVDLLGLHSEVGAGPAVPPQACKAPSSNTDLLSCLLGPPEAASQGPPEDLLSEDPLLLASPAPPLSVQSTPRGGPPAAADPFGPLLPSSGNNSQPCSNPDLFGEFLNSDSVTVPPSFPSAHSAPPPSCSADFLHLGDLPGEPSKMTASSSNPDLLGGWAAWTETAASAVAPTPATEGPLFSPGGQPAPCGSQASWTKSQNPDPFADLGDLSSGLQGSPAGFPPGGFIPKTATTPKGSSSWQTSRPPAQGASWPPQAKPPPKACTQPRPNYASNFSVIGAREERGVRAPSFAQKPKVSENDFEDLLSNQGFSSRSDKKGPKTIAEMRKQDLAKDTDPLKLKLLDWIEGKERNIRALLSTLHTVLWDGESRWTPVGMADLVAPEQVKKHYRRAVLAVHPDKAAGQPYEQHAKMIFMELNDAWSEFENQGSRPLF

SEQ ID NO: 4962 - protein, 536 aa, Homo sapiens
MEFSSPSREECPKPLSRVSIMAGSLTGLLLLQAVSWASGARPCIPKSFGYSSVVCVCNATYCDSFDPPTFPALGTFSRYESTRSGRRMELSMGPIQANHTGTGLLLTLQPEQKFQKVKGFGGAMTDAAALNILALSPPAQNLLLKSYFSEEGIGYNIIRVPMASCDFSIRTYTYADTPDDFQLHNFSLPEEDTKLKIPLIHRALQLAQRPVSLLASPWTSPTWLKTNGAVNGKGSLKGQPGDIYHQTWARYFVKFLDAYAEHKLQFWAVTAENEPSAGLLSGYPFQCLGFTPEHQRDFIARDLGPTLANSTHHNVRLLMLDDQRLLLPHWAKVVLTDPEAAKYVHGIAVHWYLDFLAPAKATLGETHRLFPNTMLFASEACVGSKFWEQSVRLGSWDRGMQYSHSIITNLLYHVVGWTDWNLALNPEGGPNWVRNFVDSPIIVDITKDTFYKQPMFYHLGHFSKFIPEGSQRVGLVASQKNDLDAVALMHPDGSAVVVVLNRSSKDVPLTIKDPAVGFLETISPGYSIHTYLWRRQ

SEQ ID NO: 4963 - protein, 306 aa, Homo sapiens
MAGRHQNRSFPLPGVQSSGQVHAFGNCSDSDILEEDAEVYELRSRGKEKVRRSTSRDRLDDIIVLTKDIQEGDTLNAIALQYCCTVADIKRVNNLISDQDFFALRSIKIPVKKFSSLTETLCPPKGRQTSRHSSVQYSSEQQEILPANDSLAYSDSAGSFLKEVDRDIEQIVKCTDNKRENLNEVVSALTAQQMRFEPDNKNTQRKDPYYGADWGIGWWTAVVIMLIVGIITPVFYLLYYEILAKVDVSHHSTVDSSHLHSKITPPSQQREMENGIVPTKGIHFSQQDDHKLYSQDSQSPAAQQET

SEQ ID NO: 4964 - protein, 1416 aa, Homo sapiens
MKSLKSRLRRQDVPGPASSGAAAASAHAADWNKYDDRLMKAAERGDVEKVTSILAKKGVNPGKLDVEGRSVFHVVTSKGNLECLNAILIHGVDITTSDTAGRNALHLAAKYGHALCLQKLLQYNCPTEHADLQGRTALHDAAMADCPSSIQLLCDHGASVNAKDVDGRTPLVLATQMSRPTICQLLIDRGADVNSRDKQNRTALMLGCEYGCRDAVEVLIKNGADISLLDALGHDSSYYARIGDNLDILTLLKTASENTNKGRELWKKGPSLQQRNLTHMQDEVNVKSHQREHQNIQDLEIENEDLKERLRKIQQEQRILLDKVNGLQLQLNEEVMVADDLESEREKLKSLLAAKEKQHEESLRTIEALKNRFKYFESDHLGSGSHFSNRKEDMLLKQGQMYMADSQCTSPGIPAHMQSRSMLRPLELSLPSQTSYSENEILKKELEAMRTFCESAKQDRLKLQNELAHKVAECKALALECERVKEDSDEQIKQLEDALKDVQKRMYESEGKVKQMQTHFLALKEHLTSEAASGNHRLTEELKDQLKDLKVKYEGASAEVGKLRNQIKQNEMIVEEFKRDEGKLIEENKRLQKELSMCEMEREKKGRKVTEMEGQAKELSAKLALSIPAEKFENMKSSLSNEVNEKAKKLVEMEREHEKSLSEIRQLKRELENVKAKLAQHVKPEEHEQVKSRLEQKSGELGKKITELTLKNQTLQKEIEKVYLDNKLLKEQAHNLTIEMKNHYVPLKVSEDMKKSHDAIIDDLNRKLLDVTQKYTEKKLEMEKLLLENDSLSKDVSRLETVFVPPEKHEKEIIALKSNIVELKKQLSELKKKCGEDQEKIHALTSENTNLKKMMSNQYVPVKTHEEVKMTLNDTLAKTNRELLDVKKKFEDINQEFVKIKDKNEILKRNLENTQNQIKAEYISLAEHEAKMSSLSQSMRKVQDSNAEILANYRKGQEEIVTLHAEIKAQKKELDTIQECIKVKYAPIVSFEECERKFKATEKELKDQLSEQTQKYSVSEEEVKKNKQENDKLKKEIFTLQKDLRDKTVLIEKSHEMERALSRKTDELNKQLKDLSQKYTEVKNVKEKLVEENAKQTSEILAVQNLLQKQHVPLEQVEALKKSLNGTIENLKEELKSMQRCYEKEQQTVTKLHQLLENQKNSSVPLAEHLQIKEAFEKEVGIIKASLREKEEESQNKMEEVSKLQSEVQNTKQALKKLETREVVDLSKYKATKSDLETQISSLNEKLANLNRKYEEVCEEVLHAKKKEISAKDEKELLHFSIEQEIKDQKERCDKSLTTITELQRRIQESAKQIEAKDNKITELLNDVERLKQALNGLSQLTYTSGNPTKRQSQLIDTLQHQVKSLEQQLADADRQHQEVIAIYRTHLLSAAQGHMDEDVQEALLQIIQMRQGLVC

SEQ ID NO: 4965 - protein, 502 aa, Homo sapiens
MSCPVPACCALLLVLGLCRARPRNALLLLADDGGFESGAYNNSAIATPHLDALARRSLLFRNAFTSVSSCSPSRASLLTGLPQHQNGMYGLHQDVHHFNSFDKVRSLPLLLSQAGVRTGIIGKKHVGPETVYPFDFAYTEENGSVLQVGRNITRIKLLVRKFLQTQDDRPFFLYVAFHDPHRCGHSQPQYGTFCEKFGNGESGMGRIPDWTPQAYDPLDVLVPYFVPNTPAARADLAAQYTTVGRMDQGVGLVLQELRDAGVLNDTLVIFTSDNGIPFPSGRTNLYWPGTAEPLLVSSPEHPKRWGQVSEAYVSLLDLTPTILDWFSIPYPSYAIFGSKTIHLTGRSLLPALEAEPLWATVFGSQSHHEVTMSYPMRSVQHRHFRLVHNLNFKMPFPIDQDFYVSPTFQDLLNRTTAGQPTGWYKDLRHYYYRARWELYDRSRDPHETQNLATDPRFAQLLEMLRDQLAKWQWETHDPWVCAPDGVLEEKLSPQCQPLHNEL

SEQ ID NO: 4966 - protein, 131 aa, Homo sapiens
MAGIKALISLSFGGAIGLMFLMLGCALPIYNKYWPLFVLFFYILSPIPYCIARRLVDDTDAMSNACKELAIFLTTGIVVSAFGLPIVFARAHLIEWGACALVLTGNTVIFATILGFFLVFGSNDDFSWQQW

SEQ ID NO: 4967 - protein, 866 aa, Homo sapiens
MAGRVPSLLVLLVFPSSCLAFRSPLSVFKRFKETTRPFSNECLGTTRPVVPIDSSDFALDIRMPGVTPKQSDTYFCMSMRIPVDEEAFVIDFKPRASMDTVHHMLLFGCNMPSSTGSYWFCDEGTCTDKANILYAWARNAPPTRLPKGVGFRVGGETGSKYFVLQVHYGDISAFRDNNKDCSGVSLHLTRLPQPLIAGMYLMMSVDTVIPAGEKVVNSDISCHYKNYPMHVFAYRVHTHHLGKVVSGYRVRNGQWTLIGRQSPQLPQAFYPVGHPVDVSFGDLLAARCVFTGEGRTEATHIGGTSSDEMCNLYIMYYMEAKHAVSFMTCTQNVAPDMFRTIPPEANIPIPVKSDMVMMHEHHKETEYKDKIPLLQQPKREEEEVLDQDFHMEEALDWPGVYLLPGQVSGVALDPKNNLVIFHRGDHVWDGNSFDSKFVYQQIGLGPIEEDTILVIDPNNAAVLQSSGKNLFYLPHGLSIDKDGNYWVTDVALHQVFKLDPNNKEGPVLILGRSMQPGSDQNHFCQPTDVAVDPGTGAIYVSDGYCNSRIVQFSPSGKFITQWGEESSGSSPLPGQFTVPHSLALVPLLGQLCVADRENGRIQCFKTDTKEFVREIKHSSFGRNVFAISYIPGLLFAVNGKPHFGDQEPVQGFVMNFSNGEIIDIFKPVRKHFDMPHDIVASEDGTVYIGDAHTNTVWKFTLTEKLEHRSVKKAGIEVQEIKEAEAVVETKMENKPTSSELQKMQEKQKLIKEPGSGVPVVLITTLLVIPVVVLLAIAIFIRWKKSRAFGDSEHKLETSSGRVLGRFRGKGSGGLNLGNFFASRKGYSRKGFDRLSTEGSDQEKEDDGSESEEEYSAPLPALAPSSS

SEQ ID NO: 4968 - protein, 200 aa, Homo sapiens
MAQSKLDCRSPVGLDCCNCCLDLAHRSGLQRGSSGENNNPGSPTVSNFRQLQEKLVFENLNTDKLNSIMRQDSLEPVLRDPCYLINEGICNRNIDQTMLSILLFFHSASGASVVAIDNKIEQAMDLVKNHLMYAVREEVEILKEQIRELVEKNSQLERENTLLKTLASPEQLEKFQSCLSPEEPAPESPQVPEAPGGSAV

SEQ ID NO: 4969 - protein, 349 aa, Homo sapiens
MEPPGRRECPFPSWRFPGLLLAAMVLLLYSFSDACEEPPTFEAMELIGKPKPYYEIGERVDYKCKKGYFYIPPLATHTICDRNHTWLPVSDDACYRETCPYIRDPLNGQAVPANGTYEFGYQMHFICNEGYYLIGEEILYCELKGSVAIWSGKPPICEKVLCTPPPKIKNGKHTFSEVEVFEYLDAVTYSCDPAPGPDPFSLIGESTIYCGDNSVWSRAAPECKVVKCRFPVVENGKQISGFGKKFYYKATVMFECDKGFYLDGSDTIVCDSNSTWDPPVPKCLKGPRPTYKPPVSNYPGYPKPEEGILDSLDVWVIAVIVIAIGKQMVELNMPLTRLNQPLQQSREAE

SEQ ID NO: 4970 - protein, 837 aa, Homo sapiens
MASKRKSTTPCMVRTSQVVEQDVPEEVDRAKEKGIGTPQPDVAKDSWAAELENSSKENEVIEVKSMGESQSKKLQGGYECKYCPYSTQNLNEFTEHVDMQHPNVILNPLYVCAECNFTTKKYDSLSDHNSKFHPGEANFKLKLIKRNNQTVLEQSIETTNHVVSITTSGPGTGDSDSGISVSKTPIMKPGKPKADAKKVPKKPEEITPENHVEGTARLVTDTAEILSRLGGVELLQDTLGHVMPSVQLPPNINLVPKVPVPLNTTKYNSALDTNATMINSFNKFPYPTQAELSWLTAASKHPEEHIRIWFATQRLKHGISWSPEEVEEARKKMFNGTIQSVPPTITVLPAQLAPTKVTQPILQTALPCQILGQTSLVLTQVTSGSTTVSCSPITLAVAGVTNHGQKRPLVTPQAAPEPKRPHIAQVPEPPPKVANPPLTPASDRKKTKEQIAHLKASFLQSQFPDDAEVYRLIEVTGLARSEIKKWFSDHRYRCQRGIVHITSESLAKDQLAIAASRHGRTYHAYPDFAPQKFKEKTQGQVKILEDSFLKSSFPTQAELDRLRVETKLSRREIDSWFSERRKLRDSMEQAVLDSMGSGKKGQDVGAPNGALSRLDQLSGAQLTSSLPSPSPAIAKSQEQVHLLRSTFARTQWPTPQEYDQLAAKTGLVRTEIVRWFKENRCLLKTGTVKWMEQYQHQPMADDHGYDAVARKATKPMAESPKNGGDVVPQYYKDPKKLCEEDLEKLVTRVKVGSEPAKDCLPAKPSEATSDRSEGSSRDGQGSDENEESSVVDYVEVTVGEEDAISDRSDSWSQAAAEGVSELAESDSDCVPAEAGQA

SEQ ID NO: 4971 - protein, 274 aa, Homo sapiens
MATTVSTQRGPVYIGELPQDFLRITPTQQQRQVQLDAQAAQQLQYGGAVGTVGRLNITVVQAKLAKNYGMTRMDPYCRLRLGYAVYETPTAHNGAKNPRWNKVIHCTVPPGVDSFYLEIFDERAFSMDDRIAWTHITIPESLRQGKVEDKWYSLSGRQGDDKEGMINLVMSYALLPAAMVMPPQPVVLMPTVYQQGVGYVPITGMPAVCSPGMVPVALPPAAVNAQPRCSEEDLKAIQDMFPNMDQEVIRSVLEAQRGNKDAAINSLLQMGEEP

SEQ ID NO: 4972 - protein, 279 aa, Homo sapiens
MSALEWYAHKSLGDGIFWIQERFYESGNRANIWLVRGSEQDVVIDTGLGLRSLPEYLYSSGLLQDREAKEDAARRPLLAVATHVHFDHSGGLYQFDRVAVHHAEAEALARGDNFETVTWLSDSEVVRTPSPGWRARQFRVQAVQPTLILQDGDVINLGDRQLTVMHMPGHSRGSICLHDKDRKILFSGDVVYDGSLIDWLPYSRISDYVGTCERLIELVDRGLVEKVLPGHFNTFGAERLFRLASNYISKAGICHKVSTFAMRSLASLALRVTNSRTSP

SEQ ID NO: 4973 - protein, 255 aa, Homo sapiens
MWLLLTLSFLLASTAQDGDKLLEGDECAPHSQPWQVALYERGRFNCGASLISPHWVLSAAHCQSRFMRVRLGEHNLRKRDGPEQLRTTSRVIPHPRYEARSHRNDIMLLRLVQPARLNPQVRPAVLPTRCPHPGEACVVSGWGLVSHNEPGTAGSPRSQVSLPDTLHCANISIISDTSCDKSYPGRLTNTMVCAGAEGRGAESCEGDSGGPLVCGGILQGIVSWGDVPCDNTTKPGVYTKVCHYLEWIRETMKRN

SEQ ID NO: 4974 - protein, 985 aa, Homo sapiens
MSRIESLTRARIDRSRELASKTREKEKMKEAKDARYTNGHLFTTISVSGMTMCYACNKSITAKEALICPTCNVTIHNRCKDTLANCTKVKQKQQKAALLKNNTALQSVSLRSKTTIRERPSSAIYPSDSFRQSLLGSRRGRSSLSLAKSVSTTNIAGHFNDESPLGLRRILSQSTDSLNMRNRTLSVESLIDEEVIYSELMSDFEMDEKDFAADSWSLAVDSSFLQQHKKEVMKQQDVIYELIQTELHHVRTLKIMTRLFRTGMLEELHLEPGVVQGLFPCVDELSDIHTRFLSQLLERRRQALCPGSTRNFVIHRLGDLLISQFSGPSAEQMCKTYSEFCSRHSKALKLYKELYARDKRFQQFIRKVTRPAVLKRHGVQECILLVTQRITKYPLLISRILQHSHGIEEERQDLTTALGLVKELLSNVDEGIYQLEKGARLQEIYNRMDPRAQTPVPGKGPFGREELLRRKLIHDGCLLWKTATGRFKDVLVLLMTDVLVFLQEKDQKYIFPTLDKPSVVSLQNLIVRDIANQEKGMFLISAAPPEMYEVHTASRDDRSTWIRVIQQSVRTCPSREDFPLIETEDEAYLRRIKMELQQKDRALVELLREKVGLFAEMTHFQAEEDGGSGMALPTLPRGLFRSESLESPRGERLLQDAIREVEGLKDLLVGPGVELLLTPREPALPLEPDSGGNTSPGVTANGEARTFNGSIELCRADSDSSQRDRNGNQLRSPQEEALQRLVNLYGLLHGLQAAVAQQDTLMEARFPEGPERREKLCRANSRDGEAGRAGAAPVAPEKQATELALLQRQHALLQEELRRCRRLGEERATEAGSLEARLRESEQARALLEREAEEARRQLAALGQTEPLPAEAPWARRPVDPRRRSLPAGDALYLSFNPPQPSRGTDRLDLPVTTRSVHRNFEDRERQELGSPEERLQDSSDPDTGSEEEGSSRLSPPHSPRDFTRMQDIPEETESRDGEAVASES

SEQ ID NO: 4975 - protein, 687 aa, Homo sapiens
MTLLWCVVSLYFYGILQSDASERCDDWGLDTMRQIQVFEDEPARIKCPLFEHFLKFNYSTAHSAGLTLIWYWTRQDRDLEEPINFRLPENRISKEKDVLWFRPTLLNDTGNYTCMLRNTTYCSKVAFPLEVVQKDSCFNSPMKLPVHKLYIEYGIQRITCPNVDGYFPSSVKPTITWYMGCYKIQNFNNVIPEGMNLSFLIALISNNGNYTCVVTYPENGRTFHLTRTLTVKVVGSPKNAVPPVIHSPNDHVVYEKEPGEELLIPCTVYFSFLMDSRNEVWWTIDGKKPDDITIDVTINESISHSRTEDETRTQILSIKKVTSEDLKRSYVCHARSAKGEVAKAAKVKQKVPAPRYTVELACGFGATVLLVVILIVVYHVYWLEMVLFYRAHFGTDETILDGKEYDIYVSYARNAEEEEFVLLTLRGVLENEFGYKLCIFDRDSLPGGNTVEAVFDFIQRSRRMIVVLSPDYVTEKSISMLEFKLGVMCQNSIATKLIVVEYRPLEHPHPGILQLKESVSFVSWKGEKSKHSGSKFWKALRLALPLRSLSASSGWNESCSSQSDISLDHVQRRRSRLKEPPELQSSERAAGSPPAPGTMSKHRGKSSATCRCCVTYCEGENHLRNKSRAEIHNQPQWETHLCKPVPQESETQWIQNGTRLEPPAPQISALALHHFTDLSNNNDFYIL

SEQ ID NO: 4976 - protein, 147 aa, Homo sapiens
MASSLKIWGTLLALLCILCTLLVQSKEVSWREFMKQHYLSPSREFREYKCDVLMRENEALKDKSSHMFIYISWYKIEHICTSDNWMDRFRNAYVWVQNPLKVLKCHQENSKNSYTESRSFNYIEFHCSMDGYVDSIEDLKMVEPIGN

SEQ ID NO: 4977 - protein, 176 aa, Homo sapiens
MNGLPSAEAPGGAGCALAGLPPLPRGLSGLLNASGGSWRELERVYSQRSRIHDELSRAARAPDGPRHAAGAANAGPAAGPRRPVNLDSALAALRKEMLWGLYESIQDYKHLCQDLSFCQDLSSSLHSDSSYPPDAGLSDDEEPPDASLPPDPPPLTVPQTHNARDQWLQDAFHISL

SEQ ID NO: 4978 - protein, 622 aa, Homo sapiens
MAMMVFPREEKLSQDEIVLGTKAVIQGLETLRGEHRALLAPLVAPEAGEAEPGSQERCILLRRSLEAIELGLGEAQVILALSSHLGAVESEKQKLRAQVRRLVQENQWLREELAGTQQKLQRSEQAVAQLEEEKQHLLFMSQIRKLDEDASPNEEKGDVPKDTLDDLFPNEDEQSPAPSPGGGDVSGQHGGYEIPARLRTLHNLVIQYASQGRYEVAVPLCKQALEDLEKTSGHDHPDVATMLNILALVYRDQNKYKEAAHLLNDALAIREKTLGKDHPAVAATLNNLAVLYGKRGKYKEAEPLCKRALEIREKVLGKFHPDVAKQLSNLALLCQNQGKAEEVEYYYRRALEIYATRLGPDDPNVAKTKNNLASCYLKQGKYQDAETLYKEILTRAHEKEFGSVNGDNKPIWMHAEEREESKDKRRDSAPYGEYGSWYKACKVDSPTVNTTLRSLGALYRRQGKLEAAHTLEDCASRNRKQGLDPASQTKVVELLKDGSGRRGDRRSSRDMAGGAGPRSESDLEDVGPTAEWNGDGSGSLRRSGSFGKLRDALRRSSEMLVKKLQGGTPQEPPNPRMKRASSLNFLNKSVEEPTQPGGTGLSDSRTLSSSSMDLSRRSSLVG

SEQ ID NO: 4979 - protein, 324 aa, Homo sapiens
MGAFLDKPKMEKHNAQGQGNGLRYGLSSMQGWRVEMEDAHTAVIGLPSGLESWSFFAVYDGHAGSQVAKYCCEHLLDHITNNQDFKGSAGAPSVENVKNGIRTGFLEIDEHMRVMSEKKHGADRSGSTAVGVLISPQHTYFINCGDSRGLLCRNRKVHFFTQDHKPSNPLEKERIQNAGGSVMIQRVNGSLAVSRALGDFDYKCVHGKGPTEQLVSPEPEVHDIERSEEDDQFIILACDGIWDVMGNEELCDFVRSRLEVTDDLEKVCNEVVDTCLYKGSRDNMSVILICFPNAPKVSPEAVKKEAELDKYLECRVEGGSFNKK

SEQ ID NO: 4980 - protein, 322 aa, Homo sapiens
MTLEAIRYSRGSLQILDQLLLPKQSRYEAVGSVHQAWEAIRAMKVRGAPAIALVGCLSLAVELQAGAGGPGLAALVAFVRDKLSFLVTARPTAVNMARAARDLADVAAREAEREGATEEAVRERRETELCEHWEEHTRQRELPLRGPLGGTVLETRPYNQGARLTAFELVYEQIPATLITDSMVAAAMAHRGVSAVVVGADRVVANGDTANKVGTYQLAIVAKHHGIPFYVAAPSSSCDLRLETGKEIIIEERPGQELTDVNGVRIAAPGIGVWNPAFDVTPHDLITGGIITELGVFAPEELRTALTTTISSRDGTLDGPQM

SEQ ID NO: 4981 - protein, 496 aa, Homo sapiens
MWQIVFFTLSCDLVLAAAYNNFRKSMDSIGKKQYQVQHGSCSYTFLLPEMDNCRSSSSPYVSNAVQRDAPLEYDDSVQRLQVLENIMENNTQWLMKLENYIQDNMKKEMVEIQQNAVQNQTAVMIEIGTNLLNQTAEQTRKLTDVEAQVLNQTTRLELQLLEHSLSTNKLEKQILDQTSEINKLQDKNSFLEKKVLAMEDKHIIQLQSIKEEKDQLQVLVSKQNSIIEELEKKIVTATVNNSVLQKQQHDLMETVNNLLTMMSTSNSAKDPTVAKEEQISFRDCAEVFKSGHTTNGIYTLTFPNSTEEIKAYCDMEAGGGGWTIIQRREDGSVDFQRTWKEYKVGFGNPSGEYWLGNEFVSQLTNQQRYVLKIHLKDWEGNEAYSLYEHFYLSSEELNYRIHLKGLTGTAGKISSISQPGNDFSTKDGDNDKCICKCSQMLTGGWWFDACGPSNLNGMYYPQRQNTNKFNGIKWYYWKGSGYSLKATTMMIRPADF

SEQ ID NO: 4982 - protein, 716 aa, Homo sapiens
MARMSFVIAACQLVLGLLMTSLTESSIQNSECPQLCVCEIRPWFTPQSTYREATTVDCNDLRLTRIPSNLSSDTQVLLLQSNNIAKTVDELQQLFNLTELDFSQNNFTNIKEVGLANLTQLTTLHLEENQITEMTDYCLQDLSNLQELYINHNQISTISAHAFAGLKNLLRLHLNSNKLKVIDSRWFDSTPNLEILMIGENPVIGILDMNFKPLANLRSLVLAGMYLTDIPGNALVGLDSLESLSFYDNKLVKVPQLALQKVPNLKFLDLNKNPIHKIQEGDFKNMLRLKELGINNMGELVSVDRYALDNLPELTKLEATNNPKLSYIHRLAFRSVPALESLMLNNNALNAIYQKTVESLPNLREISIHSNPLRCDCVIHWINSNKTNIRFMEPLSMFCAMPPEYKGHQVKEVLIQDSSEQCLPMISHDSFPNRLNVDIGTTVFLDCRAMAEPEPEIYWVTPIGNKITVETLSDKYKLSSEGTLEISNIQIEDSGRYTCVAQNVQGADTRVATIKVNGTLLDGTQVLKIYVKQTESHSILVSWKVNSNVMTSNLKWSSATMKIDNPHITYTARVPVDVHEYNLTHLQPSTDYEVCLTVSNIHQQTQKSCVNVTTKNAAFAVDISDQETSTALAAVMGSMFAVISLASIAVYFAKRFKRKNYHHSLKKYMQKTSSIPLNELYPPLINLWEGDSEKDKDGSADTKPTQVDTSRSYYMW

SEQ ID NO: 4983 - protein, 350 aa, Homo sapiens
MQRLGATLLCLLLAAAVPTAPAPAPTATSAPVKPGPALSYPQEEATLNEMFREVEELMEDTQHKLRSAVEEMEAEEAAAKASSEVNLANLPPSYHNETNTDTKVGNNTIHVHREIHKITNNQTGQMVFSETVITSVGDEEGRRSHECIIDEDCGPSMYCQFASFQYTCQPCRGQRMLCTRDSECCGDQLCVWGHCTKMATRGSNGTICDNQRDCQPGLCCAFQRGLLFPVCTPLPVEGELCHDPASRLLDLITWELEPDGALDRCPCASGLLCQPHSHSLVYVCKPTFVGSRDQDGEILLPREVPDEYEVGSFMEEVRQELEDLERSLTEEMALREPAAAAAALLGGEEI

SEQ ID NO: 4984 - protein, 278 aa, Homo sapiens
MDKSGIDSLDHVTSDAVELANRSDNSSDSSLFKTQCIPYSPKGEKRNPIRKFVRTPESVHASDSSSDSSFEPIPLTIKAIFERFKNRKKRYKKKKKRRYQPTGRPRGRPEGRRNPIYSLIDKKKQFRSRGSGFPFLESENEKNAPWRKILTFEQAVARGFFNYIEKLKYEHHLKESLKQMNVGEDLENEDFDSRRYKFLDDDGSISPIEESTAEDEDATHLEDNECDIKLAGDSFIVSSEFPVRLSVYLEEEDITEEAALSKKRATKAKNTGQRGLKM

SEQ ID NO: 4985 - protein, 553 aa, Homo sapiens
MRAPGRPALRPLPLPPLLLLLLAAPWGRAVPCVSGGLPKPANITFLSINMKNVLQWTPPEGLQGVKVTYTVQYFIYGQKKWLNKSECRNINRTYCDLSAETSDYEHQYYAKVKAIWGTKCSKWAESGRFYPFLETQIGPPEVALTTDEKSISVVLTAPEKWKRNPEDLPVSMQQIYSNLKYNVSVLNTKSNRTWSQCVTNHTLVLTWLEPNTLYCVHVESFVPGPPRRAQPSEKQCARTLKDQSSEFKAKIIFWYVLPVSITVFLFSVMGYSIYRYIHVGKEKHPANLILIYGNEFDKRFFVPAEKIVINFITLNISDDSKISHQDMSLLGKSSDVSSLNDPQPSGNLRPPQEEEEVKHLGYASHLMEIFCDSEENTEGTSLTQQESLSRTIPPDKTVIEYEYDVRTTDICAGPEEQELSLQEEVSTQGTLLESQAALAVLGPQTLQYSYTPQLQDLDPLAQEHTDSEEGPEEEPSTTLVDWDPQTGRLCIPSLSSFDQDSEGCEPSEGDGLGEEGLLSRLYEEPAPDRPPGENETYLMQFMEEWGLYVQMEN

SEQ ID NO: 4986 - protein, 781 aa, Homo sapiens
LWLLLWAAAWRLGASACPALCTCTGTTVDCHGTGLQAIPKNIPRNTERLELNGNNITRIHKNDFAGLKQLRVLQLMENQIGAVERGAFDDMKELERLRLNRNQLHMLPELLFQNNQALSRLDLSENAIQAIPRKAFRGATDLKNLQLDKNQISCIEEGAFRALRGLEVLTLNNNNITTIPVSSFNHMPKLRTFRLHSNHLFCDCHLAWLSQWLRQRPTIGLFTQCSGPASLRGLNVAEVQKSEFSCSGQGEAGRVPTCTLSSGSCPAMCTCSNGIVDCRGKGLTAIPANLPETMTEIRLELNGIKSIPPGAFSPYRKLRRICPLSFCSPCRDLSNNQIAEIAPDAFQGLRSLNSLVLYGNKITDLPRGVFGGLYTLQLLLLNANKINCIRPDAFQDLQNLSLLSLYDNKIQSLAKGTFTSLRAIQTLHLAQNPFICDCNLKWLADFLRTNPIETSGARCASPRRLANKRIGQIKSKKFRCSAKEQYFIPGTEDYQLNSECNSDVVCPHKCRCEANVVECSSLKLTKIPERIPQSTAELRLNNNEISILEATGMFKKLTHLKKINLSNNKVSEIEDGAFEGAASVSELHLTANQLESIRSGMFRGLDGLRTLMLRNNRISCIHNDSFTGLRNVRLLSLYDNQITTVSPGAFDTLQSLSTLNLLANPFNCNCQLAWLGGWLRKRKIVTGNPRCQNPDFLRQIPLQDVAFPDFRCEEGQEEGGCLPRPQCPQECACLDTVVRCSNKHLRALPKGIPKNVTELYLDGNQFTLVPGQLSTFKYLQL

SEQ ID NO: 4987 - protein, 427 aa, Homo sapiens
METLCLRASFWLALVGCVISDNPERYSTNLSNHVDDFTTFRGTELSFLVTTHQPTNLVLPSNGSMHNYCPQQTKITSAFKYINTVISCTIFIVGMVGNATLLRIIYQNKCMRNGPNALIASLALGDLIYVVIDLPINVFKLLAGRWPFDHNDFGVFLCKLFPFLQKSSVGITVLNLCALSVDRYRAVASWSRVQGIGIPLVTAIEIVSIWILSFILAIPEAIGFVMVPFEYRGEQHKTCMLNATSKFMEFYQDVKDWWLFGFYFCMPLVCTAIFYTLMTCEMLNRRNGSLRIALSEHLKQRREVAKTVFCLVVIFALCWFPLHLSRILKKTVYNEMDKNRCELLSFLLLMDYIGINLATMNSCINPIALYFVSKKFKNCFQSCLCCCCYQSKSLMTSVPMNGTSIQWKNHDQNNHNTDRSSHKDSMN

SEQ ID NO: 4988 - protein, 626 aa, Homo sapiens
MLAFAARTVVKPLGFLKPFSLMKASSRFKAHQDALPRLPVPPLQQSLDHYLKALQPIVSEEEWAHTKQLVDEFQASGGVGERLQKGLERRARKTENWLSEWWLKTAYLQYRQPVVIYSSPGVMLPKQDFVDLQGQLRFAAKLIEGVLDFKVMIDNETLPVEYLGGKPLCMNQYYQILSSCRVPGPKQDTVSNFSKTKKPPTHITVVHNYQFFELDVYHSDGTPLTADQIFVQLEKIWNSSLQTNKEPVGILTSNHRNSWAKAYNTLIKDKVNRDSVRSIQKSIFTVCLDATMPRVSEDVYRSHVAGQMLHGGGSRLNSGNRWFDKTLQFIVAEDGSCGLVYEHAAAEGPPIVTLLDYVIEYTKKPELVRSPLVPLPMPKKLRFNITPEIKSDIEKAKQNLSIMIQDLDITVMVFHHFGKDFPKSEKLSPDAFIQMALQLAYYRIYGQACATYESASLRMFHLGRTDTIRSASMDSLTFVKAMDDSSVTEHQKVELLRKAVQAHRGYTDRAIRGEAFDRHLLGLKLQAIEDLVSMPDIFMDTSYAIAMHFHLSTSQVPAKTDCVMFFGPVVPDGYGVCYNPMEAHINFSLSAYNSCAETNAARLAHYLEKALLDMRALLQSHPRAKL

SEQ ID NO: 4989 - protein, 325 aa, Homo sapiens
MAAAVRCMGRALIHHQRHSLSKMVYQTSLCSCSVNIRVPNRHFAAATKSAKKTKKGAKEKTPDEKKDEIEKIKAYPYMEGEPEDDVYLKRLYPRQIYEVEKAVHLLKKFQILDFTSPKQSVYLDLTLDMALGKKKNVEPFTSVLSLPYPFASEINKVAVFTENASEVKIAEENGAAFAGGTSLIQKIWDDEIVADFYVAVPEIMPELNRLRKKLNKKYPKLSRNSIGRDIPKMLELFKNGHEIKVDEERENFLQTKIATLDMSSDQIAANLQAVINEVCRHRPLNLGPFVVRAFLRSSTSEGLLLKIDPLLPKEVKNEESEKEDA

SEQ ID NO: 4990 - protein, 307 aa, Homo sapiens
MLQTPESRGLPVPQAEGEKDGGHDGETRAPTASQERPKEELGAGREEGAAEPALTRKGARALAAKALARRRAYRRLNRTVAELVQFLLVKDKKKSPITRSEMVKYVIGDLKILFPDIIARAAEHLRYVFGFELKQFDRKHHTYILINKLKPLEEEEEEDLGGDGPRLGLLMMILGLIYMRGNSAREAQVWEMLRRLGVQPSKYHFLFGYPKRLIMEDFVQQRYLSYRRVPHTNPPEYEFSWGPRSNLEISKMEVLGFVAKLHKKEPQHWPVQYREALADEADRARAKARAEASMRARASARAGIHLW

SEQ ID NO: 4991 - protein, 148 aa, Homo sapiens
MAESLRSPRRSLYKLVGSPPWKEAFRQRCLERMRNSRDRLLNRYRQAGSSGPGNSQNSFLVQEVMEEEWNALQSVENCPEDLAQLEELIDMAVLEEIQQELINQEQSIISEYEKSLQFDEKCLSIMLAEWEANPLICPVCTKPVILGL

SEQ ID NO: 4992 - protein, 641 aa, Homo sapiens
MPPPLPLLLLTVLVVAAARPGCEFERNPAATCVDLQLRTCSDAAYNHTTFPNLLQHRSWEVVEASSEYILLSVLHQLLEGQCNPDLRLLGCAVLAPRCEGGWVRRPCRHICEGLREVCQPAFDAIDMAWPYFLDCHRYFTREDEGCYDPLEKLRGGLEADEALPSGLPPTFIRFSHHSYAQMVRVLRRTASRCAHVARTYSIGRSFDGRELLVIEFSSRPGQHELMEPEVKLIGNIHGNEVAGREMLIYLAQYLCSEYLLGNPRIQRLLNTTRIHLLPSMNPDGYEVAAAEGAGYNGWTSGRQNAQNLDLNRNFPDLTSEYYRLAETRGARSDHIPIPQHYWWGKVAPETKAIMKWMQTIPFVLSASLHGGDLVVSYPFDFSKHPQEEKMFSPTPDEKMFKLLSRAYADVHPMMMDRSENRCGGNFLKRGSIINGADWYSFTGGMSDFNYLHTNCFEITVELGCVKFPPEEALYILWQHNKESLLNFVETVHRGIKGVVTDKFGKPVKNARISVKGIRHDITTAPDGDYWRLLPPGIHIVIAQAPGYAKVIKKVIIPARMKRAGRVDFILQPLGMGPKNFIHGLRRTGPHDPLGGASSLGEATEPDPLRARRQPSADGSKPWWWSYFTSLSTHRPRWLLKY

SEQ ID NO: 4993 - protein, 185 aa, Homo sapiens
MWKLGRGRVLLDEPPEEEDGLRGGPPPAAAAAAQAQVQGASFRGWKEVTSLFNKDDEQHLLERCKSPKSKGTNLRLKEELKAEKKSGFWDNLVLKQNIQSKKPDEIEGWEPPKLALEDISADPEDTVGGHPSWSGWEDDAKGSTKYTSLASSANSSRWSLRAAGRLVSIRRQSKGHLTDSPEEAE

SEQ ID NO: 4994 - protein, 1072 aa, Homo sapiens
MPGEEEERAFLVAREELASALRRDSGQAFSLEQLRPLLASSLPLAARYLQLDAARLVRCNAHGEPRNYLNTLSTALNILEKYGRNLLSPQRPRYWRGVKFNNPVFRSTVDAVQGGRDVLRLYGYTEEQPDGLSFPEGQEEPDEHQVATVTLEVLLLRTELSLLLQNTHPRQQALEQLLEDKVEDDMLQLSEFDPLLREIAPGPLTTPSVPGSTPGPCFLCGSAPGTLHCPSCKQALCPACDHLFHGHPSRAHHLRQTLPGVLQGTHLSPSLPASAQPRPQSTSLLALGDSSLSSPNPASAHLPWHCAACAMLNEPWAVLCVACDRPRGCKGLGLGTEGPQGTGGLEPDLARGRWACQSCTFENEAAAVLCSICERPRLAQPPSLVVDSRDAGICLQPLQQGDALLASAQSQVWYCIHCTFCNSSPGWVCVMCNRTSSPIPAQHAPRPYASSLEKGPPKPGPPRRLSAPLPSSCGDPEKQRQDKMREEGLQLVSMIREGEAAGACPEEIFSALQYSGTEVPLQWLRSELPYVLEMVAELAGQQDPGLGAFSCQEARRAWLDRHGNLDEAVEECVRTRRRKVQELQSLGFGPEEGSLQALFQHGGDVSRALTELQRQRLEPFRQRLWDSGPEPTPSWDGPDKQSLVRRLLAVYALPSWGRAELALSLLQETPRNYELGDVVEAVRHSQDRAFLRRLLAQECAVCGWALPHNRMQALTSCECTICPDCFRQHFTIALKEKHITDMVCPACGRPDLTDDTQLLSYFSTLDIQLRESLEPDAYALFHKKLTEGVLMRDPKFLWCAQCSFGFIYEREQLEATCPQCHQTFCVRCKRQWEEQHRGRSCEDFQNWKRMNDPEYQAQGLAMYLQENGIDCPKCKFSYALARGGCMHFHCTQCRHQFCSGCYNAFYAKNKCPEPNCRVKKSLHGHHPRDCLFYLRDWTALRLQKLLQDNNVMFNTEPPAGARAVPGGGCRVIEQKEVPNGLRDEACGKETPAGYAGLCQAHYKEYLVSLINAHSLDPATLYEVEELETATERYLHVRPQPLAGEDPPAYQARLLQKLTEEVPLGQSIPRRRK

SEQ ID NO: 4995 - protein, 216 aa, Homo sapiens
MALCLKQVFAKDKTFRPRKRFEPGTQRFELYKKAQASLKSGLDLRSVVRLPPGENIDDWIAVHVVDFFNRINLIYGTMAERCSETSCPVMAGGPRYEYRWQDERQYRRPAKLSAPRYMALLMDWIEGLINDEEVFPTRVGVPFPKNFQQVCTKILTRLFRVFVHVYIHHFDSILSMGAEAHVNTCYKHFYYFIREFSLVDQRELEPLREMTERICH

SEQ ID NO: 4996 - protein, 544 aa, Homo sapiens
MWLKVGGLLRGTGGQLGQTVGWPCGALGPGPHRWGPCGGSWAQKFYQDGPGRGLGEEDIRRAREARPRKTPRPQLSDRSRERKVPASRISRLANFGGLAVGLGLGVLAEMAKKSMPGGRLQSEGGSGLDSSPFLSEANAERIVQTLCTVRGAALKVGQMLSIQDNSFISPQLQHIFERVRQSADFMPRWQMLRVLEEELGRDWQAKVASLEEVPFAAASIGQVHQGLLRDGTEVAVKIQYPGIAQSIQSDVQNLLAVLKMSAALPAGLFAEQSLQALQQELAWECDYRREAACAQNFRQLLANDPFFRVPAVVKELCTTRVLGMELAGGVPLDQCQGLSQDLRNQICFQLLTLCLRELFEFRFMQTDPNWANFLYDASSHQVTLLDFGASREFGTEFTDHYIEVVKAAADGDRDCVLQKSRDLKFLTGFETKAFSDAHVEAVMILGEPFATQGPYDFGSGETARRIQDLIPVLLRHRLCPPPEETYALHRKLAGAFLACAHLRAHIACRDLFQDTYHRYWASRQPDAATAGSLPTKGDSWVDPS

SEQ ID NO: 4997 - protein, 449 aa, Homo sapiens
MMKTLLLFVGLLLTWESGQVLGDQTVSDNELQEMSNQGSKYVNKEIQNAVNGVKQIKTLIEKTNEERKTLLSNLEEAKKKKEDALNETRESETKLKELPGVCNETMMALWEECKPCLKQTCMKFYARVCRSGSGLVGRQLEEFLNQSSPFYFWMNGDRIDSLLENDRQQTHMLDVMQDHFSRASSIIDELFQDRFFTREPQDTYHYLPFSLPHRRPHFFFPKSRIVRSLMPFSPYEPLNFHAMFQPFLEMIHEAQQAMDIHFHSPAFQHPPTEFIREGDDDRTVCREIRHNSTGCLRMKDQCDKCREILSVDCSTNNPSQAKLRRELDESLQVAERLTRKYNELLKSYQWKMLNTSSLLEQLNEQFNWVSRLANLTQGEDQYYLRVTTVASHTSDSDVPSGVTEVVVKLFDSDPITVTVPVEVSRKNPKFMETVAEKALQEYRKKHREE

SEQ ID NO: 4998 - protein, 575 aa, Homo sapiens
MDFPTISRSPSGPPAMDLEGPRDILVPSEDLTPDSQWDPMPGGPGSLSRMELDESSLQELVQQFEALPGDLVGPSPGGAPCPLHIATGHGLASQEIADAHGLLSAEAGRDDLLGLLHCEECPPSQTGPEEPLEPAPRLLQPPEDPDEDSDSPEWVEGASAEQEGSRSSSSSPEPWLETVPLVTPEEPPAGAQSPETLASYPAPQEVPGPCDHEDLLDGVIFGARYLGSTQLVSERNPPTSTRMAQAREAMDRVKAPDGETQPMTEVDLFVSTKRIKVLTADSQEAMMDHALHTISYTADIGCVLVLMARRRLARRPAPQDHGRRLYKMLCHVFYAEDAQLIAQAIGQAFAAAYSQFLRESGIDPSQVGVHPSPGACHLHNGDLDHFSNSDNCREVHLEKRRGEGLGVALVESGWGSLLPTAVIANLLHGGPAERSGALSIGDRLTAINGTSLVGLPLAACQAAVRETKSQTSVTLSIVHCPPVTTAIIHRPHAREQLGFCVEDGIICSLLRGGIAERGGIRVGHRIIEINGQSVVATPHARIIELLTEAYGEVHIKTMPAATYRLLTGQEQPVYL

SEQ ID NO: 4999 - protein, 779 aa, Homo sapiens
MAANGDSPPWSPALAAEGRGSSCEASVSFEDVTVDFSKEEWQHLDPAQRRLYWDVTLENYSHLLSVGYQIPKSEAAFKLEQGEGPWMLEGEAPHQSCSGEAIGKMQQQGIPGGIFFHCERFDQPIGEDSLCSILEELWQDNDQLEQRQENQNNLLSHVKVLIKERGYEHKNIEKIIHVTTKLVPSIKRLHNCDTILKHTLNSHNHNRNSATKNLGKIFGNGNNFPHSPSSTKNENAKTGANSCEHDHYEKHLSHKQAPTHHQKIHPEEKLYVCTECVMGFTQKSHLFEHQRIHAGEKSRECDKSNKVFPQKPQVDVHPSVYTGEKPYLCTQCGKVFTLKSNLITHQKIHTGQKPYKCSECGKAFFQRSDLFRHLRIHTGEKPYECSECGKGFSQNSDLSIHQKTHTGEKHYECNECGKAFTRKSALRMHQRIHTGEKPYVCADCGKAFIQKSHFNTHQRIHTGEKPYECSDCGKSFTKKSQLHVHQRIHTGEKPYICTECGKVFTHRTNLTTHQKTHTGEKPYMCAECGKAFTDQSNLIKHQKTHTGEKPYKCNGCGKAFIWKSRLKIHQKSHIGERHYECKDCGKAFIQKSTLSVHQRIHTGEKPYVCPECGKAFIQKSHFIAHHRIHTGEKPYECSDCGKCFTKKSQLRVHQKIHTGEKPNICAECGKAFTDRSNLITHQKIHTREKPYECGDCGKTFTWKSRLNIHQKSHTGERHYECSKCGKAFIQKATLSMHQIIHTGKKPYACTECQKAFTDRSNLIKHQKMHSGEKRYKASD

SEQ ID NO: 5000 - protein, 577 aa, Homo sapiens
MLTPAFDLSQDPDFLTIAIRVPYARVSEFDVYFEGSDFKFYAKPYFLRLTLPGRIVENGSEQGSYDADKGIFTIRLPKETPGQHFEGLNMLTALLAPRKSRTAKPLVEEIGASEIPEEVVDDEEFDWEIEQTPCEEVSESALNPQCHYGFGNLRSGVLQRLQDELSDVIDIKDPDFTPAAERRQKRLAAELAKFDPDHYLADFFEDEAIEQILKYNPWWTDKYSKMMAFLEKSQEQENHATLVSFSEEEKYQLRKFVNKSYLLDKRACRQVCYSLIDILLAYCYETRVTEGEKNVESAWNIRKLSPTLCWFETWTNVHDIMVSFGRRVLCYPLYRHFKLVMKAYRDTIKILQLGKSAVLKCLLDIHKIFQENDPAYILNDLYISDYCVWIQKVKSKKLAALAEALKEVSLTKAQLGLELEELEAAALLVQEEETALKAAHSVSGQQTLCSSSEASDSEDSDSSVSSGNEDSGSDSEQDELKDSPSETVSSLQGPFLEESSAFLIVDGGVRRNTAIQESDASQGKPLASSWPLGVSGPLIEELGEQLKTTVQVSEPKGTTAVNRSNIQERDGCQTPNN

SEQ ID NO: 5001 - protein, 290 aa, Homo sapiens
MSVRRGRRPARPGTRLSWLLCCSALLSPAAGYVIVSSVSWAVTNEVDEELDSASTEEAMPALLEDSGSIWQQSFPASAHKEDAHLRPRAGAARARPPPAPPGMFSYRREGGQTASAPPGPRLRAATARSLAHASVWGCLATVSTHKKIQGLPFGNCLPVSDGPFNNSTGIPFFYMTAKDPVVADLMKNPMASLMLPESEGEFCRKNIVDPEDPRCVQLTLTGQMIAVSPEEVEFAKQAMFSRHPGMRKWPRQYEWFFMKMRIEHIWLQKWYGGASSISREEYFKAVPRKA

SEQ ID NO: 5002 - protein, 190 aa, Homo sapiens
MSTRKRRGGAINSRQAQKRTREATSTPEISLEAEPIELVETAGDEIVDLTCESLEPVVVDLTHNDSVVIVDERRRPRRNARRLPQDHADSCVVSSDDEELSRDRDVYVTTHTPRNARDEGATGLRPSGTVSCPICMDGYSEIVQNGRLIVSTECGHVFCSQCLRDSLKNANTCPTCRKKINHKRYHPIYI

SEQ ID NO: 5003 - protein, 1163 aa, Homo sapiens
MMSFVQKGSWLLLALLHPTIILAQQEAVEGGCSHLGQSYADRDVWKPEPCQICVCDSGSVLCDDIICDDQELDCPNPEIPFGECCAVCPQPPTAPTRPPNGQGPQGPKGDPGPPGIPGRNGDPGIPGQPGSPGSPGPPGICESCPTGPQNYSPQYDSYDVKSGVAVGGLAGYPGPAGPPGPPGPPGTSGHPGSPGSPGYQGPPGEPGQAGPSGPPGPPGAIGPSGPAGKDGESGRPGRPGERGLPGPPGIKGPAGIPGFPGMKGHRGFDGRNGEKGETGAPGLKGENGLPGENGAPGPMGPRGAPGERGRPGLPGAAGARGNDGARGSDGQPGPPGPPGTAGFPGSPGAKGEVGPAGSPGSNGAPGQRGEPGPQGHAGAQGPPGPPGINGSPGGKGEMGPAGIPGAPGLMGARGPPGPAGANGAPGLRGGAGEPGKNGAKGEPGPRGERGEAGIPGVPGAKGEDGKDGSPGEPGANGLPGAAGERGAPGFRGPAGPNGIPGEKGPAGERGAPGPAGPRGAAGEPGRDGVPGGPGMRGMPGSPGGPGSDGKPGPPGSQGESGRPGPPGPSGPRGQPGVMGFPGPKGNDGAPGKNGERGGPGGPGPQGPPGKNGETGPQGPPGPTGPGGDKGDTGPPGPQGLQGLPGTGGPPGENGKPGEPGPKGDAGAPGAPGGKGDAGAPGERGPPGLAGAPGLRGGAGPPGPEGGKGAAGPPGPPGAAGTPGLQGMPGERGGLGSPGPKGDKGEPGGPGADGVPGKDGPRGPTGPIGPPGPAGQPGDKGEGGAPGLPGIAGPRGSPGERGETGPPGPAGFPGAPGQNGEPGGKGERGAPGEKGEGGPPGVAGPPGKDGTSGHPGPIGPPGPRGNRGERGSEGSPGHPGQPGPPGPPGAPGPCCGGVGAAAIAGIGGEKAGGFAPYYGDEPMDFKINTDEIMTSLKSVNGQIESLISPDGSRKNPARNCRDLKFCHPELKSGEYWVDPNQGCKLDAIKVFCNMETGETCISANPLNVPRKHWWTDSSAEKKHVWFGESMDGGFQFSYGNPELPEDVLDVHLAFLRLLSSRASQNITYHCKNSIAYMDQASGNVKKALKLMGSNEGEFKAEGNSKFTYTVLEDGCTKHTGEWSKTVFEYRTRKAVRLPIVDIAPYDIGGPDQEFGVDVGPVCFL

SEQ ID NO: 5004 - protein, 678 aa, Homo sapiens
MAWTARDRGALGLLLLGLCLCAAQRGPPGEQGPPGPPGPPGVPGIDGIDGDRGPKGPPGPPGPAGEPGKPGAPGKPGTPGADGLTGPDGSPGSIGSKGQKGEPGVPGSRGFPGRGIPGPPGPPGTAGLPGELGRVGPVGDPGRRGPPGPPGPPGPRGTIGFHDGDPLCPNACPPGRSGYPGLPGMRGHKGAKGEIGEPGRQGHKGEEGDQGELGEVGAQGPPGAQGLRGITGIVGDKGEKGARGLDGEPGPQGLPGAPGDQGQRGPPGEAGPKGDRGAEGARGIPGLPGPKGDTGLPGVDGRDGIPGMPGTKGEPGKPGPPGDAGLQGLPGVPGIPGAKGVAGEKGSTGAPGKPGQMGNSGKPGQQGPPGEVGPRGPQGLPGSRGELGPVGSPGLPGKLGSLGSPGLPGLPGPPGLPGMKGDRGVVGEPGPKGEQGASGEEGEAGERGELGDIGLPGPKGSAGNPGEPGLRGPEGSRGLPGVEGPRGPPGPRGVQGEQGATGLPGVQGPPGRAPTDQHIKQVCMRVIQEHFAEMAASLKRPDSGATGLPGRPGPPGPPGPPGENGFPGQMGIRGLPGIKGPPGALGLRGPKGDLGEKGERGPPGRGPNGLPGAIGLPGDPGPASYGRNGRDGERGPPGVAGIPGVPGPPGPPGLPGFCEPASCTMQAGQRAFNKGPDP

SEQ ID NO: 5005 - protein, 209 aa, Homo sapiens
MALLAEHLLKPLPADKQIETGPFLEAVSHLPPFFDCLGSPVFTPIKADISGNITKIKAVYDTNPAKFRTLQNILEVEKEMYGAEWPKVGATLALMWLKRGLRFIQVFLQSICDGERDENHPNLIRVNATKAYEMALKKYHGWIVQKIFQAALYAAPYKSDFLKALSKGQNVTEEECLEKIRLFLVNYTATIDVIYEMYTQMNAELNYKV

SEQ ID NO: 5006 - protein, 958 aa, Homo sapiens
MKEAKDARYTNGHLFTTISVSGMTMCYACNKSITAKEALICPTCNVTIHNRCKDTLANCTKVKQKQQKAALLKNNTALQSVSLRSKTTIRERPSSAIYPSDSFRQSLLGSRRGRSSLSLAKSVSTTNIAGHFNDESPLGLRRILSQSTDSLNMRNRTLSVESLIDEEVIYSELMSDFEMDEKDFAADSWSLAVDSSFLQQHKKEVMKQQDVIYELIQTELHHVRTLKIMTRLFRTGMLEELHLEPGVVQGLFPCVDELSDIHTRFLSQLLERRRQALCPGSTRNFVIHRLGDLLISQFSGPSAEQMCKTYSEFCSRHSKALKLYKELYARDKRFQQFIRKVTRPAVLKRHGVQECILLVTQRITKYPLLISRILQHSHGIEEERQDLTTALGLVKELLSNVDEGIYQLEKGARLQEIYNRMDPRAQTPVPGKGPFGREELLRRKLIHDGCLLWKTATGRFKDVLVLLMTDVLVFLQEKDQKYIFPTLDKPSVVSLQNLIVRDIANQEKGMFLISAAPPEMYEVHTASRDDRSTWIRVIQQSVRTCPSREDFPLIETEDEAYLRRIKMELQQKDRALVELLREKVGLFAEMTHFQAEEDGGSGMALPTLPRGLFRSESLESPRGERLLQDAIREVEGLKDLLVGPGVELLLTPREPALPLEPDSGGNTSPGVTANGEARTFNGSIELCRADSDSSQRDRNGNQLRSPQEEALQRLVNLYGLLHGLQAAVAQQDTLMEARFPEGPERREKLCRANSRDGEAGRAGAAPVAPEKQATELALLQRQHALLQEELRRCRRLGEERATEAGSLEARLRESEQARALLEREAEEARRQLAALGQTEPLPAEAPWARRPVDPRRRSLPAGDALYLSFNPPQPSRGTDRLDLPVTTRSVHRNFEDRERQELGSPEERLQDSSDPDTGSEEEGSSRLSPPHSPRDFTRMQDIPEETESRDGEAVASES

SEQ ID NO: 5007 - protein, 521 aa, Homo sapiens
MLPRRPLAWPAWLLRGAPGAAGSWGRPVGPLARRGCCSAPGTPEVPLTRERYPVRRLPFSTVSKQDLAAFERIVPGGVVTDPEALQAPNVDWLRTLRGCSKVLLRPRTSEEVSHILRHCHERNLAVNPQGGNTGMVGGSVPVFDEIILSTARMNRVLSFHSVSGILVCQAGCVLEELSRYVEERDFIMPLDLGAKGSCHIGGNVATNAGGLRFLRYGSLHGTVLGLEVVLADGTVLDCLTSLRKDNTGYDLKQLFIGSEGTLGIITTVSILCPPKPRAVNVAFLGCPGFAEVLQTFSTCKGMLGEILSAFEFMDAVCMQLVGRHLHLASPVQESPFYVLIETSGSNAGHDAEKLGHFLEHALGSGLVTDGTMATDQRKVKMLWALRERITEALSRDGYVYKYDLSLPVERLYDIVTDLRARLGPHAKHVVGYGHLGDGNLHLNVTAEAFSPSLLAALEPHVYEWTAGQQGSVSAEHGVGFRKRDVLGYSKPPGALQLMQQLKALLDPKGILNPYKTLPSQA

SEQ ID NO: 5008 - protein, 87 aa, Homo sapiens
MAVSVLRLTVVLGLLVLFLTCYADDKPDKPDDKPDDSGKDPKPDFPKFLSLLGTEIIENAVEFILRSMSRSTGFMEFDDNEGKHSSK

SEQ ID NO: 5009 - protein, 683 aa, Homo sapiens
MALSKRELDELKPWIEKTVKRVLGFSEPTVVTAALNCVGKGMDKKKAADHLKPFLDDSTLRFVDKLFEAVEEGRSSRHSKSSSDRSRKRELKEVFGDDSEISKESSGVKKRRIPRFEEVEEEPEVIPGPPSESPGMLTKLQIKQMMEAATRQIEERKKQLSFISPPTPQPKTPSSSQPERLPIGNTIQPSQAATFMNDAIEKARKAAELQARIQAQLALKPGLIGNANMVGLANLHAMGIAPPKVELKDQTKPTPLILDEQGRTVDATGKEIELTHRMPTLKANIRAVKREQFKQQLKEKPSEDMESNTFFDPRVSIAPSQRQRRTFKFHDKGKFEKIAQRLRTKAQLEKLQAEISQAARKTGIHTSTRLALIAPKKELKEGDIPEIEWWDSYIIPNGFDLTEENPKREDYFGITNLVEHPAQLNPPVDNDTPVTLGVYLTKKEQKKLRRQTRREAQKELQEKVRLGLMPPPEPKVRISNLMRVLGTEAVQDPTKVEAHVRAQMAKRQKAHEEANAARKLTAEQRKVKKIKKLKEDISQGVHISVYRVRNLSNPAKKFKIEANAGQLYLTGVVVLHKDVNVVVVEGGPKAQKKFKRLMLHRIKWDEQTSNTKGDDDEESDEEAVKKTNKCVLVWEGTAKDRSFGEMKFKQCPTENMAREHFKKHGAEHYWDLALSESVLESTD

SEQ ID NO: 5010 - protein, 507 aa, Homo sapiens
MRRLPRALLLQLRLALLVAAGAPEVLVSAPRSLVWGPGLQAAVVLPVRYFYLQAVNSEGQNLTRSPAGETPFKVVVKSLSPKELVRIHVPKPLDRNDGTFLMRYRMYETVDEGLKIEVLYGDEHVAQSPYILKGPVYHEYCECPEDPQAWQKTLSCPTKEPQIAKDFASFPSINLQQMLKEVPKRFGDERGAIVHYTILNNHVYRRSLGKYTDFKMFSDEILLSLTRKVLLPDLEFYVNLGDWPLEHRKVNGTPSPIPIISWCGSLDSRDVVLPTYDITHSMLEAMRGVTNDLLSIQGNTGPSWINKTERAFFRGRDSREERLQLVQLSKENPQLLDAGITGYFFFQEKEKELGKAKLMGFFDFFKYKYQVNVDGTVAAYRYPYLMLGDSLVLKQDSPYYEHFYMALEPWKHYVPIKRNLSDLLEKVKWAKENDEEAKKIAKEGQLMARDLLQPHRLYCYYYQVLQKYAERQSSKPEVRDGMELVPQPEDSTAICQCHRKKPSREEL

SEQ ID NO: 5011 - protein, 508 aa, Homo sapiens
MASAVWGSAPWWGPPPPAPARPLTDIDFCSGAQLQELTQLIQELGVQESWSDGPKPGADLLRAKDFVFSLLGLVHRRDPRFPPQAELLLLRGGIREGSLDLGHAPLGPYARGPHYDAGFTLLVPMFSLDGTELQLDLESCYAQVCLPEMVCGTPIREMWQDCLGPPVPGARDSIHRTESEESSKDWQSSVDQPHSYVTEHEAPVSLEKSPSDVSASESPQHDVVDLGSTAPLKTMSSDVTKAAVESPVPKPSEAREAWPTLCSAQVAAWFFATLAAVAESLIPVPGAPRLVHAARHAGFTTVLLATPEPPRRLLLFDLIPVVSVAGWPEGARSHSWAGPLASESASFYLVPGGGTERPCASAWQLCFARQELALKARIPAPLLQAHAAAQALLRPLVAGTRAAAPYLLRTLLYWACERLPALYLARPENAGACCLGLLDELGRVLEAGTLPHYFLNGRQLRTGDDSAALLGELARLRGDPARALRAAVEEAKVARKGGGLAGVGGGAH

SEQ ID NO: 5012 - protein, 395 aa, Homo sapiens
MFPRVSTFLPLRPLSRHPLSSGSPETSAAAIMLLTVRHGTVRYRSSALLARTKNNIQRYFGTNSVICSKKDKQSVRTEETSKETSESQDSEKENTKKDLLGIIKGMKVELSTVNVRTTKPPKRRPLKSLEATLGRLRRATEYAPKKRIEPLSPELVAAASAVADSLPFDKQTTKSELLSQLQQHEEESRAQRDAKRPKISFSNIISDMKVARSATARVRSRPELRIQFDEGYDNYPGQEKTDDLKKRKNIFTGKRLNIFDMMAVTKEAPETDTSPSLWDVEFAKQLATVNEQPLQNGFEELIQWTKEGKLWEFPINNEAGFDDDGSEFHEHIFLEKHLESFPKQGPIRHFMELVTCGLSKNPYLSVKQKVEHIEWFRNYFNEKKDILKESNIQFN

SEQ ID NO: 5013 - protein, 781 aa, Homo sapiens
MEPAPARSPRPQQDPARPQEPTMPPPETPSEGRQPSPSPSPTERAPASEEEFQFLRCQQCQAEAKCPKLLPCLHTLCSGCLEASGMQCPICQAPWPLGADTPALDNVFFESLQRRLSVYRQIVDAQAVCTRCKESADFWCFECEQLLCAKCFEAHQWFLKHEARPLAELRNQSVREFLDGTRKTNNIFCSNPNHRTPTLTSIYCRGCSKPLCCSCALLDSSHSELKCDISAEIQQRQEELDAMTQALQEQDSAFGAVHAQMHAAVGQLGRARAETEELIRERVRQVVAHVRAQERELLEAVDARYQRDYEEMASRLGRLDAVLQRIRTGSALVQRMKCYASDQEVLDMHGFLRQALCRLRQEEPQSLQAAVRTDGFDEFKVRLQDLSSCITQGKDAAVSKKASPEAASTPRDPIDVDLDVSNTTTAQKRKCSQTQCPRKVIKMESEEGKEARLARSSPEQPRPSTSKAVSPPHLDGPPSPRSPVIGSEVFLPNSNHVASGAGEAEERVVVISSSEDSDAENSCMEPMETAEPQSSPAHSSPAHSSPAHSSPVQSLLRAQGASSLPCGTYHPPAWPPHQPAEQAATPDAEPHSEPPDHQERPAVHRGIRYLLYRAQRAIRLRHALRLHPQLHRAPIRTWSPHVVQASTPAITGPLNHPANAQEHPAQLQRGISPPHRIRGAVRSRSRSLRGSSHLSQWLNNFFALPFSSMASQLDMSSVVGAGESRAQTLGAGVPPGDSVRGSMEASQVQVPLEASPITFPPPCAPERPPISPVPGARQAGL

SEQ ID NO: 5014 - protein, 3046 aa, Homo sapiens
MRGRRGRPPKQPAAPAAERCAPAPPPPPPPPTSGPIGGLRSRHRGSSRGRWAAAQAEVAPKTRLSSPRGGSSSRRKPPPPPPAPPSTSAPGRGGRGGGGGRTGGGGGGGHLARTTAARRAVNKVVYDDHESEEEEEEEDMVSEEEEEEDGDAEETQDSEDDEEDEMEEDDDDSDYPEEMEDDDDDASYCTESSFRSHSTYSSTPGRRKPRVHRPRSPILEEKDIPPLEFPKSSEDLMVPNEHIMNVIAIYEVLRNFGTVLRLSPFRFEDFCAALVSQEQCTLMAEMHVVLLKAVLREEDTSNTTFGPADLKDSVNSTLYFIDGMTWPEVLRVYCESDKEYHHVLPYQEAEDYPYGPVENKIKVLQFLVDQFLTTNIAREELMSEGVIQYDDHCRVCHKLGDLLCCETCSAVYHLECVKPPLEEVPEDEWQCEVCVAHKVPGVTDCVAEIQKNKPYIRHEPIGYDRSRRKYWFLNRRLIIEEDTENENEKKIWYYSTKVQLAELIDCLDKDYWEAELCKILEEMREEIHRHMDITEDLTNKARGSNKSFLAAANEEILESIRAKKGDIDNVKSPEETEKDKNETENDSKDAEKNREEFEDQSLEKDSDDKTPDDDPEQGKSEEPTEVGDKGNSVSANLGDNTTNATSEETSPSEGRSPVGCLSETPDSSNMAEKKVASELPQDVPEEPNKTCESSNTSATTTSIQPNLENSNSSSELNSSQSESAKAADDPENGERESHTPVSIQEEIVGDFKSEKSNGELSESPGAGKGASGSTRIITRLRNPDSKLSQLKSQQVAAAAHEANKLFKEGKEVLVVNSQGEISRLSTKKEVIMKGNINNYFKLGQEGKYRVYHNQYSTNSFALNKHQHREDHDKRRHLAHKFCLTPAGEFKWNGSVHGSKVLTISTLRLTITQLENNIPSSFLHPNWASHRANWIKAVQMCSKPREFALALAILECAVKPVVMLPIWRESLGHTRLHRMTSIEREEKEKVKKKEKKQEEEETMQQATWVKYTFPVKHQVWKQKGEEYRVTGYGGWSWISKTHVYRFVPKLPGNTNVNYRKSLEGTKNNMDENMDESDKRKCSRSPKKIKIEPDSEKDEVKGSDAAKGADQNEMDISKITEKKDQDVKELLDSDSDKPCKEEPMEVDDDMKTESHVNCQESSQVDVVNVSEGFHLRTSYKKKTKSSKLDGLLERRIKQFTLEEKQRLEKIKLEGGIKGIGKTSTNSSKNLSESPVITKAKEGCQSDSMRQEQSPNANNDQPEDLIQGCSESDSSVLRMSDPSHTTNKLYPKDRVLDDVSIRSPETKCPKQNSIENDIEEKVSDLASRGQEPSKSKTKGNDFFIDDSKLASADDIGTLICKNKKPLIQEESDTIVSSSKSALHSSVPKSTNDRDATPLSRAMDFEGKLGCDSESNSTLENSSDTVSIQDSSEEDMIVQNSNESISEQFRTREQDVEVLEPLKCELVSGESTGNCEDRLPVKGTEANGKKPSQQKKLEERPVNKCSDQIKLKNTTDKKNNENRESEKKGQRTSTFQINGKDNKPKIYLKGECLKEISESRVVSGNVEPKVNNINKIIPENDIKSLTVKESAIRPFINGDVIMEDFNERNSSETKSHLLSSSDAEGNYRDSLETLPSTKESDSTQTTTPSASCPESNSVNQVEDMEIETSEVKKVTSSPITSEEESNLSNDFIDENGLPINKNENVNGESKRKTVITEVTTMTSTVATESKTVIKVEKGDKQTVVSSTENCAKSTVTTTTTTVTKLSTPSTGGSVDIISVKEQSKTVVTTTVTDSLTTTGGTLVTSMTVSKEYSTRDKVKLMKFSRPKKTRSGTALPSYRKFVTKSSKKSIFVLPNDDLKKLARKGGIREVPYFNYNAKPALDIWPYPSPRPTFGITWRYRLQTVKSLAGVSLMLRLLWASLRWDDMAAKAPPGGGTTRTETSETEITTTEIIKRRDVGPYGIRSEYCIRKIICPIGVPETPKETPTPQRKGLRSSALRPKRPETPKQTGPVIIETWVAEEELELWEIRAFAERVEKEKAQAVEQQAKKRLEQQKPTVIATSTTSPTSSTTSTISPAQKVMVAPISGSVTTGTKMVLTTKVGSPATVTFQQNKNFHQTFATWVKQGQSNSGVVQVQQKVLGIIPSSTGTSQQTFTSFQPRTATVTIRPNTSGSGGTTSNSQVITGPQIRPGMTVIRTPLQQSTLGKAIIRTPVMVQPGAPQQVMTQIIRGQPVSTAVSAPNTVSSTPGQKSLTSATSTSNIQSSASQPPRPQQGQVKLTMAQLTQLTQGHGGNQGLTVVIQGQGQTTGQLQLIPQGVTVLPGPGQQLMQAAMPNGTVQRFLFTPLATTATTASTTTTTVSTTAAGTGEQRQSKLSPQMQVHQDKTLPPAQSSSVGPAEAQPQTAQPSAQPQPQTQPQSPAQPEVQTQPEVQTQTTVSSHVPSEAQPTHAQSSKPQVAAQSQPQSNVQGQSPVRVQSPSQTRIRPSTPSQLSPGQQSQVQTTTSQPIPIQPHTSLQIPSQGQPQSQPQVQSSTQTLSSGQTLNQVTVSSPSRPQLQIQQPQPQVIAVPQLQQQVQVLSQIQSQVVAQIQAQQSGVPQQIKLQLPIQIQQSSAVQTHQIQNVVTVQAASVQEQLQRVQQLRDQQQKKKQQQIEIKREHTLQASNQSEIIQKQVVMKHNAVIEHLKQKKSMTPAEREENQRMIVCNQVMKYILDKIDKEEKQAAKKRKREESVEQKRSKQNATKLSALLFKHKEQLRAEILKKRALLDKDLQIEVQEELKRDLKIKKEKDLMQLAQATAVAAPCPPVTPAPPAPPAPPPSPPPPPAVQHTGLLSTPTLPAASQKRKREEEKDSSSKSKKKKMISTTSKETKKDTKLYCICKTPYDESKFYIGCDRCQNWYHGRCVGILQSEAELIDEYVCPQCQSTEDAMTVLTPLTEKDYEGLKRVLRSLQAHKMAWPFLEPVDPNDAPDYYGVIKEPMDLATMEERVQRRYYEKLTEFVADMTKIFDNCRYYNPSDSPFYQCAEVLESFFVQKLKGFKASRSHNNKLQSTAS

SEQ ID NO: 5015 - protein, 245 aa, Homo sapiens
MAGLELLSDQGYRVDGRRAGELRKIQARMGVFAQADGSAYIEQGNTKALAVVYGPHEIRGSRARALPDRALVNCQYSSATFSTGERKRRPHGDRKSCEMGLQLRQTFEAAILTQLHPRSQIDIYVQVLQADGGTYAACVNAATLAVLDAGIPMRDFVCACSAGFVDGTALADLSHVEEAAGGPQLALALLPASGQIALLEMDARLHEDHLERVLEAAAQAARDVHTLLDRVVRQHVREASILLGD

SEQ ID NO: 5016 - protein, 82 aa, Homo sapiens
MATFPPATSAPQQPPGPEDEDSSLDESDLYSLAHSYLGGGGRKGRTKREAAANTNRPSPGGHERKLVTKLQNSERKKRGARR

SEQ ID NO: 5017 - protein, 648 aa, Homo sapiens
MEKARRGGDGVPRGPVLHIVVVGFHHKKGCQVEFSYPPLIPGDGHDSHTLPEEWKYLPFLALPDGAHNYQEDTVFFHLPPRNGNGATVFGISCYRQIEAKALKVRQADITRETVQKSVCVLSKLPLYGLLQAKLQLITHAYFEEKDFSQISILKELYEHMNSSLGGASLEGSQVYLGLSPRDLVLHFRHKVLILFKLILLEKKVLFYISPVNKLVGALMTVLSLFPGMIEHGLSDCSQYRPRKSMSEDGGLQESNPCADDFVSASTADVSHTNLGTIRKVMAGNHGEDAAMKTEEPLFQVEDSSKGQEPNDTNQYLKPPSRPSPDSSESDWETLDPSVLEDPNLKEREQLGSDQTNLFPKDSVPSESLPITVQPQANTGQVVLIPGLISGLEEDQYGMPLAIFTKGYLCLPYMALQQHHLLSDVTVRGFVAGATNILFRQQKHLSDAIVEVEEALIQIHDPELRKLLNPTTADLRFADYLVRHVTENRDDVFLDGTGWEGGDEWIRAQFAVYIHALLAATLQLDNEKILSDYGTTFVTAWKNTHNYRVWNSNKHPALAEINPNHPFQGQYSVSDMKLRFSHSVQNSERGKKIGNVMVTTSRNVVQTGKAVGQSVGGAFSSAKTAMSSWLSTFTTSTSQSLTEPPDEKP

SEQ ID NO: 5018 - protein, 885 aa, Homo sapiens
MSHPDYRMNLRPLGTPRGVSAVAGPHDIGASPGDKKSKNRSTRGKKKSIFETYMSKEDVSEGLKRGTLIQGVLRINPKKFHEAFIPSPDGDRDIFIDGVVARNRALNGDLVVVKLLPEEHWKVVKPESNDKETEAAYESDIPEELCGHHLPQQSLKSYNDSPDVIVEAQFDGSDSEDGHGITQNVLVDGVKKLSVCVSEKGREDGDAPVTKDETTCISQDTRALSEKSLQRSAKVVYILEKKHSRAATGFLKLLADKNSELFRKYALFSPSDHRVPRIYVPLKDCPQDFVARPKDYANTLFICRIVDWKEDCNFALGQLAKSLGQAGEIEPETEGILTEYGVDFSDFSSEVLECLPQGLPWTIPPEEFSKRRDLRKDCIFTIDPSTARDLDDALSCKPLADGNFKVGVHIADVSYFVPEGSDLDKVAAERATSVYLVQKVVPMLPRLLCEELCSLNPMSDKLTFSVIWTLTPEGKILDEWFGRTIIRSCTKLSYEHAQSMIESPTEKIPAKELPPISPEHSSEEVHQAVLNLHGIAKQLRQQRFVDGALRLDQLKLAFTLDHETGLPQGCHIYEYRESNKLVEEFMLLANMAVAHKIHRAFPEQALLRRHPPPQTRMLSDLVEFCDQMGLPVDFSSAGALNKSLTQTFGDDKYSLARKEVLTNMCSRPMQMALYFCSGLLQDPAQFRHYALNVPLYTHFTSPIRRFADVLVHRLLAAALGYRERLDMAPDTLQKQADHCNDRRMASKRVQELSTSLFFAVLVKESGPLESEAMVMGILKQAFDVLVLRYGVQKRIYCNALALRSHHFQKVGKKPELTLVWEPEDMEQEPAQQVITIFSLVEVVLQAESTALKYSAILKRPGTQGHLGPEKEEEESDGEPEDSSTS

SEQ ID NO: 5019 - protein, 505 aa, Homo sapiens
MGSGPLSLPLALSPPRLLLLLLLSLLPVARASEAEHRLFERLFEDYNEIIRPVANVSDPVIIHFEVSMSQLVKVDEVNQIMETNLWLKQIWNDYKLKWNPSDYGGAEFMRVPAQKIWKPDIVLYNNAVGDFQVDDKTKALLKYTGEVTWIPPAIFKSSCKIDVTYFPFDYQNCTMKFGSWSYDKAKIDLVLIGSSMNLKDYWESGEWAIIKAPGYKHDIKYNCCEEIYPDITYSLYIRRLPLFYTINLIIPCLLISFLTVLVFYLPSDCGEKVTLCISVLLSLTVFLLVITETIPSTSLVIPLIGEYLLFTMIFVTLSIVITVFVLNVHYRTPTTHTMPSWVKTVFLNLLPRVMFMTRPTSNEGNAQKPRPLYGAELSNLNCFSRAESKGCKEGYPCQDGMCGYCHHRRIKISNFSANLTRSSSSESVDAVLSLSALSPEIKEAIQSVKYIAENMKAQNEAKEIQDDWKYVAMVIDRIFLWVFTLVCILGTAGLFLQPLMAREDA

SEQ ID NO: 5020 - protein, 308 aa, Homo sapiens
MQPSGHRLRDVEHHPLLAENDNYDSSSSSSSEADVADRVWFIRDGCGMICAVMTWLLVAYADFVVTFVMLLPSKDFWYSVVNGVIFNCLAVLALSSHLRTMLTDPGAVPKGNATKEYMESLQLKPGEVIYKCPKCCCIKPERAHHCSICKRCIRKMDHHCPWVNNCVGEKNQRFFVLFTMYIALSSVHALILCGFQFISCVRGQWTECSDFSPPITVILLIFLCLEGLLFFTFTAVMFGTQIHSICNDETEIERLKSEKPTWERRLRWEGMKSVFGGPPSLLWMNPFVGFRFRRLPTRPRKGGPEFSV

SEQ ID NO: 5021 - protein, 643 aa, Homo sapiens
MAGLTAAAPRPGVLLLLLSILHPSRPGGVPGAIPGGVPGGVFYPGAGLGALGGGALGPGGKPLKPGLGAFPAVTFPGALVPGGVADAAAAYKAAKAGAGLGGVPGVGGLGVSAGAVVPQPGAGVKPGKVPGVGLPGVYPGGVLPGARFPGVGVLPGVPTGAGVKPKAPGVGPFGGPQPGVPLGYPIKAPKLPGYGPGGVAGAAGKAGYPTGTGVGPQAAAAAAAKAAAKFGAGAAGVLPGVGGAGVPGVPGAIPGIGGIAGVGTPAAAAAAAAAAKAAKYGAAAGLVPGGPGFGPGVVGVPGAGVPGVGVPGAGIPVVPGAGIPGAAVPGVVSPEAAAKAAAKAAKYGARPGVGVGGIPTYGVGAGGFPGFGVGVGAEAQAAAAAKAAKYGLVPGVGVAPGVGVAPGVGVAPGVGLAPGVGVAPGVGVAPGVGVAPGIGPGGVAAAAKSAAKVAAKAQLRAAAGLGAGIPGLGVGVGVPGLGVGAGVPGLGVGAGVPGFGAVPGALAAAKAAKYGAAVPGVLGGLGALGGVGIPGGVVGAGPAAAAAAAKAAAKAAQFGLVGAAGLGGLGVGGLGVPGVGGLGGIPPAAAAKAAKYGAAGLGGVLGGAGQFPLGGVAARPGFGLSPIFPGGACLGKACGRKRK

SEQ ID NO: 5022 - protein, 2569 aa, Homo sapiens
MRKHRHLPLVAVFCLFLSGFPTTHAQQQQAVIEVNKRDIVFLVDGSSALGLANFNAIRDFIAKVIQRLEIGQDLIQVAVAQYADTVRPEFYFNTHPTKREVITAVRKMKPLDGSALYTGSALDFVRNNLFTSSAGYRAAEGIPKLLVLITGGKSLDEISQPAQELKRSSIMAFAIGNKGADQAELEEIAFDSSLVFIPAEFRAAPLQGMLPGLLAPLRTLSGTPEESKRDILFLFDGSANLVGQFPVVRDFLYKIIDELNVKPEGTRIAVAQYSDDVKVESRFDEHQSKPEILNLVKRMKIKTGKALNLGYALDYAQRYIFVKSAGSRIEDGVLQFLVLLVAGRSSDRVDGPASNLKQSGVVPFIFQAKNADPAELEQIVLSPAFILAAESLPKIGDLHPQIVNLLKSVHNGAPAPVSGEKDVVFLLDGSEGVRSGFPLLKEFVQRVVESLDVGQDRVRVAVVQYSDRTRPEFYLNSYMNKQDVVNAVRQLTLLGGPTPNTGAALEFVLRNILVSSAGSRITEGVPQLLIVLTADRSGDDVRNPSVVVKRGGAVPIGIGIGNADITEMQTISFIPDFAVAIPTFRQLGTVQQVISERVTQLTREELSRLQPVLQPLPSPGVGGKRDVVFLIDGSQSAGPEFQYVRTLIERLVDYLDVGFDTTRVAVIQFSDDPKVEFLLNAHSSKDEVQNAVQRLRPKGGRQINVGNALEYVSRNIFKRPLGSRIEEGVPQFLVLISSGKSDDEVDDPAVELKQFGVAPFTIARNADQEELVKISLSPEYVFSVSTFRELPSLEQKLLTPITTLTSEQIQKLLASTRYPPPAVESDAADIVFLIDSSEGVRPDGFAHIRDFVSRIVRRLNIGPSKVRVGVVQFSNDVFPEFYLKTYRSQAPVLDAIRRLRLRGGSPLNTGKALEFVARNLFVKSAGSRIEDGVPQHLVLVLGGKSQDDVSRFAQVIRSSGIVSLGVGDRNIDRTELQTITNDPRLVFTVREFRELPNIEERIMNSFGPSAATPAPPGVDTPPPSRPEKKKADIVFLLDGSINFRRDSFQEVLRFVSEIVDTVYEDGDSIQVGLVQYNSDPTDEFFLKDFSTKRQIIDAINKVVYKGGRHANTKVGLEHLRVNHFVPEAGSRLDQRVPQIAFVITGGKSVEDAQDVSLALTQRGVKVFAVGVRNIDSEEVGKIASNSATAFRVGNVQELSELSEQVLETLHDAMHETLCPGVTDAAKACNLDVILGFDGSRDQNVFVAQKGFESKVDAILNRISQMHRVSCSGGRSPTVRVSVVANTPSGPVEAFDFDEYQPEMLEKFRNMRSQHPYVLTEDTLKVYLNKFRQSSPDSVKVVIHFTDGADGDLADLHRASENLRQEGVRALILVGLERVVNLERLMHLEFGRGFMYDRPLRLNLLDLDYELAEQLDNIAEKACCGVPCKCSGQRGDRGPIGSIGPKGIPGEDGYRGYPGDEGGPGERGPPGVNGTQGFQGCPGQRGVKGSRGFPGEKGEVGEIGLDGLDGEDGDKGLPGSSGEKGNPGRRGDKGPRGEKGERGDVGIRGDPGNPGQDSQERGPKGETGDLGPMGVPGRDGVPGGPGETGKNGGFGRRGPPGAKGNKGGPGQPGFEGEQGTRGAQGPAGPAGPPGLIGEQGISGPRGSGGAAGAPGERGRTGPLGRKGEPGEPGPKGGIGNRGPRGETGDDGRDGVGSEGRRGKKGERGFPGYPGPKGNPGEPGLNGTTGPKGIRGRRGNSGPPGIVGQKGDPGYPGPAGPKGNRGDSIDQCALIQSIKDKCPFHGPLECPVFPTELAFALDTSEGVNQDTFGRMRDVVLSIVNDLTIAESNCPRGARVAVVTYNNEVTTEIRFADSKRKSVLLDKIKNLQVALTSKQQSLETAMSFVARNTFKRVRNGFLMRKVAVFFSNTPTRASPQLREAVLKLSDAGITPLFLTRQEDRQLINALQINNTAVGHALVLPAGRDLTDFLENVLTCHVCLDICNIDPSCGFGSWRPSFRDRRAAGSDVDIDMAFILDSAETTTLFQFNEMKKYIAYLVRQLDMSPDPKASQHFARVAVVQHAPSESVDNASMPPVKVEFSLTDYGSKEKLVDFLSRGMTQLQGTRALGSAIEYTIENVFESAPNPRDLKIVVLMLTGEVPEQQLEEAQRVILQAKCKGYFFVVLGIGRKVNIKEVYTFASEPNDVFFKLVDKSTELNEEPLMRFGRLLPSFVSSENAFYLSPDIRKQCDWFQGDQPTKNLVKFGHKQVNVPNNVTSSPTSNPVTTTKPVTTTKPVTTTTKPVTTTTKPVTIINQPSVKPAAAKPAPAKPVAAKPVATKMATVRPPVAVKPATAAKPVAAKPAAVRPPAAAAAKPVATKPEVPRPQAAKPAATKPATTKPMVKMSREVQVFEITENSAKLHWERAEPPGPYFYDLTVTSAHDQSLVLKQNLTVTDRVIGGLLAGQTYHVAVVCYLRSQVRATYHGSFSTKKSQPPPPQPARSASSSTINLMVSTEPLALTETDICKLPKDEGTCRDFILKWYYDPNTKSCARFWYGGCGGNENKFGSQKECEKVCAPVLAKPGVISVMGT

SEQ ID NO: 5023 - protein, 585 aa, Homo sapiens
MGSLKEELLKAIWHAFTALDQDHSGKVSKSQLKVLSHNLCTVLKVPHDPVALEEHFRDDDEGPVSNQGYMPYLNRFILEKVQDNFDKIEFNRMCWTLCVKKNLTKNPLLITEEDAFKIWVIFNFLSEDKYPLIIVSEEIEYLLKKLTEAMGGGWQQEQFEHYKINFDDSKNGLSAWELIELIGNGQFSKGMDRQTVSMAINEVFNELILDVLKQGYMMKKGHRRKNWTERWFVLKPNIISYYVSEDLKDKKGDILLDENCCVESLPDKDGKKCLFLVKCFDKTFEISASDKKKKQEWIQAIHSTIHLLKLGSPPPHKEARQRRKELRKKQLAEQEELERQMKELQAANESKQQELEAVRKKLEEAASRAAEEEKKRLQTQVELQARFSTELEREKLIRQQMEEQVAQKSSELEQYLQRVRELEDMYLKLQEALEDERQARQDEETVRKLQARLLEEESSKRAELEKWHLEQQQAIQTTEAEKQELENQRVLKEQALQEAMEQLEQLELERKQALEQYEEVKKKLEMATNKTKSWKDKVAHHEGLIRLIEPGSKNPHLITNWGPAAFTEAELEEREKNWKEKKTTE

SEQ ID NO: 5024 - protein, 366 aa, Homo sapiens
MALPPGPAALRHTLLLLPALLSSGWGELEPQIDGQTWAERALRENERHAFTCRVAGGPGTPRLAWYLDGQLQEASTSRLLSVGGEAFSGGTSTFTVTAHRAQHELNCSLQDPRSGRSANASVILNVQFKPEIAQVGAKYQEAQGPGLLVVLFALVRANPPANVTWIDQDGPVTVNTSDFLVLDAQNYPWLTNHTVQLQLRSLAHNLSVVATNDVGVTSASLPAPGLLATRVEVPLLGIVVAAGLALGTLVGFSTLVACLVCRKEKKTKGPSRHPSLISSDSNNLKLNNVRLPRENMSLPSNLQLNDLTPDSRAVKPADRQMAQNNSRPELLDPEPGGLLTSQGFIRLPVLGYIYRVSSVSSDEIWL

SEQ ID NO: 5025 - protein, 313 aa, Homo sapiens
MPVAGSELPRRPLPPAAQERDAEPRPPHGELQYLGQIQHILRCGVRKDDRTGTGTLSVFGMQARYSLRDEFPLLTTKRVFWKGVLEELLWFIKGSTNAKELSSKGVKIWDANGSRDFLDSLGFSTREEGDLGPVYGFQWRHFGAEYRDMESDYSGQGVDQLQRVIDTIKTNPDDRRIIMCAWNPRDLPLMALPPCHALCQFYVVNSELSCQLYQRSGDMGLGVPFNIASYALLTYMIAHITGLKPGDFIHTLGDAHIYLNHIEPLKIQLQREPRPFPKLRILRKVEKIDDFKAEDFQIEGYNPHPTIKMEMAV

SEQ ID NO: 5026 - protein, 1062 aa, Homo sapiens
MLKPQPLQQPSQPQQPPPTQQAVARRPPGGTSPPNGGLPGPLATSAAPPGPPAAASPCLGPVAAAGSGLRRGAEGILAPQPPPPQQHQERPGAAAIGSARGQSTGKGPPQSPVFEGVYNNSRMLHFLTAVVGSTCDVKVKNGTTYEGIFKTLSSKFELAVDAVHRKASEPAGGPRREDIVDTMVFKPSDVMLVHFRNVDFNYATKDKFTDSAIAMNSKVNGEHKEKVLQRWEGGDSNSDDYDLESDMSNGWDPNEMFKFNEENYGVKTTYDSSLSSYTVPLEKDNSEEFRQRELRAAQLAREIESSPQYRLRIAMENDDGRTEEEKHSAVQRQGSGRESPSLASREGKYIPLPQRVREGPRGGVRCSSSRGGRPGLSSLPPRGPHHLDNSSPGPGSEARGINGGPSRMSPKAQRPLRGAKTLSSPSNRPSGETSVPPPPAVGRMYPPRSPKSAAPAPISASCPEPPIGSAVPTSSASIPVTSSVSDPGVGSISPASPKISLAPTDVKELSTKEPGRTLEPQELARIAGKVPGLQNEQKRFQLEELRKFGAQFKLQPSSSPENSLDPFPPRILKEEPKGKEKEVDGLLTSEPMGSPVSSKTESVSDKEDKPPLAPSGGTEGPEQPPPPCPSQTGSPPVGLIKGEDKDEGPVAEQVKKSTLNPNAKEFNPTKPLLSVNKSTSTPTSPGPRTHSTPSIPVLTAGQSGLYSPQYISYIPQIHMGPAVQAPQMYPYPVSNSVPGQQGKYRGAKGSLPPQRSDQHQPASAPPMMQAAAAAGPPLVAATPYSSYIPYNPQQFPGQPAMMQPMAHYPSQPVFAPMLQSNPRMLTSGSHPQAIVSSSTPQYPSAEQPTPQALYATVHQSYPHHATQLHAHQPQPATTPTGSQPQSQHAAPSPVQHQAGQAPHLGSGQPQQNLYHPGALTGTPPSLPPGPSAQSPQSSFPQPAAVYAIHHQQLPHGFTNMAHVTQAHVQTGITAAPPPHPGAPHPPQVMLLHPPQSHGGPPQGAVPQSGVPALSASTPSPYPYIGHPQGEQPGQAPGFPGGADDRIPPLPPPGELKIVLAAT

SEQ ID NO: 5027 - protein, 1577 aa, Homo sapiens
MEAGSVVRAIFDFCPSVSEELPLFVGDIIEVLAVVDEFWLLGKKEDVTGQFPSSFVEIVTIPSLKEGERLFVCICEFTSQELDNLPLHRGDLVILDGIPTAGWLQGRSCWGARGFFPSSCVRELCLSSQSRQWHSQSALFQIPEYSMGQARALMGLSAQLDEELDFREGDVITIIGVPEPGWFEGELEGRRGIFPEGFVELLGPLRTVDESVSSGNQDDCIVNGEVDTPVGEEEIGPDEDEEEPGTYGVALYRFQALEPNELDFEVGDKIRILATLEDGWLEGSLKGRTGIFPYRFVKLCPDTRVEETMALPQEGSLARIPETSLDCLENTLGVEEQRHETSDHEAEEPDCIISEAPTSPLGHLTSEYDTDRNSYQDEDTAGGPPRSPGVEWEMPLATDSPTSDPTEVVNGISSQPQVPFHPNLQKSQYYSTVGGSHPHSEQYPDLLPLEARTRDYASLPPKRMYSQLKTLQKPVLPLYRGSSVSASRVVKPRQSSPQLHNLASYTKKHHTSSVYSISERLEMKPGPQAQGLVMEAATHSQGDGSTDLDSKLTQQLIEFEKSLAGPGTEPDKILRHFSIMDFNSEKDIVRGSSKLITEQELPERRKALRPPPPRPCTPVSTSPHLLVDQNLKPAPPLVVRPSRPAPLPPSAQQRTNAVSPKLLSRHRPTCETLEKEGPGHMGRSLDQTSPCPLVLVRIEEMERDLDMYSRAQEELNLMLEEKQDESSRAETLEDLKFCESNIESLNMELQQLREMTLLSSQSSSLVAPSGSVSAENPEQRMLEKRAKVIEELLQTERDYIRDLEMCIERIMVPMQQAQVPNIDFEGLFGNMQMVIKVSKQLLAALEISDAVGPVFLGHRDELEGTYKIYCQNHDEAIALLEIYEKDEKIQKHLQDSLADLKSLYNEWGCTNYINLGSFLIKPVQRVMRYPLLLMELLNSTPESHPDKVPLTNAVLAVKEINVNINEYKRRKDLVLKYRKGDEDSLMEKISKLNIHSIIKKSNRVSSHLKHLTGFAPQIKDEVFEETEKNFRMQERLIKSFIRDLSLYLQHIRESACVKVVAAVSMWDVCMERGHRDLEQFERVHRYISDQLFTNFKERTERLVISPLNQLLSMFTGPHKLVQKRFDKLLDFYNCTERAEKLKDKKTLEELQSARNNYEALNAQLLDELPKFHQYAQGLFTNCVHGYAEAHCDFVHQALEQLKPLLSLLKVAGREGNLIAIFHEEHSRVLQQLQVFTFFPESLPATKKPFERKTIDRQSARKPLLGLPSYMLQSEELRASLLARYPPEKLFQAERNFNAAQDLDVSLLEGDLVGVIKKKDPMGSQNRWLIDNGVTKGFVYSSFLKPYNPRRSHSDASVGSHSSTESEHGSSSPRFPRQNSGSTLTFNPSSMAVSFTSGSCQKQPQDASPPPKECDQGTLSASLNPSNSESSPSRCPSDPDSTSQPRSGDSADVARDVKQPTATPRSYRNFRHPEIVGYSVPGRNGQSQDLVKGCARTAQAPEDRSTEPDGSEAEGNQVYFAVYTFKARNPNELSVSANQKLKILEFKDVTGNTEWWLAEVNGKKGYVPSNYIRKTEYT

SEQ ID NO: 5028 - protein, 857 aa, Homo sapiens
MAKAKKVGARRKASGAPAGARGGPAKANSNPFEVKVNRQKFQILGRKTRHDVGLPGVSRARALRKRTQTLLKEYKERDKSNVFRDKRFGEYNSNMSPEEKMMKRFALEQQRHHEKKSIYNLNEDEELTHYGQSLADIEKHNDIVDSDSDAEDRGTLSAELTAAHFGGGGGLLHKKTQQEGEEREKPKSRKELIEELIAKSKQEKRERQAQREDALELTEKLDQDWKEIQTLLSHKTPKSENRDKKEKPKPDAYDMMVRELGFEMKAQPSNRMKTEAELAKEEQEHLRKLEAERLRRMLGKDEDENVKKPKHMSADDLNDGFVLDKDDRRLLSYKDGKMNVEEDVQEEQSKEASDPESNEEEGDSSGGEDTEESDSPDSHLDLESNVESEEENEKPAKEQRQTPGKGLISGKERAGKATRDELPYTFAAPESYEELRSLLLGRSMEEQLLVVERIQKCNHPSLAEGNKAKLEKLFGFLLEYVGDLATDDPPDLTVIDKLVVHLYHLCQMFPESASDAIKFVLRDAMHEMEEMIETKGRAALPGLDVLIYLKITGLLFPTSDFWHPVVTPALVCLSQLLTKCPILSLQDVVKGLFVCCLFLEYVALSQRFIPELINFLLGILYIATPNKASQGSTLVHPFRALGKNSELLVVSAREDVATWQQSSLSLRWASRLRAPTSTEANHIRLSCLAVGLALLKRCVLMYGSLPSFHAIMGPLQALLTDHLADCSHPQELQELCQSTLTEMESQKQLCRPLTCEKSKPVPLKLFTPRLVKVLEFGRKQGSSKEEQERKRLIHKHKREFKGAVREIRKDNQFLARMQLSEIMERDAERKRKVKQLFNSLATQEGEWKALKRKKFKK

SEQ ID NO: 5029 - protein, 326 aa, Homo sapiens
MRNWLVLLCPCVLGAALHLWLRLRSPPPACASGAGPAGGVSLLLPRLECNGAVSAHPNLHLPGSRDSPASASQVAGITDQLALFPQWKSTHYDVVVGVLSARNNHELRNVIRSTWMRHLLQHPTLSQRVLVKFIIGAHGCEVPVEDREDPYSCKLLNITNPVLNQEIEAFSLSEDTSSGLPEDRVVSVSFRVLYPIVITSLGVFYDANDVGFQRNITVKLYQAEQEEALFIARFSPPSCGVQVNKLWYKPVEQFILPESFEGTIVWESQDLHGLVSRNLHKVTVNDGGGVLRVITAGEGALPHEFLEGVEGVAGGFIYTIQGKFAS

SEQ ID NO: 5030 - protein, 521 aa, Homo sapiens
MSLSRSEEMHRLTENVYKTIMEQFNPSLRNFIAMGKNYEKALAGVTYAAKGYFDALVKMGELASESQGSKELGDVLFQMAEVHRQIQNQLEEMLKSFHNELLTQLEQKVELDSRYLSAALKKYQTEQRSKGDALDKCQAELKKLRKKSQGSKNPQKYSDKELQYIDAISNKQGELENYVSDGYKTALTEERRRFCFLVEKQCAVAKNSAAYHSKGKELLAQKLPLWQQACADPSKIPERAVQLMQQVASNGATLPSALSASKSNLVISDPIPGAKPLPVPPELAPFVGRMSAQESTPIMNGVTGPDGEDYSPWADRKAAQPKSLSPPQSQSKLSDSYSNTLPVRKSVTPKNSYATTENKTLPRSSSMAAGLERNGRMRVKAIFSHAAGDNSTLLSFKEGDLITLLVPEARDGWHYGESEKTKMRGWFPFSYTRVLDSDGSDRLHMSLQQGKSSSTGNLLDKDDLAIPPPDYGAASRAFPAQTASGFKQRPYSVAVPAFSQGLDDYGARSMSSGSGTLVSTV

SEQ ID NO: 5031 - protein, 125 aa, Homo sapiens
MAKYLAQIIVMGVQVVGRAFARALRQEFAASRAAADARGRAGHRSAAASNLSGLSLQEAQQILNVSKLSPEEVQKNYEHLFKVNDKSVGGSFYLQSKVVRAKERLDEELKIQAQEDREKGQMPHT

SEQ ID NO: 5032 - protein, 559 aa, Homo sapiens
MKVITCEIAWHNKEPVYSLDFQHGTAGRIHRLASAGVDTNVRIWKVEKGPDGKAIVEFLSNLARHTKAVNVVRFSPTGEILASGGDDAVILLWKVNDNKEPEQIAFQDEDEAQLNKENWTVVKTLRGHLEDVYDICWATDGNLMASASVDNTAIIWDVSKGQKISIFNEHKSYVQGVTWDPLGQYVATLSCDRVLRVYSIQKKRVAFNVSKMLSGIGAEGEARSYRMFHDDSMKSFFRRLSFTPDGSLLLTPAGCVESGENVMNTTYVFSRKNLKRPIAHLPCPGKATLAVRCCPVYFELRPVVETGVELMSLPYRLVFAVASEDSVLLYDTQQSFPFGYVSNIHYHTLSDISWSSDGAFLAISSTDGYCSFVTFEKDELGIPLKEKPVLNMRTPDTAKKTKSQTHRGSSPGPRPVEGTPASRTQDPSSPGTTPPQARQAPAPTVIRDPPSITPAVKSPLPGPSEEKTLQPSSQNTKAHPSRRVTLNTLQAWSKTTPRRINLTPLKTDTPPSSVPTSVISTPSTEEIQSETPGDAQGSPPELKRPRLDENKGGTESLDP

SEQ ID NO: 5033 - protein, 311 aa, Homo sapiens
MRGAARAAWGRAGQPWPRPPAPGPPPPPLPLLLLLLAGLLGGAGAQYSSDRCSWKGSGLTHEAHRKEVEQVYLRCAAGAVEWMYPTGALIVNLRPNTFSPARHLTVCIRSFTDSSGANIYLEKTGELRLLVPDGDGRPGRVQCFGLEQGGLFVEATPQQDIGRRTTGFQYELVRRHRASDLHELSAPCRPCSDTEVLLAVCTSDFAVRGSIQQVTHEPERQDSAIHLRVSRLYRQKSRVFEPVPEGDGHWQGRVRTLLECGVRPGHGDFLFTGHMHFGEARLGCAPRFKDFQRMYRDAQERGLNPCEVGTD

SEQ ID NO: 5034 - protein, 344 aa, Homo sapiens
MKDLGAEHLAGHEGVQLLGLLNVYLEQEERFQPREKGLSLIEATPENDNTLCPGLRNAKVEDLRSLANFFGSCTETFVLAVNILDRFLALMKVKPKHLSCIGVCSFLLAARIVEEDCNIPSTHDVIRISQCKCTASDIKRMEKIISEKLHYELEATTALNFLHLYHTIILCHTSERKEILSLDKLEAQLKACNCRLIFSKAKPSVLALCLLNLEVETLKSVELLEILLLVKKHSKINDTEFFYWRELVSKCLAEYSSPECCKPDLKKLVWIVSRRTAQNLHNSYYSVPELPTIPEGGCFDESESEDSCEDMSCGEESLSSSPPSDQECTFFFNFKVAQTLCFPS

SEQ ID NO: 5035 - protein, 851 aa, Homo sapiens
MAQWEMLQNLDSPFQDQLHQLYSHSLLPVDIRQYLAVWIEDQNWQEAALGSDDSKATMLFFHFLDQLNYECGRCSQDPESLLLQHNLRKFCRDIQPFSQDPTQLAEMIFNLLLEEKRILIQAQRAQLEQGEPVLETPVESQQHEIESRILDLRAMMEKLVKSISQLKDQQDVFCFRYKIQAKGKTPSLDPHQTKEQKILQETLNELDKRRKEVLDASKALLGRLTTLIELLLPKLEEWKAQQQKACIRAPIDHGLEQLETWFTAGAKLLFHLRQLLKELKGLSCLVSYQDDPLTKGVDLRNAQVTELLQRLLHRAFVVETQPCMPQTPHRPLILKTGSKFTVRTRLLVRLQEGNESLTVEVSIDRNPPQLQGFRKFNILTSNQKTLTPEKGQSQGLIWDFGYLTLVEQRSGGSGKGSNKGPLGVTEELHIISFTVKYTYQGLKQELKTDTLPVVIISNMNQLSIAWASVLWFNLLSPNLQNQQFFSNPPKAPWSLLGPALSWQFSSYVGRGLNSDQLSMLRNKLFGQNCRTEDPLLSWADFTKRESPPGKLPFWTWLDKILELVHDHLKDLWNDGRIMGFVSRSQERRLLKKTMSGTFLLRFSESSEGGITCSWVEHQDDDKVLIYSVQPYTKEVLQSLPLTEIIRHYQLLTEENIPENPLRFLYPRIPRDEAFGCYYQEKVNLQERRKYLKHRLIVVSNRQVDELQQPLELKPEPELESLELELGLVPEPELSLDLEPLLKAGLDLGPELESVLESTLEPVIEPTLCMVSQTVPEPDQGPVSQPVPEPDLPCDLRHLNTEPMEIFRNCVKIEEIMPNGDPLLAGQNTVDEVYVSRPSHFYTDGPLMPSDF

SEQ ID NO: 5036 - protein, 210 aa, Homo sapiens
MRCLTTPMLLRALAQAARAGPPGGRSLHSSAVAATYKYVNMQDPEMDMKSVTDRAARTLLWTELFRGLGMTLSYLFREPATINYPFEKGPLSPRFRGEHALRRYPSGEERCIACKLCEAICPAQAITIEAEPRADGSRRTTRYDIDMTKCIYCGFCQEACPVDAIVEGPNFEFSTETHEELLYNKEKLLNNGDKWEAEIAANIQADYLYR

SEQ ID NO: 5037 - protein, 789 aa, Homo sapiens
MGTKMADLDSPPKLSGVQQPSEGVGGGRCSEISAELIRSLTELQELEAVYERLCGEEKVVERELDALLEQQNTIESKMVTLHRMGPNLQLIEGDAKQLAGMITFTCNLAENVSSKVRQLDLAKNRLYQAIQRADDILDLKFCMDGVQTALRSEDYEQAAAHTHRYLCLDKSVIELSRQGKEGSMIDANLKLLQEAEQRLKAIVAEKFAIATKEGDLPQVERFFKIFPLLGLHEEGLRKFSEYLCKQVASKAEENLLMVLGTDMSDRRAAVIFADTLTLLFEGIARIVETHQPIVETYYGPGRLYTLIKYLQVECDRQVEKVVDKFIKQRDYHQQFRHVQNNLMRNSTTEKIEPRELDPILTEVTLMNARSELYLRFLKKRISSDFEVGDSMASEEVKQEHQKCLDKLLNNCLLSCTMQELIGLYVTMEEYFMRETVNKAVALDTYEKGQLTSSMVDDVFYIVKKCIGRALSSSSIDCLCAMINLATTELESDFRDVLCNKLRMGFPATTFQDIQRGVTSAVNIMHSSLQQGKFDTKGIESTDEAKMSFLVTLNNVEVCSENISTLKKTLESDCTKLFSQGIGGEQAQAKFDSCLSDLAAVSNKFRDLLQEGLTELNSTAIKPQVQPWINSFFSVSHNIEEEEFNDYEANDPWVQQFILNLEQQMAEFKASLSPVIYDSLTGLMTSLVAVELEKVVLKSTFNRLGGLQFDKELRSLIAYLTTVTTWTIRDKFARLSQMATILNLERVTEILDYWGPNSGPLTWRLTPAEVRQVLALRIDFRSEDIKRLRL

SEQ ID NO: 5038 - protein, 717 aa, Homo sapiens
MSGDGATEQAAEYVPEKVKKAEKKLEENPYDLDAWSILIREAQNQPIDKARKTYERLVAQFPSSGRFWKLYIEAEIKAKNYDKVEKLFQRCLMKVLHIDLWKCYLSYVRETKGKLPSYKEKMAQAYDFALDKIGMEIMSYQIWVDYINFLKGVEAVGSYAENQRITAVRRVYQRGCVNPMINIEQLWRDYNKYEEGINIHLAKKMIEDRSRDYMNARRVAKEYETVMKGLDRNAPSVPPQNTPQEAQQVDMWKKYIQWEKSNPLRTEDQTLITKRVMFAYEQCLLVLGHHPDIWYEAAQYLEQSSKLLAEKGDMNNAKLFSDEAANIYERAISTLLKKNMLLYFAYADYEESRMKYEKVHSIYNRLLAIEDIDPTLVYIQYMKFARRAEGIKSGRMIFKKAREDTRTRHHVYVTAALMEYYCSKDKSVAFKIFELGLKKYGDIPEYVLAYIDYLSHLNEDNNTRVLFERVLTSGSLPPEKSGEIWARFLAFESNIGDLASILKVEKRRFTAFKEEYEGKETALLVDRYKFMDLYPCSASELKALGYKDVSRAKLAAIIPDPVVAPSIVPVLKDEVDRKPEYPKPDTQQMIPFQPRHLAPPGLHPVPGGVFPVPPAAVVLMKLLPPPICFQGPFVQVDELMEIFRRCKIPNTVEEAVRIITGGAPELAVEGNGPVESNAVLTKAVKRPNEDSDEDEEKGAVVPPVHDIYRARQQKRIR

SEQ ID NO: 5039 - protein, 588 aa, Homo sapiens
MNTSIPYQQNPYNPRGSSNVIQCYRCGDTCKGEVVRVHNNHFHIRCFTCQVCGCGLAQSGFFFKNQEYICTQDYQQLYGTRCDSCRDFITGEVISALGRTYHPKCFVCSLCRKPFPIGDKVTFSGKECVCQTCSQSMASSKPIKIRGPSHCAGCKEEIKHGQSLLALDKQWHVSCFKCQTCSVILTGEYISKDGVPYCESDYHAQFGIKCETCDRYISGRVLEAGGKHYHPTCARCVRCHQMFTEGEEMYLTGSEVWHPICKQAARAEKKLKHRRTSETSISPPGSSIGSPNRVICDIYENLDLRQRRASSPGYIDSPTYSRQGMSPTFSRSPHHYYRSAGDSNIYRKPPIYKRHGDLSTATKSKTSEDISQTSKYSPIYSPDPYYASESEYWTYHGSPKVPRARRFSSGGEEDDFDRSMHKLQSGIGRLILKEEMKARSSSYADPWTPPRSSTSSREALHTAGYEMSLNGSPRSHYLADSDPLISKSASLPAYRRNGLHRTPSADLFHYDSMNAVNWGMREYKIYPYELLLVTTRGRNRLPKDVDRTRLERHLSQEEFYQVFGMTISEFDRLALWKRNELKKQARLF

SEQ ID NO: 5040 - protein, 2971 aa, Homo sapiens
MRKHRHLPLVAVFCLFLSGFPTTHAQQQQAAQDSADIIFLIDGSNNTGSVNFAVILDFLVNLLEKLPIGTQQIRVGVVQFSDEPRTMFSLDTYSTKAQVLGAVKALGFAGGELANIGLALDFVVENHFTRAGGSRVEEGVPQVLVLISAGPSSDEIRYGVVALKQASVFSFGLGAQAASRAELQHIATDDNLVFTVPEFRSFGDLQEKLLPYIVGVAQRHIVLKPPTIVTQVIEVNKRDIVFLVDGSSALGLANFNAIRDFIAKVIQRLEIGQDLIQVAVAQYADTVRPEFYFNTHPTKREVITAVRKMKPLDGSALYTGSALDFVRNNLFTSSAGYRAAEGIPKLLVLITGGKSLDEISQPAQELKRSSIMAFAIGNKGADQAELEEIAFDSSLVFIPAEFRAAPLQGMLPGLLAPLRTLSGTPEVHSNKRDIIFLLDGSANVGKTNFPYVRDFVMNLVNSLDIGNDNIRVGLVQFSDTPVTEFSLNTYQTKSDILGHLRQLQLQGGSGLNTGSALSYVYANHFTEAGGSRIREHVPQLLLLLTAGQSEDSYLQAANALTRAGILTFCVGASQANKAELEQIAFNPSLVYLMDDFSSLPALPQQLIQPLTTYVSGGVEEVPLAQPESKRDILFLFDGSANLVGQFPVVRDFLYKIIDELNVKPEGTRIAVAQYSDDVKVESRFDEHQSKPEILNLVKRMKIKTGKALNLGYALDYAQRYIFVKSAGSRIEDGVLQFLVLLVAGRSSDRVDGPASNLKQSGVVPFIFQAKNADPAELEQIVLSPAFILAAESLPKIGDLHPQIVNLLKSVHNGAPAPVSGEKDVVFLLDGSEGVRSGFPLLKEFVQRVVESLDVGQDRVRVAVVQYSDRTRPEFYLNSYMNKQDVVNAVRQLTLLGGPTPNTGAALEFVLRNILVSSAGSRITEGVPQLLIVLTADRSGDDVRNPSVVVKRGGAVPIGIGIGNADITEMQTISFIPDFAVAIPTFRQLGTVQQVISERVTQLTREELSRLQPVLQPLPSPGVGGKRDVVFLIDGSQSAGPEFQYVRTLIERLVDYLDVGFDTTRVAVIQFSDDPKVEFLLNAHSSKDEVQNAVQRLRPKGGRQINVGNALEYVSRNIFKRPLGSRIEEGVPQFLVLISSGKSDDEVDDPAVELKQFGVAPFTIARNADQEELVKISLSPEYVFSVSTFRELPSLEQKLLTPITTLTSEQIQKLLASTRYPPPAVESDAADIVFLIDSSEGVRPDGFAHIRDFVSRIVRRLNIGPSKVRVGVVQFSNDVFPEFYLKTYRSQAPVLDAIRRLRLRGGSPLNTGKALEFVARNLFVKSAGSRIEDGVPQHLVLVLGGKSQDDVSRFAQVIRSSGIVSLGVGDRNIDRTELQTITNDPRLVFTVREFRELPNIEERIMNSFGPSAATPAPPGVDTPPPSRPEKKKADIVFLLDGSINFRRDSFQEVLRFVSEIVDTVYEDGDSIQVGLVQYNSDPTDEFFLKDFSTKRQIIDAINKVVYKGGRHANTKVGLEHLRVNHFVPEAGSRLDQRVPQIAFVITGGKSVEDAQDVSLALTQRGVKVFAVGVRNIDSEEVGKIASNSATAFRVGNVQELSELSEQVLETLHDAMHETLCPGVTDAAKACNLDVILGFDGSRDQNVFVAQKGFESKVDAILNRISQMHRVSCSGGRSPTVRVSVVANTPSGPVEAFDFDEYQPEMLEKFRNMRSQHPYVLTEDTLKVYLNKFRQSSPDSVKVVIHFTDGADGDLADLHRASENLRQEGVRALILVGLERVVNLERLMHLEFGRGFMYDRPLRLNLLDLDYELAEQLDNIAEKACCGVPCKCSGQRGDRGPIGSIGPKGIPGEDGYRGYPGDEGGPGERGPPGVNGTQGFQGCPGQRGVKGSRGFPGEKGEVGEIGLDGLDGEDGDKGLPGSSGEKGNPGRRGDKGPRGEKGERGDVGIRGDPGNPGQDSQERGPKGETGDLGPMGVPGRDGVPGGPGETGKNGGFGRRGPPGAKGNKGGPGQPGFEGEQGTRGAQGPAGPAGPPGLIGEQGISGPRGSGGAAGAPGERGRTGPLGRKGEPGEPGPKGGIGNRGPRGETGDDGRDGVGSEGRRGKKGERGFPGYPGPKGNPGEPGLNGTTGPKGIRGRRGNSGPPGIVGQKGDPGYPGPAGPKGNRGDSIDQCALIQSIKDKCPCCYGPLECPVFPTELAFALDTSEGVNQDTFGRMRDVVLSIVNDLTIAESNCPRGARVAVVTYNNEVTTEIRFADSKRKSVLLDKIKNLQVALTSKQQSLETAMSFVARNTFKRVRNGFLMRKVAVFFSNTPTRASPQLREAVLKLSDAGITPLFLTRQEDRQLINALQINNTAVGHALVLPAGRDLTDFLENVLTCHVCLDICNIDPSCGFGSWRPSFRDRRAAGSDVDIDMAFILDSAETTTLFQFNEMKKYIAYLVRQLDMSPDPKASQHFARVAVVQHAPSESVDNASMPPVKVEFSLTDYGSKEKLVDFLSRGMTQLQGTRALGSAIEYTIENVFESAPNPRDLKIVVLMLTGEVPEQQLEEAQRVILQAKCKGYFFVVLGIGRKVNIKEVYTFASEPNDVFFKLVDKSTELNEEPLMRFGRLLPSFVSSENAFYLSPDIRKQCDWFQGDQPTKNLVKFGHKQVNVPNNVTSSPTSNPVTTTKPVTTTKPVTTTTKPVTTTTKPVTIINQPSVKPAAAKPAPAKPVAAKPVATKMATVRPPVAVKPATAAKPVAAKPAAVRPPAAAAAKPVATKPEVPRPQAAKPAATKPATTKPMVKMSREVQVFEITENSAKLHWERAEPPGPYFYDLTVTSAHDQSLVLKQNLTVTDRVIGGLLAGQTYHVAVVCYLRSQVRATYHGSFSTKKSQPPPPQPARSASSSTINLMVSTEPLALTETDICKLPKDEGTCRDFILKWYYDPNTKSCARFWYGGCGGNENKFGSQKECEKVCAPVLAKPGVISVMGT

SEQ ID NO: 5041 - protein, 420 aa, Homo sapiens
MLKAVILIGGPQKGTRFRPLSFEVPKPLFPVAGVPMIQHHIEACAQVPGMQEILLIGFYQPDEPLTQFLEAAQQEFNLPVRYLQEFAPLGTGGGLYHFRDQILAGSPEAFFVLNADVCSDFPLSAMLEAHRRQRHPFLLLGTTANRTQSLNYGCIVENPQTHEVLHYVEKPSTFISDIINCGIYLFSPEALKPLRDVFQRNQQDGQLEDSPGLWPGAGTIRLEQDVFSALAGQGQIYVHLTDGIWSQIKSAGSALYASRLYLSRYQDTHPERLAKHTPGGPWIRGNVYIHPTAKVAPSAVLGPNVSIGKGVTVGEGVRLRESIVLHGATLQEHTCVLHSIVGWGSTVGRWARVEGTPSDPNPNDPRARMDSESLFKDGKLLPAITILGCRVRIPAEVLILNSIVLPHKELSRSFTNQIIL

SEQ ID NO: 5042 - protein, 159 aa, Homo sapiens
MTARGTPSRFLASVLHNGLGRYVQQLQRLSFSVSRDGASSRGAREFVEREVIDFARRNPGVVIYVNSRPCCVPRVVAEYLNGAVREESIHCKSVEEISTLVQKLADQSGLDVIRIRKPFHTDNPSIQGQWHPFTNKPTTFRGLRPREVQDPAPAQVQAQ

SEQ ID NO: 5043 - protein, 652 aa, Homo sapiens
MTPILTVLICLGLSLGPRTHVQAGHLPKPTLWAEPGSVITQGSPVTLRCQGGQETQEYRLYREKKTAPWITRIPQELVKKGQFPIPSITWEHTGRYRCYYGSDTAGRSESSDPLELVVTGAYIKPTLSAQPSPVVNSGGNVTLQCDSQVAFDGFILCKEGEDEHPQCLNSQPHARGSSRAIFSVGPVSPSRRWWYRCYAYDSNSPYEWSLPSDLLELLVLGVSKKPSLSVQPGPIVAPEETLTLQCGSDAGYNRFVLYKDGERDFLQLAGAQPQAGLSQANFTLGPVSRSYGGQYRCYGAHNLSSEWSAPSDPLDILIAGQFYDRVSLSVQPGPTVASGENVTLLCQSQGWMQTFLLTKEGAADDPWRLRSTYQSQKYQAEFPMGPVTSAHAGTYRCYGSQSSKPYLLTHPSDPLELVVSGPSGGPSSPTTGPTSTSAGPEDQPLTPTGSDPQSGLGRHLGVVIGILVAVILLLLLLLLLFLILRHRRQGKHWTSTQRKADFQHPAGAVGPEPTDRGLQWRSSPAADAQEENLYAAVKHTQPEDGVEMDTRQSPHDEDPQAVTYAEVKHSRPRREMASPPSPLSGEFLDTKDRQAEEDRQMDTEAAASEAPQDVTYAQLHSLTLRREATEPPPSQEGPSPAVPSIYATLAIH

SEQ ID NO: 5044 - protein, 229 aa, Homo sapiens
MSEKENNFPPLPKFIPVKPCFYQNFSDEIPVEHQVLVKRIYRLWMFYCATLGVNLIACLAWWIGGGSGTNFGLAFVWLLLFTPCGYVCWFRPVYKAFRADSSFNFMAFFFIFGAQFVLTVIQAIGFSGWGACGWLSAIGFFQYSPGAAVVMLLPAIMFSVSAAMMAIAIMKVHRIYRGAGGSFQKAQTEWNTGTWRNPPSREAQYNNFSGNSLPEYPTVPSYPGSGQWP

SEQ ID NO: 5045 - protein, 108 aa, Homo sapiens
MRQRLLPSVTSLLLVALLFPGSSQARHVNHSATEALGELRERAPGQGTNGFQLLRHAVKRDLLPPRTPPYQGDVPLGIRNTICRMQQGICRLFFCHSGTGQQHRQRCG

SEQ ID NO: 5046 - protein, 295 aa, Homo sapiens
MAGYLPPKGYAPSPPPPYPVTPGYPEPALHPGPGQAPVPAQVPAPAPGFALFPSPGPVALGSAAPFLPLPGVPSGLEFLVQIDQILIHQKAERVETFLGWETCNRYELRSGAGQPLGQAAEESNCCARLCCGARRPLRVRLADPGDREVLRLLRPLHCGCSCCPCGLQEMEVQAPPGTTIGHVLQTWHPFLPKFSIQDADRQTVLRVVGPCWTCGCGTDTNFEVKTRDESRSVGRISKQWGGLVREALTDADDFGLQFPLDLDVRVKAVLLGATFLIDYMFFEKRGGAGPSAVTS

SEQ ID NO: 5047 - protein, 2541 aa, Homo sapiens
MVALSLKISIGNVVKTMQFEPSTMVYDACRIIRERIPEAPAGPPSDFGLFLSDDDPKKGIWLEAGKALDYYMLRNGDTMEYRKKQRPLKIRMLDGTVKTIMVDDSKTVTDMLMTICARIGITNHDEYSLVRELMEEKKEEITGTLRKDKTLLRDEKKMEKLKQKLHTDDELNWLDHGRTLREQGVEEHETLLLRRKFFYSDQNVDSRDPVQLNLLYVQARDDILNGSHPVSFDKACEFAGFQCQIQFGPHNEQKHKAGFLDLKDFLPKEYVKQKGERKIFQAHKNCGQMSEIEAKVRYVKLARSLKTYGVSFFLVKEKMKGKNKLVPRLLGITKECVMRVDEKTKEVIQEWNLTNIKRWAASPKSFTLDFGDYQDGYYSVQTTEGEQIAQLIAGYIDIILKKKKSKDHFGLEGDEESTMLEDSVSPKKSTVLQQQYNRVGKVEHGSVALPAIMRSGASGPENFQVGSMPPAQQQITSGQMHRGHMPPLTSAQQALTGTINSSMQAVQAAQATLDDFDTLPPLGQDAASKAWRKNKMDESKHEIHSQVDAITAGTASVVNLTAGDPAETDYTAVGCAVTTISSNLTEMSRGVKLLAALLEDEGGSGRPLLQAAKGLAGAVSELLRSAQPASAEPRQNLLQAAGNVGQASGELLQQIGESDTDPHFQDALMQLAKAVASAAAALVLKAKSVAQRTEDSGLQTQVIAAATQCALSTSQLVACTKVVAPTISSPVCQEQLVEAGRLVAKAVEGCVSASQAATEDGQLLRGVGAAATAVTQALNELLQHVKAHATGAGPAGRYDQATDTILTVTENIFSSMGDAGEMVRQARILAQATSDLVNAIKADAEGESDLENSRKLLSAAKILADATAKMVEAAKGAAAHPDSEEQQQRLREAAEGLRMATNAAAQNAIKKKLVQRLEHAAKQAAASATQTIAAAQHAASTPKASAGPQPLLVQSCKAVAEQIPLLVQGVRGSQAQPDSPSAQLALIAASQSFLQPGGKMVAAAKASVPTIQDQASAMQLSQCAKNLGTALAELRTAAQKAQEACGPLEMDSALSVVQNLEKDLQEVKAAARDGKLKPLPGETMEKCTQDLGNSTKAVSSAIAQLLGEVAQGNENYAGIAARDVAGGLRSLAQAARGVAALTSDPAVQAIVLDTASDVLDKASSLIEEAKKAAGHPGDPESQQRLAQVAKAVTQALNRCVSCLPGQRDVDNALRAVGDASKRLLSDSLPPSTGTFQEAQSRLNEAAAGLNQAATELVQASRGTPQDLARASGRFGQDFSTFLEAGVEMAGQAPSQEDRAQVVSNLKGISMSSSKLLLAAKALSTDPAAPNLKSQLAAAARAVTDSINQLITMCTQQAPGQKECDNALRELETVRELLENPVQPINDMSYFGCLDSVMENSKVLGEAMTGISQNAKNGNLPEFGDAISTASKALCGFTEAAAQAAYLVGVSDPNSQAGQQGLVEPTQFARANQAIQMACQSLGEPGCTQAQVLSAATIVAKHTSALCNSCRLASARTTNPTAKRQFVQSAKEVANSTANLVKTIKALDGAFTEENRAQCRAATAPLLEAVDNLSAFASNPEFSSIPAQISPEGRAAMEPIVISAKTMLESAGGLIQTARALAVNPRDPPSWSVLAGHSRTVSDSIKKLITSMRDKAPGQLECETAIAALNSCLRDLDQASLAAVSQQLAPREGISQEALHTQMLTAVQEISHLIEPLANAARAEASQLGHKVSQMAQYFEPLTLAAVGAASKTLSHPQQMALLDQTKTLAESALQLLYTAKEAGGNPKQAAHTQEALEEAVQMMTEAVEDLTTTLNEAASAAGVVGGMVDSITQAINQLDEGPMGEPEGSFVDYQTTMVRTAKAIAVTVQEMVTKSNTSPEELGPLANQLTSDYGRLASEAKPAAVAAENEEIGSHIKHRVQELGHGCAALVTKAGALQCSPSDAYTKKELIECARRVSEKVSHVLAALQAGNRGTQACITAASAVSGIIADLDTTIMFATAGTLNREGTETFADHREGILKTAKVLVEDTKVLVQNAAGSQEKLAQAAQSSVATITRLADVVKLGAASLGAEDPETQVVLINAVKDVAKALGDLISATKAAAGKVGDDPAVWQLKNSAKVMVTNVTSLLKTVKAVEDEATKGTRALEATTEHIRQELAVFCSPEPPAKTSTPEDFIRMTKGITMATAKAVAAGNSCRQEDVIATANLSRRAIADMLRACKEAAYHPEVAPDVRLRALHYGRECANGYLELLDHVLLTLQKPSPELKQQLTGHSKRVAGSVTELIQAAEAMKGTEWVDPEDPTVIAENELLGAAAAIEAAAKKLEQLKPRAKPKEADESLNFEEQILEAAKSIAAATSALVKAASAAQRELVAQGKVGAIPANALDDGQWSQGLISAARMVAAATNNLCEAANAAVQGHASQEKLISSAKQVAASTAQLLVACKVKADQDSEAMKRLQAAGNAVKRASDNLVKAAQKAAAFEEQENETVVVKEKMVGGIAQIIAAQEEMLRKERELEEARKKLAQIRQQQYKFLPSELRDEH

SEQ ID NO: 5048 - protein, 1800 aa, Homo sapiens
MFNKSFGTPFGGGTGGFGTTSTFGQNTGFGTTSGGAFGTSAFGSSNNTGGLFGNSQTKPGGLFGTSSFSQPATSTSTGFGFGTSTGTANTLFGTASTGTSLFSSQNNAFAQNKPTGFGNFGTSTSSGGLFGTTNTTSNPFGSTSGSLFGPSSFTAAPTGTTIKFNPPTGTDTMVKAGVSTNISTKHQCITAMKEYESKSLEELRLEDYQANRKGPQNQVGAGTTTGLFGSSPATSSATGLFSSSTTNSGFAYGQNKTAFGTSTTGFGTNPGGLFGQQNQQTTSLFSKPFGQATTTQNTGFSFGNTSTIGQPSTNTMGLFGVTQASQPGGLFGTATNTSTGTAFGTGTGLFGQTNTGFGAVGSTLFGNNKLTTFGSSTTSAPSFGTTSGGLFGFGTNTSGNSIFGSKPAPGTLGTGLGAGFGTALGAGQASLFGNNQPKIGGPLGTGAFGAPGFNTTTATLGFGAPQAPVALTDPNASAAQQAVLQQHINSLTYSPFGDSPLFRNPMSDPKKKEERLKPTNPAAQKALTTPTHYKLTPRPATRVRPKALQTTGTAKSHLFDGLDDDEPSLANGAFMPKKSIKKLVLKNLNNSNLFSPVNRDSENLASPSEYPENGERFSFLSKPVDENHQQDGDEDSLVSHFYTNPIAKPIPQTPESAGNKHSNSNSVDDTIVALNMRAALRNGLEGSSEETSFHDESLQDDREEIENNSYHMHPAGIILTKVGYYTIPSMDDLAKITNEKGECIVSDFTIGRKGYGSIYFEGDVNLTNLNLDDIVHIRRKEVVVYLDDNQKPPVGEGLNRKAEVTLDGVWPTDKTSRCLIKSPDRLADINYEGRLEAVSRKQGAQFKEYRPETGSWVFKVSHFSKYGLQDSDEEEEEHPSKTSTKKLKTAPLPPASQTTPLQMALNGKPAPPPQSQSPEVEQLGRVVELDSDMVDITQEPVLDTMLEESMPEDQEPVSASTHIASSLGINPHVLQIMKASLLTDEEDVDMALDQRFSRLPSKADTSQEICSPRLPISASHSSKTRSLVGGLLQSKFTSGAFLSPSVSVQECRTPRAASLMNIPSTSSWSVPPPLTSVFTMPSPAPEVPLKTVGTRRQLGLVPREKSVTYGKGKLLMDMALFMGRSFRVGWGPNWTLANSGEQLNGSHELENHQIADSMEFGFLPNPVAVKPLTESPFKVHLEKLSLRQRKPDEDMKLYQTPLELKLKHSTVHVDELCPLIVPNLGVAVIHDYADWVKEASGDLPEAQIVKHWSLTWTLCEALWGHLKELDSQLNEPREYIQILERRRAFSRWLSCTATPQIEEEVSLTQKNSPVEAVFSYLTGKRISEACSLAQQSGDHRLALLLSQFVGSQSVRELLTMQLVDWHQLQADSFIQDERLRIFALLAGKPVWQLSEKKQINVCSQLDWKRSLAIHLWYLLPPTASISRALSMYEEAFQNTSDSDRYACSPLPSYLEGSGCVIAEEQNSQTPLRDVCFHLLKLYSDRHYDLNQLLEPRSITADPLDYRLSWHLWEVLRALNYTHLSAQCEGVLQASYAGQLESEGLWEWAIFVLLHIDNSGIREKAVRELLTRHCQLLETPESWAKETFLTQKLRVPAKWIHEAKAVRAHMESDKHLEALCLFKAEHWNRCHKLIIRHLASDAIINENYDYLKGFLEDLAPPERSSLIQDWETSGLVYLDYIRVIEMLRHIQQVDCSGNDLEQLHIKVTSLCSRIEQIQCYSAKDRLAQSDMAKRVANLLRVVLSLHHPPDRTSDSTPDPQRVPLRLLAPHIGRLPMPEDYAMDELRSLTQSYLRELAVGSL

SEQ ID NO: 5049 - protein, 305 aa, Homo sapiens
MENSQLCKLFIGGLNVQTSESGLRGHFEAFGTLTDCVVVVNPQTKRSRCFGFVTYSNVEEADAAMAASPHAVDGNTVELKRAVSREDSARPGAHAKVKKLFVGGLKGDVAEGDLIEHFSQFGTVEKAEIIADKQSGKKRGFGFVYFQNHDAADKAAVVKFHPIQGHRVEVKKAVPKEDIYSGGGGGGSRSSRGGRGGRGRGGGRDQNGLSKGGGGGYNSYGGYGGGGGGGYNAYGGGGGGSSYGGSDYGNGFGGFGSYSQHQSSYGPMKSGGGGGGGGSSWGGRSNSGPYRGGYGGGGGYGGSSF

SEQ ID NO: 5050 - protein, 716 aa, Homo sapiens
MGETKIIYHLDGQETPYLVKLPLPAERVTLADFKGVLQRPSYKFFFKSMDDDFGVVKEEISDDNAKLPCFNGRVVSWLVSAEGSHPDPAPFCADNPSELPPPMERTGGIGDSRPPSFHPHAGGGSQENLDNDTETDSLVSAQRERPRRRDGPEHATRLNGTAKGERRREPGGYDSSSTLMSSELETTSFFDSDEDDSTSRFSSSTEQSSASRLMRRHKRRRRKQKVSRIERSSSFSSITDSTMSLNIITVTLNMEKYNFLGISIVGQSNERGDGGIYIGSIMKGGAVAADGRIEPGDMLLQVNEINFENMSNDDAVRVLREIVHKPGPITLTVAKCWDPSPRGCFTLPRSEPIRPIDPAAWVSHTAAMTGTFPAYGMSPSLSTITSTSSSITSSIPDTERLDDFHLSIHSDMAAIVKAMASPESGLEVRDRMWLKITIPNAFIGSDVVDWLYHNVEGFTDRREARKYASNLLKAGFIRHTVNKITFSEQCYYIFGDLCGNMANLSLHDHDGSSGASDQDTLAPLPHPGAAPWPMAFPYQYPPPPHPYNPHPGFPELGYSYGGGSASSQHSEGSRSSGSNRSGSDRRKEKDPKAGDSKSGGSGSESDHTTRSSLRGPRERAPSERSGPAASEHSHRSHHSLASSLRSHHTHPSYGPPGVPPLYGPPMLMMPPPPAAMGPPGAPPGRDLASVPPELTASRQSFRMAMGNPSEFFVDVM

SEQ ID NO: 5051 - protein, 714 aa, Homo sapiens
MASEAPSPPRSPPPPTSPEPELAQLRRKVEKLERELRSCKRQVREIEKLLHHTERLYQNAESNNQELRTQVEELSKILQRGRNEDNKKSDVEVQTENHAPWSISDYFYQTYYNDVSLPNKVTELSDQQDQAIETSILNSKDHLQVENDAYPGTDRTENVKYRQVDHFASNSQEPASALATEDTSLEGSSLAESLRAAAEAAVSQTGFSYDENTGLYFDHSTGFYYDSENQLYYDPSTGIYYYCDVESGRYQFHSRVDLQPYPTSSTKQSKDKKLKKKRKDPDSSATNEEKDLNSEDQKAFSVEHTSCNEEENFANMKKKAKIGIHHKNSPPKVTVPTSGNTIESPLHENISNSTSFKDEKIMETDSEPEEGEITDSQTEDSYDEAITSEGNVTAEDSEDEDEDKIWPPCIRVIVIRSPVLQIGSLFIITAVNPATIGREKDMEHTLRIPEVGVSKFHAEIYFDHDLQSYVLVDQGSQNGTIVNGKQILQPKTKCDPYVLEHGDEVKIGETVLSFHIHPGSDTCDGCEPGQVRAHLRLDKKDESFVGPTLSKEEKELERRKELKKIRVKYGLQNTEYEDEKTLKNPKYKDRAGKRREQVGSEGTFQRDDAPASVHSEITDSNKGRKMLEKMGWKKGEGLGKDGGGMKTPIQLQLRRTHAGLGTGKPSSFEDVHLLQNKNKKNWDKARERFTENFPETKPQKDDPGTMPWVKGTLE

SEQ ID NO: 5052 - protein, 293 aa, Homo sapiens
MALVSADSRIAELLTELHQLIKQTQEERSRSEHNLVNIQKTHERMQTENKISPYYRTKLRGLYTTAKADAEAECNILRKALDKIAEIKSLLEERRIAAKIAGLYNDSEPPRKTMRRGVLMTLLQQSAMTLPLWIGKPGDKPPPLCGAIPASGDYVARPGDKVAARVKAVDGDEQWILAEVVSYSHATNKYEVDDIDEEGKERHTLSRRRVIPLPQWKANPETDPEALFQKEQLVLALYPQTTCFYRALIHAPPQRPQDDYSVLFEDTSYADGYSPPLNVAQRYVVACKEPKKK

SEQ ID NO: 5053 - protein, 152 aa, Homo sapiens
MAGLPRRIIKETQRLLAEPVPGIKAEPDESNARYFHVVIAGPQDSPFEGGTFKLELFLPEEYPMAAPKVRFMTKIYHPNVDKLGRICLDILKDKWSPALQIRTVLLSIQALLSAPNPDDPLANDVAEQWKTNEAQAIETARAWTRLYAMNNI

SEQ ID NO: 5054 - protein, 330 aa, Homo sapiens
MPGPATDAGKIPFCDAKEEIRAGLESSEGGGGPERPGARGQRQNIVWRNVVLMSLLHLGAVYSLVLIPKAKPLTLLWAYFCFLLAALGVTAGAHRLWSHRSYRAKLPLRIFLAVANSMAFQNDIFEWSRDHRAHHKYSETDADPHNARRGFFFSHIGWLFVRKHRDVIEKGRKLDVTDLLADPVVRIQRKYYKISVVLMCFVVPTLVPWYIWGESLWNSYFLASILRYTISLNISWLVNSAAHMYGNRPYDKHISPRQNPLVALGAIGEGFHNYHHTFPFDYSASEFGLNFNPTTWFIDFMCWLGLATDRKRATKPMIEARKARTGDSSA

SEQ ID NO: 5055 - protein, 440 aa, Homo sapiens
MTVARPSVPAALPLLGELPRLLLLVLLCLPAVWGDCGLPPDVPNAQPALEGRTSFPEDTVITYKCEESFVKIPGEKDSVICLKGSQWSDIEEFCNRSCEVPTRLNSASLKQPYITQNYFPVGTVVEYECRPGYRREPSLSPKLTCLQNLKWSTAVEFCKKKSCPNPGEIRNGQIDVPGGILFGATISFSCNTGYKLFGSTSSFCLISGSSVQWSDPLPECREIYCPAPPQIDNGIIQGERDHYGYRQSVTYACNKGFTMIGEHSIYCTVNNDEGEWSGPPPECRGKSLTSKVPPTVQKPTTVNVPTTEVSPTSQKTTTKTTTPNAQATRSTPVSRTTKHFHETTPNKGSGTTSGTTRLLSGSRPVTQAGMRWCDRSSLQSRTPGFKRSFHFSLPSSWYYRAHVFHVDRFAWDASNHGLADLAKEELRRKYTQVYRLFLVS

SEQ ID NO: 5056 - protein, 552 aa, Homo sapiens
MSLSRSEEMHRLTENVYKTIMEQFNPSLRNFIAMGKNYEKALAGVTYAAKGYFDALVKMGELASESQGSKELGDVLFQMAEVHRQIQNQLEEMLKSFHNELLTQLEQKVELDSRYLSAALKKYQTEQRSKGDALDKCQAELKKLRKKSQGSKNPQKYSDKELQYIDAISNKQGELENYVSDGYKTALTEERRRFCFLVEKQCAVAKNSAAYHSKGKELLAQKLPLWQQACADPSKIPERAVQLMQQVASNGATLPSALSASKSNLVISDPIPGAKPLPVPPELAPFVGRMSAQESTPIMNGVTGPDGEDYSPWADRKAAQPKSLSPPQSQSKLSDSYSNTLPVRKSVTPKNSYATTENKTLPRSSSMAAGLERNGRMRVKAIFSHAAGDNSTLLSFKEGDLITLLVPEARDGWHYGESEKTKMRGWFPFSYTRVLDSDGSDRLHMSLQQGKSSSTGNLLDKDDLAIPPPDYGAASRAFPAQTASGFKQRPYSVAVPAFSQGLDDYGARSMSRNPFAHVQLKPTVTNDRCDLSAQGPEGREHGDGSARTLAGR

SEQ ID NO: 5057 - protein, 351 aa, Homo sapiens
MSLVCLTDFQAHAREQLSKSTRDFIEGGADDSITRDDNIAAFKRIRLRPRYLRDVSEVDTRTTIQGEEISAPICIAPTGFHCLVWPDGEMSTARAAQAAGICYITSTFASCSLEDIVIAAPEGLRWFQLYVHPDLQLNKQLIQRVESLGFKALVITLDTPVCGNRRHDIRNQLRRNLTLTDLQSPKKGNAIPYFQMTPISTSLCWNDLSWFQSITRLPIILKGILTKEDAELAVKHNVQGIIVSNHGGRQLDEVLASIDALTEVVAAVKGKIEVYLDGGVRTGNDVLKALALGAKCIFLGRPILWGLACKGEHGVKEVLNILTNEFHTSMALTGCRSVAEINRNLVQFSRL

SEQ ID NO: 5058 - protein, 295 aa, Homo sapiens
METCAGPHPLRLFLCRMQLCLALLLGPWRPGTAEEVILLDSKASQAELGWTALPSNGWEEISGVDEHDRPIRTYQVCNVLEPNQDNWLQTGWISRGRGQRIFVELQFTLRDCSSIPGAAGTCKETFNVYYLETEADLGRGRPRLGGSRPRKIDTIAADESFTQGDLGERKMKLNTEVREIGPLSRRGFHLAFQDVGACVALVSVRVYYKQCRATVRGLATFPATAAESAFSTLVEVAGTCVAHSEGEPGSPPRMHCGADGEWLVPVGRCSCSAGFQERGDFCEGIQLAGGRGVGV

SEQ ID NO: 5059 - protein, 217 aa, Homo sapiens
MAPGSRTSLLLAFALLCLPWLQEAGAVQTVPLSRLFDHAMLQAHRAHQLAIDTYQEFEETYIPKDQKYSFLHDSQTSFCFSDSIPTPSNMEETQQKSNLELLRISLLLIESWLEPVRFLRSMFANNLVYDTSDSDDYHLLKDLEEGIQTLMGRLEDGSRRTGQILKQTYSKFDTNSHNHDALLKNYGLLYCFRKDMDKVETFLRMVQCRSVEGSCGF

SEQ ID NO: 5060 - protein, 1132 aa, Homo sapiens
MKEICRICARELCGNQRRWIFHTASKLNLQVLLSHVLGKDVPRDGKAEFACSKCAFMLDRIYRFDTVIARIEALSIERLQKLLLEKDRLKFCIASMYRKNNDDSGAEIKAGNGTVDMSVLPDARYSALLQEDFAYSGFECWVENEDQIQEPHSCHGSEGPGNRPRRCRGCAALRVADSDYEAICKVPRKVARSISCGPSSRWSTSICTEEPALSEVGPPDLASTKVPPDGESMEEETPGSSVESLDASVQASPPQQKDEETERSAKELGKCDCCSDDQAPQHGCNHKLELALSMIKGLDYKPIQSPRGSRLPIPVKSSLPGAKPGPSMTDGVSSGFLNRSLKPLYKTPVSYPLELSDLQELWDDLCEDYLPLRVQPMTEELLKQQKLNSHETTITQQSVSDSHLAELQEKIQQTEATNKILQEKLNEMSYELKCAQESSQKQDGTIQNLKETLKSRERETEELYQVIEGQNDTMAKLREMLHQSQLGQLHSSEGTSPAQQQVALLDLQSALFCSQLEIQKLQRVVRQKERQLADAKQCVQFVEAAAHESEQQKEASWKHNQELRKALQQLQEELQNKSQQLRAWEAEKYNEIRTQEQNIQHLNHSLSHKEQLLQEFRELLQYRDNSDKTLEANEMLLEKLRQRIHDKAVALERAIDEKFSALEEKEKELRQLRLAVRERDHDLERLRDVLSSNEATMQSMESLLRAKGLEVEQLSTTCQNLQWLKEEMETKFSRWQKEQESIIQQLQTSLHDRNKEVEDLSATLLCKLGPGQSEIAEELCQRLQRKERMLQDLLSDRNKQVLEHEMEIQGLLQSVSTREQESQAAAEKLVQALMERNSELQALRQYLGGRDSLMSQAPISNQQAEVTPTGRLGKQTDQGSMQIPSRDDSTSLTAKEDVSIPRSTLGDLDTVAGLEKELSNAKEELELMAKKERESQMELSALQSMMAVQEEELQVQAADMESLTRNIQIKEDLIKDLQMQLVDPEDIPAMERLTQEVLLLREKVASVESQGQEISGNRRQQLLLMLEGLVDERSRLNEALQAERQLYSSLVKFHAHPESSERDRTLQVELEGAQVLRSRLEEVLGRSLERLNRLETLAAIGGAAAGDDTEDTSTEFTDSIEEEAAHHSHQQL

SEQ ID NO: 5061 - protein, 963 aa, Homo sapiens
MAERGGAGGGPGGAGGGSGQRGSGVAQSPQQPPPQQQQQQPPQQPTPPKLAQATSSSSSTSAAAASSSSSSTSTSMAVAVASGSAPPGGPGPGRTPAPVQMNLYATWEVDRSSSSCVPRLFSLTLKKLVMLKEMDKDLNSVVIAVKLQGSKRILRSNEIVLPASGLVETELQLTFSLQYPHFLKRDANKLQIMLQRRKRYKNRTILGYKTLAVGLINMAEVMQHPNEGALVLGLHSNVKDVSVPVAEIKIYSLSSQPIDHEGIKSKLSDRSPDIDNYSEEEEESFSSEQEGSDDPLHGQDLFYEDEDLRKVKKTRRKLTSTSAITRQPNIKQKFVALLKRFKVSDEVGFGLEHVSREQIREVEEDLDELYDSLEMYNPSDSGPEMEETESILSTPKPKLKPFFEGMSQSSSQTEIGSLNSKGSLGKDTTSPMELAALEKIKSTWIKNQDDSLTETDTLEITDQDMFGDASTSLVVPEKVKTPMKSSKTDLQGSASPSKVEGVHTPRQKRSTPLKERQLSKPLSERTNSSDSERSPDLGHSTQIPRKVVYDQLNQILVSDAALPENVILVNTTDWQGQYVAELLQDQRKPVVCTCSTVEVQAVLSALLTRIQRYCNCNSSMPRPVKVAAVGGQSYLSSILRFFVKSLANKTSDWLGYMRFLIIPLGSHPVAKYLGSVDSKYSSSFLDSGWRDLFSRSEPPVSEQLDVAGRVMQYVNGAATTHQLPVAEAMLTCRHKFPDEDSYQKFIPFIGVVKVGLVEDSPSTAGDGDDSPVVSLTVPSTSPPSSSGLSRDATATPPSSPSMSSALAIVGSPNSPYGDVIGLQVDYWLGHPGERRREGDKRDASSKNTLKSVFRSVQVSRLPHSGEAQLSGTMAMTVVTKEKNKKVPTIFLSKKPREKEVDSKSQVIEGISRLICSAKQQQTMLRVSIDGVEWSDIKFFQLAAQWPTHVKHFPVGLFSGSKAT

SEQ ID NO: 5062 - protein, 195 aa, Homo sapiens
MSMTLGYWDIRGLAHAIRLLLEYTDSSYEEKKYTMGDAPDYDRSQWLNEKFKLGLDFPNLPYLIDGAHKITQSNAILCYIARKHNLCGETEEEKIRVDILENQAMDVSNQLARVCYSPDFEKLKPEYLEELPTMMQHFSQFLGKRPWFVGDKITFVDFLAYDVLDLHRIFEPNCLDAFPNLKDFISRFEVSCGIM

SEQ ID NO: 5063 - protein, 323 aa, Homo sapiens
MGSRVSREDFEWVYTDQPHADRRREILAKYPEIKSLMKPDPNLIWIIIMMVLTQLGAFYIVKDLDWKWVIFGAYAFGSCINHSMTLAIHEIAHNAAFGNCKAMWNRWFGMFANLPIGIPYSISFKRYHMDHHRYLGADGVDVDIPTDFEGWFFCTAFRKFIWVILQPLFYAFRPLFINPKPITYLEVINTVAQVTFDILIYYFLGIKSLVYMLAASLLGLGLHPISGHFIAEHYMFLKGHETYSYYGPLNLLTFNVGYHNEHHDFPNIPGKSLPLVRKIAAEYYDNLPHYNSWIKVLYDFVMDDTISPYSRMKRHQKGEMVLE

SEQ ID NO: 5064 - protein, 1411 aa, Homo sapiens
MSLSSGASGGKGVDANPVETYDSGDEWDIGVGNLIIDLDADLEKDQQKLEMSGSKEVGIPAPNAVATLPDNIKFVTPVPGPQGKEGKSKSKRSKSGKDTSKPTPGTSLFTPSEGAASKKEVQGRSGDGANAGGLVAAIAPKGSEKAAKASRSVAGSKKEKENSSSKSKKERSEGVGTCSEKDPGVLQPVPLGGRGGQYDGSAGVDTGAVEPLGSIAIEPGAALNPLGTKPEPEEGENECRLLKKVKSEKMESPVSTPAVLPIHLLVPVVNNDISSPCEQIMVRTRSVGVNTCDVALATEPECLGPCEPGTSVNLEGIVWQETEDGMLVVNVTWRNKTYVGTLLDCTRHDWAPPRFCDSPTSDLEMRNGRGRGKRMRPNSNTPVNETATASDSKGTSNSSKTRAGANSKGRRGSQNSSEHRPPASSTSEDVKASPSSANKRKNKPLSDMELNSSSEDSKGSKRVRTNSMGSATGPLPGTKVEPTVLDRNCPSPVLIDCPHPNCNKKYKHINGLKYHQAHAHTDDDSKPEADGDSEYGEEPILHADLGSCNGASVSQKGSLSPARSATPKVRLVEPHSPSPSSKFSTKGLCKKKLSGEGDTDLGALSNDGSDDGPSVMDETSNDAFDSLERKCMEKEKCKKPSSLKPEKIPSKSLKSARPIAPAIPPQQIYTFQTATFTAASPGSSSGLTATVAQAMPNSPQLKPIQPKPTVMGEPFTVNPALTPAKDKKKKDKKKKESSKELESPLTPGKVCRAEEGKSPFRESSGDGMKMEGLLNGSSDPHQSRLASIKAEADKIYSFTDNAPSPSIGGSSRLENTTPTQPLTPLHVVTQNGAEASSVKTNSPAYSDISDAGEDGEGKVDSVKSKDAEQLVKEGAKKTLFPPQPQSKDSPYYQGFESYYSPSYAQSSPGALNPSSQAGVESQALKTKRDEEPESIEGKVKNDICEEKKPELSSSSQQPSVIQQRPNMYMQSLYYNQYAYVPPYGYSDQSYHTHLLSTNTAYRQQYEEQQKRQSLEQQQRGVDKKAEMGLKEREAALKEEWKQKPSIPPTLTKAPSLTDLVKSGPGKAKEPGADPAKSVIIPKLDDSSKLPGQAPEGLKVKLSDASHLSKEASEAKTGAECGRQAEMDPILWYRQEAEPRMWTYVYPAKYSDIKSEDERWKEERDRKLKEERSRSKDSVPKEDGKESTSSDCKLPTSEESRLGSKEPRPSVHVPVSSPLTQHQSYIPYMHGYSYSQSYDPNHPSYRSMPAVMMQNYPGSYLPSSYSFSPYGSKVSGGEDADKARASPSVTCKSSSESKALDILQQHASHYKSKSPTISDKTSQERDRGGCGVVGGGGSCSSVGGASGGERSVDRPRTSPSQRLMSTHHHHHHLGYSLLPAQYNLPYAAGLSSTAIVASQQGSTPSLYPPPRR

SEQ ID NO: 5065 - protein, 984 aa, Homo sapiens
MAPGMSGRGGAALLCLSALLAHASGRSHPASPSPPGPQASPVLPVSYRLSHTRLAFFLREARPPSPAVANSSLQRSEPFVVFQTKELPVLNVSLGPFSTSQVVARELLQPSSTLDIPERLTVNWKVRAFIVRSHVPASQPVVQVLFYVAGRDWDDFGVTERLPCVRLHAFRDAREHPLLRIGSISLFRPPPRRTLQEHRLDSNLMIRLPDRPLKPGEVLSILLYLAPNSSSPSSPSVEHFTLRVKAKKGVTLLGTKSRSGQWHVTSELLTGAKHSTATVDVAWAQSTPLPPREGQGPLEILQLDFEMENFTSQSVKRRIMWHIDYRGHGALPDLERAVTELTVIQRDVQAILPLAMDTEIINTAILTGRTVAIPVKVIAIEVNGLVLDISALVECESDNEDIIKVSSSCDYVFVSGKESRGSMNARVTFRYDVLNAPLEMTVWVPKLPLHIELSDARLSQVKGWRVPILPDRRSVRESEDEDEEEEERRQSASRGCTLQYQHATLQVFTQFHTTSSEGTDQVVTMLGPDWLVEVTDLVSDFMRVGDPRVAHMVDSSTLAGLEPGTTPFKVVSPLTEAVLGETLLTVTEEKVSITQLQAQVVASLALSLRPSPGSSHTILATTAAQQTLSFLKQEALLSLWLSYSDGTTAPLSLYSPRDYGLLVSSLDEHVATVTQDRAFPLVVAEAEGSGELLRAELTIAESCQKTKRKSVLATTPVGLRVHFGRDEEDPTYDYPGPSQPGPGGGEDEARGAGPPGSALPAPEAPGPGTASPVVPPTEDFLPLPTGFLQVPRGLTDLEIGMYALLGVFCLAILVFLINCIVFVLRYRHKRIPPEGQTSMDHSHHWVFLGNGQPLRVQGELSPPAGNPLETVPAFCHGDHHSSGSSQTSVQSQVHGRGDGSSGGSARDQAEDPASSPTSKRKRVKFTTFTTLPSEELAYDSVPAGEEDEEEEEDLGWGCPDVAGPTRPTAPPDLHNYMRRIKEIA

SEQ ID NO: 5066 - protein, 1250 aa, Homo sapiens
MEQLSDEEIDHGAEEDSDKEDQDLDKMFGAWLGELDKLTQSLDSDKPMEPVKRSPLRQETNMANFSYRFSIYNLNEALNQGETVDLDALMADLCSIEQELSSIGSGNSKRQITETKATQKLPVSRHTLKHGTLKGLSSSSNRIAKPSHASYSLDDVTAQLEQASLSMDEAAQQSVLEDTKPLVTNQHRRTASAGTVSDAEVHSISNSSHSSITSAASSMDSLDIDKVTRPQELDLTHQGQPITEEEQAAKLKAEKIRVALEKIKEAQVKKLVIRVHMSDDSSKTMMVDERQTVRQVLDNLMDKSHCGYSLDWSLVETVSELQMERIFEDHENLVENLLNWTRDSQNKLIFMERIEKYALFKNPQNYLLGKKETAEMADRNKEVLLEECFCGSSVTVPEIEGVLWLKDDGKKSWKKRYFLLRASGIYYVPKGKAKVSRDLVCFLQLDHVNVYYGQDYRNKYKAPTDYCLVLKHPQIQKKSQYIKYLCCDDVRTLHQWVNGIRIAKYGKQLYMNYQEALKRTESAYDWTSLSSSSIKSGSSSSSIPESQSNHSNQSDSGVSDTQPAGHVRSQSIVSSVFSEAWKRGTQLEESSKARMESMNRPYTSLVPPLSPQPKIVTPYTASQPSPPLPPPPPPPPPPPPPPPPPPPPLPSQSAPSAGSAAPMFVKYSTITRLQNASQHSGALFKPPTPPVMQSQSVKPQILVPPNGVVPPPPPPPPPPTPGSAMAQLKPAPCAPSLPQFSAPPPPLKIHQVQHITQVAPPTPPPPPPIPAPLPPQAPPKPLVTIPAPTSTKTVAPVVTQAAPPTPTPPVPPAKKQPAFPASYIPPSPPTPPVPVPPPTLPKQQSFCAKPPPSPLSPVPSVVKQIASQFPPPPTPPAMESQPLKPVPANVAPQSPPAVKAKPKWQPSSIPVPSPDFPPPPPESSLVFPPPPPSPVPAPPPPPPPTASPTPDKSGSPGKKTSKTSSPGGKKPPPTPQRNSSIKSSSGAEHPEPKRPSVDSLVSKFTPPAESGSPSKETLPPPAAPPKPGKLNLSGVNLPGVLQQGCVSAKAPVLSGRGKDSVVEFPSPPSDSDFPPPPPETELPLPPIEIPAVFSGNTSPKVAVVNPQPQQWSKMSVKKAPPPTRPKRNDSTRLTQAEISEQPTMATVVPQVPTSPKSSLSVQPGFLADLNRTLQRKSITRHGSLSSRMSRAEPTATMDDMALPPPPPELLSDQQKAGYGGSHISGYATLRRGPPPAPPKRDQNTKLSRDW

SEQ ID NO: 5067 - protein, 620 aa, Homo sapiens
MAAATADPGAGNPQPGDSSGGGAGGGLPSPGEQELSRRLQRLYPAVNQQETPLPRSWSPKDKYNYIGLSQGNLRVHYKGHGKNHKDAASVRATHPIPAACGIYYFEVKIVSKGRDGYMGIGLSAQGVNMNRLPGWDKHSYGYHGDDGHSFCSSGTGQPYGPTFTTGDVIGCCVNLINGTCFYTKNGHSLGIAFTDLPANLYPTVGLQTPGEIVDANFGQQPFLFDIEDYMREWRAKVQGTVHCFPISARLGEWQAVLQNMVSSYLVHHGYCATATAFARMTETPIQEEQASIKNRQKIQKLVLEGRVGEAIETTQRFYPGLLEHNPNLLFMLKCRQFVEMVNGTDSEVRSLSSRSPKSQDSYPGSPSLSPRHGPSSSHMHNTGADSPSCSNGVASTKSKQNHSKYPAPSSSSSSSSSSSSSSPSSVNYSESNSTDSTKSQHHSSTSNQETSDSEMEMEAEHYPNGVLGSMSTRIVNGAYKHEDLQTDESSMDDRHPRRQLCGGNQAATERIILFGRELQALSEQLGREYGKNLAHTEMLQDAFSLLAYSDPWSCPVGQQLDPIQREPVCAALNSAILESQNLPKQPPLMLALGQASECLRLMARAGLGSCSFARVDDYLH

SEQ ID NO: 5068 - protein, 561 aa, Homo sapiens
MANMNSDSRHLGTSEVDHERDPGPMNIQFEPSDLRSKRPFCIEPTNIVNVNHVIQRVSDHASAMNKRIHYYSRLTTPADKALIAPDHVVPAPEECYVYSPLGSAYKLQSYTEGYGKNTSLVTIFMIWNTMMGTSILSIPWGIKQAGFTTGMCVIILMGLLTLYCCYRVVKSRTMMFSLDTTSWEYPDVCRHYFGSFGQWSSLLFSLVSLIGAMIVYWVLMSNFLFNTGKFIFNFIHHINDTDTILSTNNSNPVICPSAGSGGHPDNSSMIFYANDTGAQQFEKWWDKSRTVPFYLVGLLLPLLNFKSPSFFSKFNILGTVSVLYLIFLVTFKAVRLGFHLEFHWFIPTEFFVPEIRFQFPQLTGVLTLAFFIHNCIITLLKNNKKQENNVRDLCIAYMLVTLTYLYIGVLVFASFPSPPLSKDCIEQNFLDNFPSSDTLSFIARIFLLFQMMTVYPLLGYLARVQLLGHIFGDIYPSIFHVLILNLIIVGAGVIMACFYPNIGGIIRYSGAACGLAFVFIYPSLIYIISLHQEERLTWPKLIFHVFIIILGVANLIVQFFM

SEQ ID NO: 5069 - protein, 516 aa, Homo sapiens
MWALRAAVRPGLRLSRVGRGRSAPRAAAPSCPARALAAVGRRSPGNLEGPWGGGRGLRADGGRSRTGDDEEEPEDADENAEEELLRGEPLLPAGTQRVCLVHPDVKWGPGKSQMTRAEWQVAEATALVHTLDGWSVVQTMVVSTKTPDRKLIFGKGNFEHLTEKIRGSPDITCVFLNVERMAAPTKKELEAAWGVEVFDRFTVVLHIFRCNARTKEARLQVALAEMPLHRSNLKRDVAHLYRGVGSRYIMGSGESFMQLQQRLLREKEAKIRKALDRLRKKRHLLRRQRTRREFPVISVVGYTNCGKTTLIKALTGDAAIQPRDQLFATLDVTAHAGTLPSRMTVLYVDTIGFLSQLPHGLIESFSATLEDVAHSDLILHVRDVSHPEAELQKCSVLSTLRGLQLPAPLLDSMVEVHNKVDLVPGYSPTEPNVVPVSALRGHGLQELKAELDAAVLKATGRQILTLRVRLAGAQLSWLYKEATVQEVDVIPEDGAADVRVIISNSAYGKFRKLFPG

SEQ ID NO: 5070 - protein, 203 aa, Homo sapiens
METLSQDSLLECQICFNYYSPRRRPKLLDCKHTCCSVCLQQMRTSQKDVRCPWCRGVTKLPPGFSVSQLPDDPEVLAVIAIPHTSEHTPVFIKLPSNGCYMLPLPISKERALLPGDMGCRLLPGSQQKSVTVVTIPAEQQPLQGGAPQEAVEEEQDRRGVVKSSTWSGVCTVILVACVLVFLLGIVLHNMSCISKRFTVISCG

SEQ ID NO: 5071 - protein, 80 aa, Homo sapiens
MKVFFLFAVLFCLVQTNSGDVPLGIRNTICRMQQGICRLFFCHSGEKKRDISSDPWNRCCVSNTDEEGKEKPEMDGRSGI

SEQ ID NO: 5072 - protein, 480 aa, Homo sapiens
MNGEEEFFDAVTGFDSDNSSGEFSEANQKVTGMIDLDTSKNNRIGKTGERPSQENGIQKHRTSLPAPMFSRSDFSVWTILKKCVGLELSKITMPIAFNEPLSFLQRITEYMEHVYLIHRASCQPQPLERMQSVAAFAVSAVASQWERTGKPFNPLLGETYELIREDLGFRFISEQVSHHPPISAFHSEGLNHDFLFHGSIYPKLKFWGKSVEAEPRGTITLELLKHNEAYTWTNPTCCVHNVIIGKLWIEQYGTVEILNHRTGHKCVLHFKPCGLFGKELHKVEGHIQDKNKKKLFMIYGKWTECLWGIDPVSYESFKKQERRGDHLRKAKLDEDSGKADSDVADDVPVAQETVQVIPGSKLLWRINTRPPNSAQMYNFTSFTVSLNELETGMEKTLPPTDCRLRPDIRGMENGNMDLASQEKERLEEKQREARRERAKEEAEWQTRWFYPGNNPYTGTPDWLYAGDYFERNFSDCPDIY

SEQ ID NO: 5073 - protein, 975 aa, Homo sapiens
MDLNSASTVVLQVLTQATSQDTAVLKPAEEQLKQWETQPGFYSVLLNIFTNHTLDINVRWLAVLYFKHGIDRYWRRVAPHALSEEEKTTLRAGLITNFNEPINQIATQIAVLIAKVARLDCPRQWPELIPTLIESVKVQDDLRQHRALLTFYHVTKTLASKRLAADRKLFYDLASGIYNFACSLWNHHTDTFLQEVSSGNEAAILSSLERTLLSLKVLRKLTVNGFVEPHKNMEVMGFLHGIFERLKQFLECSRSIGTDNVCRDRLEKTIILFTKVLLDFLDQHPFSFTPLIQRSLEFSVSYVFTEVGEGVTFERFIVQCMNLIKMIVKNYAYKPSKNFEDSSPETLEAHKIKMAFFTYPTLTEICRRLVSHYFLLTEEELTMWEEDPEGFTVEETGGDSWKYSLRPCTEVLFIDIFHEYNQTLTPVLLEMMQTLQGPTNVEDMNALLIKDAVYNAVGLAAYELFDSVDFDQWFKNQLLPELQVIHNRYKPLRRRVIWLIGQWISVKFKSDLRPMLYEAICNLLQDQDLVVRIETATTLKLTVDDFEFRTDQFLPYLETMFTLLFQLLQQVTECDTKMHVLHVLSCVIERVNMQIRPYVGCLVQYLPLLWKQSEEHNMLRCAILTTLIHLVQGLGADSKNLYPFLLPVIQLSTDVSQPPHVYLLEDGLELWLVTLENSPCITPELLRIFQNMSPLLELSSENLRTCFKIINGYIFLSSTEFLQTYAVGLCQSFCELLKEITTEGQVQVLKVVENALKVNPILGPQMFQPILPYVFKGIIEGERYPVVMSTYLGVMGRVLLQNTSFFSSLLNEMAHKFNQEMDQLLGNMIEMWVDRMDNITQPERRKLSALALLSLLPSDNSVIQDKFCGIINISVEGLHDVMTEDPETGTYKDCMLMSHLEEPKVTEDEEPPTEQDKRKKMLALKDPVHTVSLQQFIYEKLKAQQEMLGEQGFQSLMETVDTEIVTQLQEFLQGF

SEQ ID NO: 5074 - protein, 613 aa, Homo sapiens
MGALRPTLLPPSLPLLLLLMLGMGCWAREVLVPEGPLYRVAGTAVSISCNVTGYEGPAQQNFEWFLYRPEAPDTALGIVSTKDTQFSYAVFKSRVVAGEVQVQRLQGDAVVLKIARLQAQDAGIYECHTPSTDTRYLGSYSGKVELRVLPDVLQVSAAPPGPRGRQAPTSPPRMTVHEGQELALGCLARTSTQKHTHLAVSFGRSVPEAPVGRSTLQEVVGIRSDLAVEAGAPYAERLAAGELRLGKEGTDRYRMVVGGAQAGDAGTYHCTAAEWIQDPDGSWAQIAEKRAVLAHVDVQTLSSQLAVTVGPGERRIGPGEPLELLCNVSGALPPAGRHAAYSVGWEMAPAGAPGPGRLVAQLDTEGVGSLGPGYEGRHIAMEKVASRTYRLRLEAARPGDAGTYRCLAKAYVRGSGTRLREAASARSRPLPVHVREEGVVLEAVAWLAGGTVYRGETASLLCNISVRGGPPGLRLAASWWVERPEDGELSSVPAQLVGGVGQDGVAELGVRPGGGPVSVELVGPRSHRLRLHSLGPEDEGVYHCAPSAWVQHADYSWYQAGSARSGPVTVYPYMHALDTLFVPLLVGTGVALVTGATVLGTITCCFMKRLRKR

SEQ ID NO: 5075 - protein, 214 aa, Homo sapiens
MNCKEGTDSSCGCRGNDEKKMLKCVVVGDGAVGKTCLLMSYANDAFPEEYVPTVFDHYAVTVTVGGKQHLLGLYDTAGQEDYNQLRPLSYPNTDVFLICFSVVNPASYHNVQEEWVPELKDCMPHVPYVLIGTQIDLRDDPKTLARLLYMKEKPLTYEHGVKLAKAIGAQCYLECSALTQKGLKAVFDEAILTIFHPKKKKKRCSEGHSCCSII

SEQ ID NO: 5076 - protein, 270 aa, Homo sapiens
MVLLKEYRVILPVSVDEYQVGQLYSVAEASKNETGGGEGVEVLVNEPYEKDGEKGQYTHKIYHLQSKVPTFVRMLAPEGALNIHEKAWNAYPYCRTVITNEYMKEDFLIKIETWHKPDLGTQENVHKLEPEAWKHVEAVYIDIADRSQVLSKDYKAEEDPAKFKSIKTGRGPLGPNWKQELVNQKDCPYMCAYKLVTVKFKWWGLQNKVENFIHKQERRLFTNFHRQLFCWLDKWVDLTMDDIRRMEEETKRQLDEMRQKDPVKGMTADD

SEQ ID NO: 5077 - protein, 739 aa, Homo sapiens
MATLPAEPSAGPAAGGEAVAAAAATEEEEEEARQLLQTLQAAEGEAAAAAGAGAGAAAAGAEGPGSPGVPGSPPEAASEPPTGLRFSPEQVACVCEALLQAGHAGRLSRFLGALPPAERLRGSDPVLRARALVAFQRGEYAELYRLLESRPFPAAHHAFLQDLYLRARYHEAERARGRALGAVDKYRLRKKFPLPKTIWDGEETVYCFKERSRAALKACYRGNRYPTPDEKRRLATLTGLSLTQVSNWFKNRRQRDRTGAGGGAPCKSESDGNPTTEDESSRSPEDLERGAAPVSAEAAAQGSIFLAGTGPPAPCPASSSILVNGSFLAASGSPAVLLNGGPVIINGLALGEASSLGPLLLTGGGGAPPPQPSPQGASETKTSLVLDPQTGEVRLEEAQSEAPETKGAQVAAPGPALGEEVLGPLAQVVPGPPTAATFPLPPGPVPAVAAPQVVPLSPPPGYPTGLSPTSPLLNLPQVVPTSQVVTLPQAVGPLQLLAAGPGSPVKVAAAAGPANVHLINSGVGVTALQLPSATAPGNFLLANPVSGSPIVTGVALQQGKIILTATFPTSMLVSQVLPPAPGLALPLKPETAISVPEGGLPVAPSPALPEAHALGTLSAQQPPPAAATTSSTSLPFSPDSPGLLPNFPAPPPEGLMLSPAAVPVWSAGLELSAGTEGLLEAEKGLGTQAPHTVLRLPDPDPEGLLLGATAGGEVDEGLEAEAKVLTQLQSVPVEEPLEL

SEQ ID NO: 5078 - protein, 68 aa, Homo sapiens
MPKHEFSVDMTCGGCAEAVSRVLNKLGGVKYDIDLPNKKVCIESEHSMDTLLATLKKTGKTVSYLGLE

SEQ ID NO: 5079 - protein, 1599 aa, Homo sapiens
MNKAPQSTGPPPAPSPGLPQPAFPPGQTAPVVFSTPQATQMNTPSQPRQHFYPSRAQPPSSAASRVQSAAPARPGPAAHVYPAGSQVMMIPSQISYPASQGAYYIPGQGRSTYVVPTQQYPVQPGAPGFYPGASPTEFGTYAGAYYPAQGVQQFPTGVAPTPVLMNQPPQIAPKRERKTIRIRDPNQGGKDITEEIMSGARTASTPTPPQTGGGLEPQANGETPQVAVIVRPDDRSQGAIIADRPGLPGPEHSPSESQPSSPSPTPSPSPVLEPGSEPNLAVLSIPGDTMTTIQMSVEESTPISRETGEPYRLSPEPTPLAEPILEVEVTLSKPVPESEFSSSPLQAPTPLASHTVEIHEPNGMVPSEDLEPEVESSPELAPPPACPSESPVPIAPTAQPEELLNGAPSPPAVDLSPVSEPEEQAKEVTASMAPPTIPSATPATAPSATSPAQEEEMEEEEEEEEGEAGEAGEAESEKGGEELLPPESTPIPANLSQNLEAAAATQVAVSVPKRRRKIKELNKKEAVGDLLDAFKEANPAVPEVENQPPAGSNPGPESEGSGVPPRPEEADETWDSKEDKIHNAENIQPGEQKYEYKSDQWKPLNLEEKKRYDREFLLGFQFIFASMQKPEGLPHISDVVLDKANKTPLRPLDPTRLQGINCGPDFTPSFANLGRTTLSTRGPPRGGPGGELPRGPAGLGPRRSQQGPRKEPRKIIATVLMTEDIKLNKAEKAWKPSSKRTAADKDRGEEDADGSKTQDLFRRVRSILNKLTPQMFQQLMKQVTQLAIDTEERLKGVIDLIFEKAISEPNFSVAYANMCRCLMALKVPTTEKPTVTVNFRKLLLNRCQKEFEKDKDDDEVFEKKQKEMDEAATAEERGRLKEELEEARDIARRRSLGNIKFIGELFKLKMLTEAIMHDCVVKLLKNHDEESLECLCRLLTTIGKDLDFEKAKPRMDQYFNQMEKIIKEKKTSSRIRFMLQDVLDLRGSNWVPRRGDQGPKTIDQIHKEAEMEEHREHIKVQQLMAKGSDKRRGGPPGPPISRGLPLVDDGGWNTVPISKGSRPIDTSRLTKITKPGSIDSNNQLFAPGGRLSWGKGSSGGSGAKPSDAASEAARPATSTLNRFSALQQAVPTESTDNRRVVQRSSLSRERGEKAGDRGDRLERSERGGDRGDRLDRARTPATKRSFSKEVEERSRERPSQPEGLRKAASLTEDRDRGRDAVKREAALPPVSPLKAALSEEELEKKSKAIIEEYLHLNDMKEAVQCVQELASPSLLFIFVRHGVESTLERSAIAREHMGQLLHQLLCAGHLSTAQYYQGLYEILELAEDMEIDIPHVWLYLAELVTPILQEGGVPMGELFREITKPLRPLGKAASLLLEILGLLCKSMGPKKVGTLWREAGLSWKEFLPEGQDIGAFVAEQKVEYTLGEESEAPGQRALPSEELNRQLEKLLKEGSSNQRVFDWIEANLSEQQIVSNTLVRALMTAVCYSAIIFETPLRVDVAVLKARAKLLQKYLCDEQKELQALYALQALVVTLEQPPNLLRMFFDALYDEDVVKEDAFYSWESSKDPAEQQGKGVALKSVTAFFKWLREAEEESDHN

SEQ ID NO: 5080 - protein, 708 aa, Homo sapiens
MRERIWAPPLLLLLPLLLPPPLWGGPPDSPRRELELEPGPLQPFDLLYASGAAAYYSGDYERAVRDLEAALRSHRRLREIRTRCARHCAARHPLPPPPPGEGPGAELPLFRSLLGRARCYRSCETQRLGGPASRHRVSEDVRSDFQRRVPYNYLQRAYIKLNQLEKAVEAAHTFFVANPEHMEMQQNIENYRATAGVEALQLVDREAKPHMESYNAGVKHYEADDFEMAIRHFEQALREYFVEDTECRTLCEGPQRFEEYEYLGYKAGLYEAIADHYMQVLVCQHECVRELATRPGRLSPIENFLPLHYDYLQFAYYRVGEYVKALECAKAYLLCHPDDEDVLDNVDYYESLLDDSIDPASIEAREDLTMFVKRHKLESELIKSAAEGLGFSYTEPNYWIRYGGRQDENRVPSGVNVEGAEVHGFSMGKKLSPKIDRDLREGGPLLYENITFVYNSEQLNGTQRVLLDNVLSEEQCRELHSVASGIMLVGDGYRGKTSPHTPNEKFEGATVLKALKSGYEGRVPLKSARLFYDISEKARRIVESYFMLNSTLYFSYTHMVCRTALSGQQDRRNDLSHPIHADNCLLDPEANECWKEPPAYTFRDYSALLYMNDDFEGGEFIFTEMDAKTVTASIKPKCGRMISFSSGGENPHGVKAVTKGKRCAVALWFTLDPLYRELERIQADEVIAILDQEQQGKHELNINPKDEL

SEQ ID NO: 5081 - protein, 322 aa, Homo sapiens
MSGELPPNINIKEPRWDQSTFIGRANHFFTVTDPRNILLTNEQLESARKIVHDYRQGIVPPGLTENELWRAKYIYDSAFHPDTGEKMILIGRMSAQVPMNMTITGCMMTFYRTTPAVLFWQWINQSFNAVVNYTNRSGDAPLTVNELGTAYVSATTGAVATALGLNALTKHVSPLIGRFVPFAAVAAANCINIPLMRQRELKVGIPVTDENGNRLGESANAAKQAITQVVVSRILMAAPGMAIPPFIMNTLEKKAFLKRFPWMSAPIQVGLVGFCLVFATPLCCALFPQKSSMSVTSLEAELQAKIQESHPELRRVYFNKGL

SEQ ID NO: 5082 - protein, 356 aa, Homo sapiens
MSTMRLLTLALLFSCSVARAACDPKIVNIGAVLSTRKHEQMFREAVNQANKRHGSWKIQLNATSVTHKPNAIQMALSVCEDLISSQVYAILVSHPPTPNDHFTPTPVSYTAGFYRIPVLGLTTRMSIYSDKSIHLSFLRTVPPYSHQSSVWFEMMRVYSWNHIILLVSDDHEGRAAQKRLETLLEERESKSKKRNYENLDQLSYDNKRGPKAEKVLQFDPGTKNVTALLMEAKELEARVIILSASEDDAATVYRAAAMLNMTGSGYVWLVGEREISGNALRYAPDAHQRQERVGPHQRRRGRGGPGRARAPREGEHHRPAAGLRGQHQHLEDRAALQESADVFQVCGWGDWSRGVQ

SEQ ID NO: 5083 - protein, 689 aa, Homo sapiens [sequence omitted]

SEQ ID NO: 5084 - protein, 299 aa, Homo sapiens
MGGPRALLAALWALEAAGTAALRIGAFNIQSFGDSKVSDPACGSIIAKILAGYDLALVQEVRDPDLSAVSALMEQINSVSEHEYSFVSSQPLGRDQYKEMYLFVYRKDAVSVVDTYLYPDPEDVFSREPFVVKFSAPGTGERAPPLPSRRALTPPPLPAAAQNLVLIPLHAAPHQAVAEIDALYDVYLDVIDKWGTDDMLFLGDFNADCSYVRAQDWAAIRLRSSEVFKWLIPDSADTTVGNSDCAYDRIVACGARLRRSLKPQSATVHDFQEEFGLDQTQALAISDHFPVEVTLKFHR

SEQ ID NO: 5085 - protein, 481 aa, Homo sapiens
MRHSKRTHCPDWDSRESWGHESYRGSHKRKRRSHSSTQENRHCKPHHQFKESDCHYLEARSLNERDYRDRRYVDEYRNDYCEGYVPRHYHRDIESGYRIHCSKSSVRSRRSSPKRKRNRHCSSHQSRSKSHRRKRSRSIEDDEEGHLICQSGDVLRARYEIVDTLGEGAFGKVVECIDHGMDGMHVAVKIVKNVGRYREAARSEIQVLEHLNSTDPNSVFRCVQMLEWFDHHGHVCIVFELLGLSTYDFIKENSFLPFQIDHIRQMAYQICQSINFLHHNKLTHTDLKPENILFVKSDYVVKYNSKMKRDERTLKNTDIKVVDFGSATYDDEHHSTLVSTRHYRAPEVILALGWSQPCDVWSIGCILIEYYLGFTVFQTHDSKEHLAMMERILGPIPQHMIQKTRKRKYFHHNQLDWDEHSSAGRYVRRRCKPLKEFMLCHDEEHEKLFDLVRRMLEYDPTQRITLDEALQHPFFDLLKKK

SEQ ID NO: 5086 - protein, 188 aa, Homo sapiens
MEARFTRGKSALLERALARPRTEVSLSAFALLFSELVQHCQSRVFSVAELQSRLAALGRQVGARVLDALVAREKGARRETKVLGALLFVKGAVWKALFGKEADKLEQANDDARTFYIIEREPLINTYISVPKENSTLNCASFTAGIVEAVLTHSGFPAKVTAHWHKGTTLMIKFEEAVIARDRALEGR

SEQ ID NO: 5087 - protein, 453 aa, Homo sapiens
MKIFKCYFKHTLQQKVFILFLTLWLLSLLKLLNVRRLFPQKDIYLVEYSLSTSPFVRNRYTHVKDEVRYEVNCSGIYEQEPLEIGKSLEIRRRDIIDLEDDDVVAMTSDCDIYQTLRGYAQKLVSKEEKSFPIAYSLVVHKDAIMVERLIHAIYNQHNIYCIHYDRKAPDTFKVAMNNLAKCFSNIFIASKLEAVEYAHISRLQADLNCLSDLLKSSIQWKYVINLCGQDFPLKSNFELVSELKKLNGANMLETVKPPNSKLERFTYHHELRRVPYEYVKLPIRTNISKEAPPHNIQIFVGSAYFVLSQAFVKYIFNNSIVQDFFAWSKDTYSPDEHFWATLIRVPGIPGEISRSAQDVSDLQSKTRLVKWNYYEGFFYPSCTGSHLRSVCIYGAAELRWLIKDGHWFANKFDSKVDPILIKCLAEKLEEQQRDWITLPSEKLFMDRNLTTTS

SEQ ID NO: 5088 - protein, 435 aa, Homo sapiens
MLLGGPPRSPRSGTSPKGPWSSTGHVQFGKSPQTWPRRTRPRSPEPAAPSGVRGSTWTRRRDSPRRAGPTALSRYVGHLWMGRRPPSPEARGPVPRSSAASRARRSLASPGISPGPLTATIGGAVAGGGPRQGRAEAHKEVFPGQRVGKMAAPMELFCWSGGWGLPSVDLDSLAVLTYARFTGAPLKVHKISNPWQSPSGTLPALRTSHGEVISVPHKIITHLRKEVHTFWIDTKNYVEVTRKWYAEAMPFPLNFFLPGRMQRQYMERLQLLTGEHRPEDEEELEKELYREARECLTLLSQRLGSQKFFFGDAPASLDAFVFSYLALLLQAKLPSGKLQVHLRGLHNLCAYCTHILSLYFPWDGAEVPPQRQTPAGPETEEEPYRRRNQILSVLAGLAAMVGYALLSGIVSIQRATPARAPGTRTLGMAEEDEEE

SEQ ID NO: 5089 - protein, 2136 aa, Homo sapiens
MADVTARSLQYEYKANSNLVLQADRSLIDRTRRDEPTGEVLSLVGKLEGTRMGDKAQRTKPQMQEERRAKRRKRDEDRHDINKMKGYTLLSEGIDEMVGIIYKPKTKETRETYEVLLSFIQAALGDQPRDILCGAADEVLAVLKNEKLRDKERRKEIDLLLGQTDDTRYHVLVNLGKKITDYGGDKEIQNMDDNIDETYGVNVQFESDEEEGDEDVYGEVREEASDDDMEGDEAVVRCTLSANLVASGELMSSKKKDLHPRDIDAFWLQRQLSRFYDDAIVSQKKADEVLEILKTASDDRECENQLVLLLGFNTFDFIKVLRQHRMMILYCTLLASAQSEAEKERIMGKMEADPELSKFLYQLHETEKEDLIREERSRRERVRQSRMDTDLETMDLDQGGEALAPRQVLDLEDLVFTQGSHFMANKRCQLPDGSFRRQRKGYEEVHVPALKPKPFGSEEQLLPVEKLPKYAQAGFEGFKTLNRIQSKLYRAALETDENLLLCAPTGAGKTNVALMCMLREIGKHINMDGTINVDDFKIIYIAPMRSLVQEMVGSFGKRLATYGITVAELTGDHQLCKEEISATQIIVCTPEKWDIITRKGGERTYTQLVRLIILDEIHLLHDDRGPVLEALVARAIRNIEMTQEDVRLIGLSATLPNYEDVATFLRVDPAKGLFYFDNSFRPVPLEQTYVGITEKKAIKRFQIMNEIVYEKIMEHAGKNQVLVFVHSRKETGKTARAIRDMCLEKDTLGLFLREGSASTEVLRTEAEQCKNLELKDLLPYGFAIHHAGMTRVDRTLVEDLFADKHIQVLVSTATLAWGVNLPAHTVIIKGTQVYSPEKGRWTELGALDILQMLGRAGRPQYDTKGEGILITSHGELQYYLSLLNQQLPIESQMVSKLPDMLNAEIVLGNVQNAKDAVNWLGYAYLYIRMLRSPTLYGISHDDLKGDPLLDQRRLDLVHTAALMLDKNNLVKYDKKTGNFQVTELGRIASHYYITNDTVQTYNQLLKPTLSEIELFRVFSLSSEFKNITVREEEKLELQKLLERVPIPVKESIEEPSAKINVLLQAFISQLKLEGFALMADMVYVTQSAGRLMRAIFEIVLNRGWAQLTDKTLNLCKMIDKRMWQSMCPLRQFRKLPEEVVKKIEKKNFPFERLYDLNHNEIGELIRMPKMGKTIHKYVHLFPKLELSVHLQPITRSTLKVELTITPDFQWDEKVHGSSEAFWILVEDVDSEVILHHEYFLLKAKYAQDEHLITFFVPVFEPLPPQYFIRVVSDRWLSCETQLPVSFRHLILPEKYPPPTELLDLQPLPVSALRNSAFESLYQDKFPFFNPIQTQVFNTVYNSDDNVFVGAPTGSGKTICAEFAILRMLLQSSEGRCVYITPMEALAEQVYMDWYEKFQDRLNKKVVLLTGETSTDLKLLGKGNIIISTPEKWDILSRRWKQRKNVQNINLFVVDEVHLIGGENGPVLEVICSRMRYISSQIERPIRIVALSSSLSNAKDVAHWLGCSATSTFNFHPNVRPVPLELHIQGFNISHTQTRLLSMAKPVYHAITKHSPKKPVIVFVPSRKQTRLTAIDILTTCAADIQRQRFLHCTEKDLIPYLEKLSDSTLKETLLNGVGYLHEGLSPMERRLVEQLFSSGAIQVVVASRSLCWGMNVAAHLVIIMDTQYYNGKIHAYVDYPIYDVLQMVGHANRPLQDDEGRCVIMCQGSKKDFFKKFLYEPLPVESHLDHCMHDHFNAEIVTKTIENKQDAVDYLTWTFLYRRMTQNPNYYNLQGISHRHLSDHLSELVEQTLSDLEQSKCISIEDEMDVAPLNLGMIAAYYYINYTTIELFSMSLNAKTKVRGLIEIISNAAEYENIPIRHHEDNLLRQLAQKVPHKLNNPKFNDPHVKTNLLLQAHLSRMQLSAELQSDTEEILSKAIRLIQACVDVLSSNGWLSPALAAMELAQMVTQAMWSKDSYLKQLPHFTSEHIKRCTDKGVESVFDIMEMEDEERNALLQLTDSQIADVARFCNRYPNIELSYEVVDKDSIRSGGPVVVLVQLEREEEVTGPVIAPLFPQKREEGWWVVIGDAKSNSLISIKRLTLQQKAKVKLDFVAPATGAHNYTLYFMSDAYMGCDQEYKFSVDVKEAETDSDSD

SEQ ID NO: 5090 - protein, 1925 aa, Homo sapiens
MAPRAAGGAPLSARAAAASPPPFQTPPRCPVPLLLLLLLGAARAGALEIQRRFPSPTPTNNFALDGAAGTVYLAAVNRLYQLSGANLSLEAEAAVGPVPDSPLCHAPQLPQASCEHPRRLTDNYNKILQLDPGQGLVVVCGSIYQGFCQLRRRGNISAVAVRFPPAAPPAEPVTVFPSMLNVAANHPNASTVGLVLPPAAGAGGSRLLVGATYTGYGSSFFPRNRSLEDHRFENTPEIAIRSLDTRGDLAKLFTFDLNPSDDNILKIKQGAKEQHKLGFVSAFLHPSDPPPGAQSYAYLALNSEARAGDKESQARSLLARICLPHGAGGDAKKLTESYIQLGLQCAGGAGRGDLYSRLVSVFPARERLFAVFERPQGSPAARAAPAALCAFRFADVRAAIRAARTACFVEPAPDVVAVLDSVVQGTGPACERKLNIQLQPEQLDCGAAHLQHPLSILQPLKATPVFRAPGLTSVAVASVNNYTAVFLGTVNGRLLKINLNESMQVVSRRVVTVAYGEPVHHVMQFDPADSGYLYLMTSHQMARVKVAACNVHSTCGDCVGAADAYCGWCALETRCTLQQDCTNSSQQHFWTSASEGPSRCPAMTVLPSEIDVRQEYPGMILQISGSLPSLSGMEMACDYGNNIRTVARVPGPAFGHQIAYCNLLPRDQFPPFPPNQDHVTVEMSVRVNGRNIVKANFTIYDCSRTAQVYPHTACTSCLSAQWPCFWCSQQHSCVSNQSRCEASPNPTSPQDCPRTLLSPLAPVPTGGSQNILVPLANTAFFQGAALECSFGLEEIFEAVWVNESVVRCDQVVLHTTRKSQVFPLSLQLKGRPARFLDSPEPMTVMVYNCAMGSPDCSQCLGREDLGHLCMWSDGCRLRGPLQPMAGTCPAPEIHAIEPLSGPLDGGTLLTIRGRNLGRRLSDVAHGVWIGGVACEPLPDRYTVSEEIVCVTGPAPGPLSGVVTVNASKEGKSRDRFSYVLPLVHSLEPTMGPKAGGTRITIHGNDLHVGSELQVLVNDTDPCTELMRTDTSIACTMPEGALPAPVPVCVRFERRGCVHGNLTFWYMQNPVITAISPRRSPVSGGRTITVAGERFHMVQNVSMAVHHIGREPTLCKVLNSTLITCPSPGALSNASAPVDFFINGRAYADEVAVAEELLDPEEAQRGSRFRLDYLPNPQFSTAKREKWIKHHPGEPLTLVIHKEQDSLGLQSHEYRVKIGQVSCDIQIVSDRIIHCSVNESLGAAVGQLPITIQVGNFNQTIATLQLGGSETAIIVSIVICSVLLLLSVVALFVFCTKSRRAERYWQKTLLQMEEMESQIREEIRKGFAELQTDMTDLTKELNRSQGIPFLEYKHFVTRTFFPKCSSLYEERYVLPSQTLNSQGSSQAQETHPLLGEWKIPESCRPNMEEGISLFSSLLNNKHFLIVFVHALEQQKDFAVRDRCSLASLLTIALHGKLEYYTSIMKELLVDLIDASAAKNPKLMLRRTESVVEKMLTNWMSICMYSCLRETVGEPFFLLLCAIKQQINKGSIDAITGKARYTLSEEWLLRENIEAKPRNLNVSFQGCGMDSLSVRAMDTDTLTQVKEKILEAFCKNVPYSQWPRAEDVDLEWFASSTQSYILRDLDDTSVVEDGRKKLNTLAHYKIPEGASLAMSLIDKKDNTLGRVKDLDTEKYFHLVLPTDELAEPKKSHRQSHRKKVLPEIYLTRLLSTKGTLQKFLDDLFKAILSIREDKPPLAVKYFFDFLEEQAEKRGISDPDTLHIWKTNSLPLRFWVNILKNPQFVFDIDKTDHIDACLSVIAQAFIDACSISDLQLGKDSPTNKLLYAKEIPEYRKIVQRYYKQIQDMTPLSEQEMNAHLAEESRKYQNEFNTNVAMAEIYKYAKRYRPQIMAALEANPTARRTQLQHKFEQVVALMEDNIYECYSEA

SEQ ID NO: 5091 - protein, 170 aa, Homo sapiens
MPGGACVLVIALMFLAWGEAQECSPGGHQFLRSPYRSVRFDSWHLQQSAVQDLICDHSLSPGWYRFLILDRPAEMPTKCVEMNHCGTQAPIWLSLRDSETLPSPGEIKQLTACATWQFLFSTTKDCCLFQIPVSVRNCGNFSVYLLQPTQGCMGYCAEGFFAKIVKSPHT

SEQ ID NO: 5092 - protein, 757 aa, Homo sapiens
MSRKISKESKKVNISSSLESEDISLETTVPTDDISSSEEREGKVRITRQLIERKELLHNIQLLKIELSQKTMMIDNLKVDYLTKIEELEEKLNDALHQKQLLTLRLDNQLAFQQKDASKYQELMKQEMETILLRQKQLEETNLQLREKAGDVRRNLRDFELTEEQYIKLKAFPEDQLSIPEYVSVRFYELVNPLRKEICELQVKKNILAEELSTNKNQLKQLTETYEEDRKNYSEVQIRCQRLALELADTKQLIQQGDYRQENYDKVKSERDALEQEVIELRRKHEILEASHMIQTKERSELSKEVVTLEQTVTLLQKDKEYLNRQNMELSVRCAHEEDRLERLQAQLEESKKAREEMYEKYVASRDHYKTEYENKLHDELEQIRLKTNQEIDQLRNASREMYERENRNLREARDNAVAEKERAVMAEKDALEKHDQLLDRYRELQLSTESKVTEFLHQSKLKSFESERVQLLQEETARNLTQCQLECEKYQKKLEVLTKEFYSLQASSEKRITELQAQNSEHQARLDIYEKLEKELDEIIMQTAEIENEDEAERVLFSYGYGANVPTTAKRRLKQSVHLARRVLQLEKQNSLILKDLEHRKDQVTQLSQELDRANSLLNQTQQPYRYLIESVRQRDSKIDSLTESIAQLEKDVSNLNKEKSALLQTKNQMALDLEQLLNHREELAAMKQILVKMHSKHSENSLLLTKTEPKHVTENQKSKTLNVPKEHEDNIFTPKPTLFTKKEAPEWSKKQKMKT

SEQ ID NO: 5093 - protein, 211 aa, Homo sapiens
MKLWDVVAVCLVLLHTASAFPLPAGKRPPEAPAEDRSLGRRRAPFALSSDSNMPEDYPDQFDDVMDFIQATIKRLKRSPDKQMAVLPRRERNRQAAAANPENSRGKGRRGQRGKNRGCVLTAIHLNVTDLGLGYETKEELIFRYCSGSCDAAETTYDKILKNLSRNRRLVSDKVGQACCRPIAFDDDLSFLDDNLVYHILRKHSAKRCGCI

SEQ ID NO: 5094 - protein, 325 aa, Homo sapiens
MAAAAASLRGVVLGPRGAGLPGARARGLLCSARPGQLPLRTPQAVALSSKSGLSRGRKVMLSALGMLAAGGAGLAMALHSAVSASDLELHPPSYPWSHRGLLSSLDHTSIRRGFQVYKQVCASCHSMDFVAYRHLVGVCYTEDEAKELAAEVEVQDGPNEDGEMFMRPGKLFDYFPKPYPNSEAARAANNGALPPDLSYIVRARHGGEDYVFSLLTGYCEPPTGVSLREGLYFNPYFPGQAIAMAPPIYTDVLEFDDGTPATMSQIAKDVCTFLRWASEPEHDHRKRMGLKMLMMMALLVPLVYTIKRHKWSVLKSRKLAYRPPK

SEQ ID NO: 5095 - protein, 572 aa, Homo sapiens
MADFEELRNMVSSFRVSELQVLLGFAGRNKSGRKHDLLMRALHLLKSGCSPAVQIKIRELYRRRYPRTLEGLSDLSTIKSSVFSLDGGSSPVEPDLAVAGIHSLPSTSVTPHSPSSPVGSVLLQDTKPTFEMQQPSPPIPPVHPDVQLKNLPFYDVLDVLIKPTSLVQSSIQRFQEKFFIFALTPQQVREICISRDFLPGGRRDYTVQVQLRLCLAETSCPQEDNYPNSLCIKVNGKLFPLPGYAPPPKNGIEQKRPGRPLNITSLVRLSSAVPNQISISWASEIGKNYSMSVYLVRQLTSAMLLQRLKMKGIRNPDHSRALIKEKLTADPDSEIATTSLRVSLMCPLGKMRLTIPCRAVTCTHLQCFDAALYLQMNEKKPTWICPVCDKKAAYESLILDGLFMEILNDCSDVDEIKFQEDGSWCPMRPKKEAMKVSSQPCTKIESSSVLSKPCSVTVASEASKKKVDVIDLTIESSSDEEEDPPAKRKCIFMSETQSSPTKGVLMYQPSSVRVPSVTSVDPAAIPPSLTDYSVPFHHTPISSMSSDLPGEQRRNDINNELKLGTSSDTVQQ

SEQ ID NO: 5096 - protein, 525 aa, Homo sapiens
MLGKRKRVVLTIKDKLDIIKKLEEGISFKKLSVVYGIGESTVRDIKKNKERIINYANSSDPTSGVSKRKSMKSSTYEELDRVMIEWFNQQKTDGIPVSGTICAKQAKFFFDALGMEGDFNASSGWLTRFKQRHGIPKAAGKGTKLKGDETAAREFCGSFQEFVEKENLQPEQIYGADQTGLFWKCLPSRTLTLETDQSTSGCRSSRERIIIMCCANATGLHKLNLCVVGKAKKPRAFKGTDLSNLPVTYYSQKGAWIEQSVFRQWFEKYFVPQVQKHLKSKGLLEKAVLLLDFPPARPNEEMLSSDDGRIIVKYLPPNVTSLIQPMSQGVLATVKRYYRAGLLQKYMDEGNDPKIFWKNLTVLDAIYEVSRAWNMVKSSTITKAWKKLFPGNEENSGMNIDEGAILAANLATVLQNTEECEHVDIENIDQWFDSRSSDSSCQVLTDSESAEDQTKAAEQKPSSKSRKTELNPEKHISHKAALEWTENLLDYLEQQDDMLLSDKLVLRRLRTIIRKKQKIQNNKNH

SEQ ID NO: 5097 - protein, 252 aa, Homo sapiens
MGRLSWQVAAAAAVGLALTLEALPWVLRWLRSRRRRPRREALFFPSQVTCTEALLRAPGAELAELPEGCPCGLPHGESALSRLLRALLAARASLDLCLFAFSSPQLGRAVQLLHQRGVRVRVVTDCDYMALNGSQIGLLRKAGIQVRHDQDPGYMHHKFAIVDKRVLITGSLNWTTQAIQNNRENVLITEDDEYVRLFLEEFERIWEQFNPTKYTFFPPKKSHGSCAPPVSRAGGRLLSWHRTCGTSSESQT

SEQ ID NO: 5098 - protein, 513 aa, Homo sapiens
MWKASAGHAVSIAQDDAGADDWETDPDFVNDVSEKEQRWGAKTVQGSGHQEHINIHKLRENVFQEHQTLKEKELETGPKASHGYGGKFGVEQDRMDKSAVGHEYQSKLSKHCSQVDSVRGFGGKFGVQMDRVDQSAVGFEYQGKTEKHASQKDYSSGFGGKYGVQADRVDKSAVGFDYQGKTEKHESQRDYSKGFGGKYGIDKDKVDKSAVGFEYQGKTEKHESQKDYVKGFGGKFGVQTDRQDKCALGWDHQEKLQLHESQKDYSKGFGGKYGVQKDRMDKNASTFEDVTQVSSAYQKTVPVEAVTSKTSNIRANFENLAKEKEQEDRRKAEAERAQRMAKERQEQEEARRKLEEQARAKTQTPPVSPAPQPTEERLPSSPVYEDAASFKAELSYRGPVSGTEPEPVYSMEAADYREASSQQGLAYATEAVYESAEAPGHYPAEDSTYDEYENDLGITAVALYDYQAAGDDEISFDPDDIITNIEMIDDGWWRGVCKGRYGLFPANYVELRQ

SEQ ID NO: 5099 - protein, 582 aa, Homo sapiens
MFPAGPPSHSLLRLPLLQLLLLVVQAVGRGLGRASPAGGPLEDVVIERYHIPRACPREVQMGDFVRYHYNGTFEDGKKFDSSYDRNTLVAIVVGVGRLITGMDRGLMGMCVNERRRLIVPPHLGYGSIGLAGLIPPDATLYFDVVLLDVWNKEDTVQVSTLLRPPHCPRMVQDGDFVRYHYNGTLLDGTSFDTSYSKGGTYDTYVGSGWLIKGMDQGLLGMCPGERRKIIIPPFLAYGEKGYGTVIPPQASLVFHVLLIDVHNPKDAVQLETLELPPGCVRRAGAGDFMRYHYNGSLMDGTLFDSSYSRNHTYNTYIGQGYIIPGMDQGLQGACMGERRRITIPPHLAYGENGTGDKIPGSAVLIFNVHVIDFHNPADVVEIRTLSRPSETCNETTKLGDFVRYHYNCSLLDGTQLFTSHDYGAPQEATLGANKVIEGLDTGLQGMCVGERRQLIVPPHLAHGESGARGVPGSAVLLFEVELVSREDGLPTGYLFVWHKDPPANLFEDMDLNKDGEVPPEEFSTFIKAQVSEGKGRLMPGQDPEKTIGDMFQNQDRNQDGKITVDELKLKSDEDEERVHEEL

SEQ ID NO: 5100 - protein, 542 aa, Homo sapiens
MKMMHMAHCVTLVQLSISCDHLIDKDIGSKSDPLCVLLQDVGGGSWAELGRTERVRNCSSPEFSKTLQLEYRFETVQKLRFGIYDIDNKTPELRDDDFLGGAECSLGQIVSSQVLTLPLMLKPGKPAGRGTITVSAQELKDNRVVTMEVEARNLDKKDFLGKSDPFLEFFRQGDGKWHLVYRSEVIKNNLNPTWKRFSVPVQHFCGGNPSTPIQVQCSDYDSDGSHDLIGTFHTSLAQLQAVPAEFECIHPEKQQKKKSYKNSGTIRVKICRVETEYSFLDYVMGGCQINFTVGVDFTGSNGDPSSPDSLHYLSPTGVNEYLMALWSVGSVVQDYDSDKLFPAFGFGAQVPPDWQVSHEFALNFNPSNPYCAGIQGIVDAYRQALPQVRLYGPTNFAPIINHVARFAAQAAHQGTASQYFMLLLLTDGAVTDVEATREAVVRASNLPMSVIIVGVGGADFEAMEQLDADGGPLHTRSGQAAARDIVQFVPYRRFQNAPREALAQTVLAEVPTQLVSYFRAQGWAPLKPLPPSAKDPAQAPQA

SEQ ID NO: 5101 - protein, 146 aa, Homo sapiens
MTMRSLLRTPFLCGLLWAFCAPGARAEEPAASFSQPGSMGLDKNTVHDQEHIMEHLEGVINKPEAEMSPQELQLHYFKMHDYDGNNLLDGLELSTAITHVHKEEGSEQAPLMSEDELINIIDGVLRDDDKNNDGYIDYAEFAKSLQ

SEQ ID NO: 5102 - protein, 1408 aa, Homo sapiens
MKAPAVLAPGILVLLFTLVQRSNGECKEALAKSEMNVNMKYQLPNFTAETPIQNVILHEHHIFLGATNYIYVLNEEDLQKVAEYKTGPVLEHPDCFPCQDCSSKANLSGGVWKDNINMALVVDTYYDDQLISCGSVNRGTCQRHVFPHNHTADIQSEVHCIFSPQIEEPSQCPDCVVSALGAKVLSSVKDRFINFFVGNTINSSYFPDHPLHSISVRRLKETKDGFMFLTDQSYIDVLPEFRDSYPIKYVHAFESNNFIYFLTVQRETLDAQTFHTRIIRFCSINSGLHSYMEMPLECILTEKRKKRSTKKEVFNILQAAYVSKPGAQLARQIGASLNDDILFGVFAQSKPDSAEPMDRSAMCAFPIKYVNDFFNKIVNKNNVRCLQHFYGPNHEHCFNRTLLRNSSGCEARRDEYRTEFTTALQRVDLFMGQFSEVLLTSISTFIKGDLTIANLGTSEGRFMQVVVSRSGPSTPHVNFLLDSHPVSPEVIVEHTLNQNGYTLVITGKKITKIPLNGLGCRHFQSCSQCLSAPPFVQCGWCHDKCVRSEECLSGTWTQQICLPAIYKVFPNSAPLEGGTRLTICGWDFGFRRNNKFDLKKTRVLLGNESCTLTLSESTMNTLKCTVGPAMNKHFNMSIIISNGHGTTQYSTFSYVDPVITSISPKYGPMAGGTLLTLTGNYLNSGNSRHISIGGKTCTLKSVSNSILECYTPAQTISTEFAVKLKIDLANRETSIFSYREDPIVYEIHPTKSFISTWWKEPLNIVSFLFCFASGGSTITGVGKNLNSVSVPRMVINVHEAGRNFTVACQHRSNSEIICCTTPSLQQLNLQLPLKTKAFFMLDGILSKYFDLIYVHNPVFKPFEKPVMISMGNENVLEIKGNDIDPEAVKGEVLKVGNKSCENIHLHSEAVLCTVPNDLLKLNSELNIEWKQAISSTVLGKVIVQPDQNFTGLIAGVVSISTALLLLLGFFLWLKKRKQIKDLGSELVRYDARVHTPHLDRLVSARSVSPTTEMVSNESVDYRATFPEDQFPNSSQNGSCRQVQYPLTDMSPILTSGDSDISSPLLQNTVHIDLSALNPELVQAVQHVVIGPSSLIVHFNEVIGRGHFGCVYHGTLLDNDGKKIHCAVKSLNRITDIGEVSQFLTEGIIMKDFSHPNVLSLLGICLRSEGSPLVVLPYMKHGDLRNFIRNETHNPTVKDLIGFGLQVAKGMKYLASKKFVHRDLAARNCMLDEKFTVKVADFGLARDMYDKEYYSVHNKTGAKLPVKWMALESLQTQKFTTKSDVWSFGVLLWELMTRGAPPYPDVNTFDITVYLLQGRRLLQPEYCPDPLYEVMLKCWHPKAEMRPSFSELVSRISAIFSTFIGEHYVHVNATYVNVKCVAPYPSLLSSEDNADDEVDTRPASFWETS

SEQ ID NO: 5103 - protein, 490 aa, Homo sapiens
MTSRASELSPGRSVTAGIIIVGDEILKGHTQDTNTFFLCRTLRSLGVQVCRVSVVPDEVATIAAEVTSFSNRFTHVLTAGGIGPTHDDVTFEAVAQAFGDELKPHPKLEAATKALGGEGWEKLSLVPSSARLHYGTDPCTGQPFRFPLVSVRNVYLFPGIPELLRRVLEGMKGLFQNPAVQFHSKELYVAADEASIAPILAEAQAHFGRRLGLGSYPDWGSNYYQVKLTLDSEEEGPLEECLAYLTARLPQGSLVPYMPNAVEQASEAVYKLAESGSSLGKKVAGALQTIETSLAQYSLTQLCVGFNGGKDCTALLHLFHAAVQRKLPDVPNPLQILYIRSISPFPELEQFLQDTIKRYNLQMLEAEGSMKQALGELQARHPQLEAVLMGTRRTDPYSCSLCPFSPTDPGWPAFMRINPLLDWTYRDIWDFLRQLFVPYCILYDRGYTSLGSRENTVRNPALKCLSPGGHPTYRPAYLLENEEEERNSRT

SEQ ID NO: 5104 - protein, 524 aa, Homo sapiens
MSQGSPGDWAPLDPTPGPPASPNPFVHELHLSRLQRVKFCLLGALLAPIRVLLAFIVLFLLWPFAWLQVAGLSEEQLQEPITGWRKTVCHNGVLGLSRLLFFLLGFLRIRVRGQRASRLQAPVLVAAPHSTFFDPIVLLPCDLPKVVSRAENLSVPVIGALLRFNQAILVSRHDPASRRRVVEEVRRRATSGGKWPQVLFFPEGTCSNKKALLKFKPGAFIAGVPVQPVLIRYPNSLDTTSWAWRGPGVLKVLWLTASQPCSIVDVEFLPVYHPSPEESRDPTLYANNVQRVMAQALGIPATECEFVGSLPVIVVGRLKVALEPQLWELGKVLRKAGLSAGYVDAGAEPGRSRMISQEEFARQLQLSDPQTVAGAFGYFQQDTKGLVDFRDVALALAALDGGRSLEELTRLAFELFAEEQAEGPNRLLYKDGFSTILHLLLGSPHPAATALHAELCQAGSSQGLSLCQFQNFSLHDPLYGKLFSTYLRPPHTSRGTSQTPNASSPGNPTALANGTVQAPKQKGD

SEQ ID NO: 5105 - protein, 173 aa, Homo sapiens
MAAMASLGALALLLLSSLSRCSAEACLEPQITPSYYTTSDAVISTETVFIVEISLTCKNRVQNMALYADVGGKQFPVTRGQDVGRYQVSWSLDHKSAHAGTYEVRFFDEESYSLLRKAQRNNEDISIIPPLFTVSVDHRGTWNGPWVSTEVLAAAIGLVIYYLAFSAKSHIQA

SEQ ID NO: 5106 - protein, 591 aa, Homo sapiens
MALRARALYDFRSENPGEISLREHEVLSLCSEQDIEGWLEGVNSRGDRGLFPASYVQVIRAPEPGPAGDGGPGAPARYANVPPGGFEPLPVAPPASFKPPPDAFQALLQPQQAPPPSTFQPPGAGFPYGGGALQPSPQQLYGGYQASQGSDDDWDDEWDDSSTVADEPGALGSGAYPDLDGSSSAGVGAAGRYRLSTRSDLSLGSRGGSVPPQHHPSGPKSSATVSRNLNRFSTFVKSGGEAFVLGEASGFVKDGDKLCVVLGPYGPEWQENPYPFQCTIDDPTKQTKFKGMKSYISYKLVPTHTQVPVHRRYKHFDWLYARLAEKFPVISVPHLPEKQATGRFEEDFISKRRKGLIWWMNHMASHPVLAQCDVFQHFLTCPSSTDEKAWKQGKRKAEKDEMVGANFFLTLSTPPAAALDLQEVESKIDGFKCFTKKMDDSALQLNHTANEFARKQVTGFKKEYQKVGQSFRGLSQAFELDQQAFSVGLNQAIAFTGDAYDAIGELFAEQPRQDLDPVMDLLALYQGHLANFPDIIHVQKGKAWPLEQVIWSVLCRLKGATLTAVPLWVSESYSTGEEASRDVDAWVFSLE

SEQ ID NO: 5107 - protein, 556 aa, Homo sapiens
MEGPLSVFGDRSTGETIRSQNVMAAASIANIVKSSLGPVGLDKMLVDDIGDVTITNDGATILKLLEVEHPAAKVLCELADLQDKEVGDGTTSVVIIAAELLKNADELVKQKIHPTSVISGYRLACKEAVRYINENLIVNTDELGRDCLINAAKTSMSSKIIGINGDFFANMVVDAVLAIKYTDIRGQPRYPVNSVNILKAHGRSQMESMLISGYALNCVVGSQGMPKRIVNAKIACLDFSLQKTKMKLGVQVVITDPEKLDQIRQRESDITKERIQKILATGANVILTTGGIDDMCLKYFVEAGAMAVRRVLKRDLKRIAKASGATILSTLANLEGEETFEAAMLGQAEEVVQERICDDELILIKNTKARTSASIILRGANDFMCDEMERSLHDALCVVKRVLESKSVVPGGGAVEAALSIYLENYATSMGSREQLAIAEFARSLLVIPNTLAVNAAQDSTDLVAKLRAFHNEAQVNPERKNLKWIGLDLSNGKPRDNKQAGVFEPTIVKVKSLKFATEAAITILRIDDLIKLHPESKDDKHGSYEDAVHSGALND

SEQ ID NO: 5108 - protein, 148 aa, Homo sapiens
MWLPPALLLLSLSGCFSIQGPESVRAPEQGSLTVQCHYKQGWETYIKWWCRGVRWDTCKILIETRGSEQGEKSDRVSIKDNQKDRTFTVTMEGLRRDDADVYWCGIERRGPDLGTQVKVIVDPEGAASTTASSPTNSNMAVFIGSHKR

SEQ ID NO: 5109 - protein, 176 aa, Homo sapiens
MEAIAKYDFKATADDELSFKRGDILKVLNEECDQNWYKAELNGKDGFIPKNYIEMKPHPFGNDVQHFKVLRDGAGKYFLWVVKFNSLNELVDYHRSTSVSRNQQIFLRDIEQVPQQPTYVQALFDFDPQEDGELGFRRGDFIHVMDNSDPNWWKGACHGQTGMFPRNYVTPVNRNV

SEQ ID NO: 5110 - protein, 496 aa, Homo sapiens
MGRRALLLLLLSFLAPWATIALRPALRALGSLHLPTNPTSLPAVAKNYSVLYFQQKVDHFGFNTVKTFNQRYLVADKYWKKNGGSILFYTGNEGDIIWFCNNTGFMWDVAEELKAMLVFAEHRYYGESLPFGDNSFKDSRHLNFLTSEQALADFAELIKHLKRTIPGAENQPVIAIGGSYGGMLAAWFRMKYPHMVVGALAASAPIWQFEDLVPCGVFMKIVTTDFRKSGPHCSESIHRSWDAINRLSNTGSGLQWLTGALHLCSPLTSQDIQHLKDWISETWVNLAMVDYPYASNFLQPLPAWPIKVVCQYLKNPNVSDSLLLQNIFQALNVYYNYSGQVKCLNISETATSSLGTLGWSYQACTEVVMPFCTNGVDDMFEPHSWNLKELSDDCFQQWGVRPRPSWITTMYGGKNISSHTNIVFSNGELDPWSGGGVTKDITDTLVAVTISEGAHHLDLRTKNALDPMSVLLARSLEVRHMKNWIRDFYDSAGKQH

SEQ ID NO: 5111 - protein, 558 aa, Homo sapiens
MSAGSERGAAATPGGLPAPCASKVELRLSCRHLLDRDPLTKSDPSVALLQQAQGQWVQVGRTEVVRSSLHPVFSKVFTVDYYFEEVQRLRFEVYDTHGPSGFSCQEDDFLGGMECTLGQIVAQKKVTRPLLLKFGRNAGKSTITVIAEDISGNNGYVELSFRARKLDDKDLFSKSDPFLELYRVNDDQGLQLVYRTEVVKNNLNPVWEAFKVSLSSLCSCEETRPLKCLVWDYDSRGKHDFIGEFSTTFEEMQKAFEEGQAQWDCVNPKYKQKRRSYKNSGVVVLADLKFHRVYSFLDYIMGGCQIHFTVAIDFTASNGDPRNSCSLHYINPYQPNEYLKALVSVGEICQDYDSDKRFSALGFGARIPPKYEVSHDFAINFNPEDDECEGIQGVVEAYQNCLPRVQLYGPTNVAPIISKVARVAAAEESTGKASQYYILLILTDGVVTDMADTREAIVRASRLPMSIIIVGVGNADFTDMQVLDGDDGVLRSPRGEPALRDIVQFVPFRELKNASPAALAKCVLAEVPKQVVEYYSHRGLPPRSLGVPAGEASPGCTP

SEQ ID NO: 5112 - protein, 194 aa, Homo sapiens
MQAVRNAGSRFLRSWTWPQTAGRVVARTPAGTICTGARQLQDAAAKQKVEQNAAPSHTKFSIYPPIPGEESSLRWAGKKFEEIPIAHIKASHNNTQIQVVSASNEPLAFASCGTEGFRNAKKGTGIAAQTAGIAAAARAKQKGVIHIRVVVKGLGPGRLSAMHGLIMGGLEVISITDNTPIPHNGCRPRKARKL

SEQ ID NO: 5113 - protein, 669 aa, Homo sapiens
MMRLRGSGMLRDLLLRSPAGVSATLRRAQPLVTLCRRPRGGGRPAAGPAAAARLHPWWGGGGWPAEPLARGLSSSPSEILQELGKGSTHPQPGVSPPAAPAAPGPKDGPGETDAFGNSEGKELVASGENKIKQGLLPSLEDLLFYTIAEGQEKIPVHKFITALKSTGLRTSDPRLKECMDMLRLTLQTTSDGVMLDKDLFKKCVQSNIVLLTQAFRRKFVIPDFMSFTSHIDELYESAKKQSGGKVADYIPQLAKFSPDLWGVSVCTVDGQRHSTGDTKVPFCLQSCVKPLKYAIAVNDLGTEYVHRYVGKEPSGLRFNKLFLNEDDKPHNPMVNAGAIVVTSLIKQGVNNAEKFDYVMQFLNKMAGNEYVGFSNATFQSERESGDRNFAIGYYLKEKKCFPEGTDMVGILDFYFQLCSIEVTCESASVMAATLANGGFCPITGERVLSPEAVRNTLSLMHSCGMYDFSGQFAFHVGLPAKSGVAGGILLVVPNVMGMMCWSPPLDKMGNSVKGIHFCHDLVSLCNFHNYDNLRHFAKKLDPRREGGDQRVKSVINLLFAAYTGDVSALRRFALSAMDMEQRDYDSRTALHVAAAEGHVEVVKFLLEACKVNPFPKDRWNNTPMDEALHFGHHDVFKILQEYQVQYTPQGDSDNGKENQTVHKNLDGLL

SEQ ID NO: 5114 - protein, 281 aa, Homo sapiens
MATNFLAHEKIWFDKFKYDDAERRFYEQMNGPVAGASRQENGASVILRDIARARENIQKSLAGSSGPGASSGTSGDHGELVVRIASLEVENQSLRGVVQELQQAISKLEARLNVLEKSSPGHRATAPQTQHVSPMRQVEPPAKKPATPAEDDEDDDIDLFGSDNEEEDKEAAQLREERLRQYAEKKAKKPALVAKSSILLDVKPWDDETDMAQLEACVRSIQLDGLVWGASKLVPVGYGIRKLQIQCVVEDDKVGTDLLEEEITKFEEHVQSVDIAAFNKI

SEQ ID NO: 5115 - protein, 341 aa, Homo sapiens
MGRRCCRRRVLAAACLGAALLLLCAAPRSLRPAFGNRALGSSWLGGEKRSPLQKLYDLDQDPRSTLAKVHRQRRDLLNSACSRHSRRQRLLQPEDLRHVLVDDAHGLLYCYVPKVACTNWKRVLLALSGQARGDPRAISAQEAHAPGRLPSLADFSPAEINRRLRAYLAFLFVREPFERLASAYRNKLARPYSAAFQRRYGARIVQRLRPRALPDARARGHDVRFAEFLAYLLDPRTRREEPFNEHWERAHALCHPCRLRYDVVGKFETLAEDAAFVLGLAGASDLSFPGPPRPRGAAASRDLAARLFRDISPFYQRRLFDLYKMDFLLFNYSAPSYLRLL

SEQ ID NO: 5116 - protein, 653 aa, Homo sapiens
MADIKTGIFAKNVQKRLNRAQEKVLQKLGKADETKDEQFEEYVQNFKRQEAEGTRLQRELRGYLAAIKGMQEASMKLTESLHEVYEPDWYGREDVKMVGEKCDVLWEDFHQKLVDGSLLTLDTYLGQFPDIKNRIAKRSRKLVDYDSARHHLEALQSSKRKDESRISKAEEEFQKAQKVFEEFNVDLQEELPSLWSRRVGFYVNTFKNVSSLEAKFHKEIAVLCHKLYEVMTKLGDQHADKAFTIQGAPSDSGPLRIAKTPSPPEEPSPLPSPTASPNHTLAPASPAPARPRSPSQTRKGPPVPPLPKVTPTKELQQENIISFFEDNFVPEISVTTPSQNEVPEVKKEETLLDLDFDPFKPEVTPAGSAGVTHSPMSQTLPWDLWTTSTDLVQPASGGSFNGFTQPQDTSLFTMQTDQSMICNLIIPGADADAAVGTLVSAAEGAPGEEAEAEKATVPAGEGVSLEEAKIGTETTEGAESAQPEAEELEATVPQEKVIPSVVIEPASNHEEEGENEITIGAEPKETTEDAAPPGPTSETPELATEQKPIQDPQPTPSAPAMGAADQLASAREASQELPPGFLYKVETLHDFEAANSDELTLQRGDVVLVVPSDSEADQDAGWLVGVKESDWLQYRDLATYKGLFPENFTRRLD

SEQ ID NO: 5117 - protein, 521 aa, Homo sapiens
MLCALLLLPSLLGATRASPTSGPQECAKGSTVWCQDLQTAARCGAVGYCQGAVWNKPTAKSLPCDVCQDIAAAAGNGLNPDATESDILALVMKTCEWLPSQESSAGCKWMVDAHSSAILSMLRGAPDSAPAQVCTALSLCEPLQRHLATLRPLSKEDTFEAVAPFMANGPLTFHPRQAPEGALCQDCVRQVSRLQEAVRSNLTLADLNIQEQCESLGPGLAVLCKNYLFQFFVPADQALRLLPPQELCRKGGFCEELGAPARLTQVVAMDGVPSLELGLPRKQSEMQMKAGVTCEVCMNVVQKLDHWLMSNSSELMITHALERVCSVMPASITKECIILVDTYSPSLVQLVAKITPEKVCKFIRLCGNRRRARAVHDAYAIVPSPEWDAENQGSFCNGCKRLLTVSSHNLESKSTKRDILVAFKGGCSILPLPYMIQCKHFVTQYEPVLIESLKDMMDPVAVCKKVGACHGPRTPLLGTDQCALGPSFWCRSQEAAKLCNAVQHCQKHVWKEMHLHAGEHA

SEQ ID NO: 5118 - protein, 201 aa, Homo sapiens
MGNLFGRKKQSRVTEQDKAILQLKQQRDKLRQYQKRIAQQLERERALARQLLRDGRKERAKLLLKKKRYQEQLLDRTENQISSLEAMVQSIEFTQIEMKVMEGLQFGNECLNKMHQVMSIEEVERILDETQEAVEYQRQIDELLAGSFTQEDEDAILEELSAITQEQIELPEVPSEPLPEKIPENVPVKARPRQAELVAAS

SEQ ID NO: 5119 - protein, 593 aa, Homo sapiens
MAAASSSDSDACGAESNEANSKWLDAHYDPMANIHTFSACLALADLHGDGEYKLVVGDLGPGGQQPRLKVLKGPLVMTESPLPALPAAAATFLMEQHEPRTPALALASGPCVYVYKNLRPYFKFSLPQLPPNPLEQDLWNQAKEDRIDPLTLKEMLESIRETAEEPLSIQSLRFLQLELSEMEAFVNQHKSNSIKRQTVITTMTTLKKNLADEDAVSCLVLGTENKELLVLDPEAFTILAKMSLPSVPVFLEVSGQFDVEFRLAAACRNGNIYILRRDSKHPKYCIELSAQPVGLIRVHKVLVVGSTQDSLHGFTHKGKKLWTVQMPAAILTMNLLEQHSRGLQAVMAGLANGEVRIYRDKALLNVIHTPDAVTSLCFGRYGREDNTLIMTTRGGGLIIKILKRTAVFVEGGSEVGPPPAQAMKLNVPRKTRLYVDQTLREREAGTAMHRAFQTDLYLLRLRAARAYLQALESSLSPLSTTAREPLKLHAVVQGLGPTFKLTLHLQNTSTTRPVLGLLVCFLYNEALYSLPRAFFKVPLLVPGLNYPLETFVESLSNKGISDIIKVLVLREGQSAPLLSAHVNMPGSEGLAAA

SEQ ID NO: 5120 - protein, 331 aa, Homo sapiens
MGTPQKDVIIKSDAPDTLLLEKHADYIASYGSKKDDYEYCMSEYLRMSGIYWGLTVMDLMGQLHRMNREEILAFIKSCQHECGGISASIGHDPHLLYTLSAVQILTLYDSINVIDVNKVVEYVKGLQKEDGSFAGDIWGEIDTRFSFCAVATLALLGKLDAINVEKAIEFVLSCMNFDGGFGCRPGSESHAGQIYCCTGFLAITSQLHQVNSDLLGWWLCERQLPSGGLNGRPEKLPDVCYSWWVLASLKIIGRLHWIDREKLRNFILACQDEETGGFADRPGDMVDPFHTLFGIAGLSLLGEEQIKPVNPVFCMPEEVLQRVNVQPELVS

SEQ ID NO: 5121 - protein, 474 aa, Homo sapiens
MAAASVSAASGSHLSNSFAEPSRSNGSMVRHSSSPYVVYPSDKPFLNSDLRRSPSKPTLAYPESNSRAIFSALKNLQDKIRRLELERIQAEESVKTLSRETIEYKKVLDEQIQERENSKNEESKHNQELTSQLLAAENKCNLLEKQLEYMRNMIKHAEMERTSVLEKQVSLERERQHDQTHVQSQLEKLDLLEQEYNKLTTMQALAEKKMQELEAKLHEEEQERKRMQAKAAELQTGLETNRLIFEDKATPCVPNARRIKKKKSKPPEKSTSPSHAVVANVQLVLHLMKQHSKALCNDRVINSIPLAKQVSSRGGKSKKLSVTPPSSNGINEELSEVLQTLQDEFGQMSFDHQQLAKLIQESPTVELKDKLECELEALVGRMEAKANQITKVRKYQAQLEKQKLEKQKKELKATKKTLDEERNSSSRSGITGTTNKKDFMKLRPGEKRRKNLQLLKDMQSIQNSLQSSSLCWDY

SEQ ID NO: 5122 - protein, 149 aa, Homo sapiens
MSLSFCGNNISSYNINDGVLQNSCFVDALNLVPHVFLLFITFPILFIGWGSQSSKVQIHHNTWLHFPGHNLRWILTFALLFVHVCEIAEGIVSDSRRESRHLHLFMPAVMGFVATTTSIVYYHNIETSNFPKLLLGFSHHESKSCYQHS

SEQ ID NO: 5123 - protein, 504 aa, Homo sapiens
MSVEMDSSSFIQFDVPEYSSTVLSQLNELRLQGKLCDIIVHIQGQPFRAHKAVLAASSPYFRDHSALSTMSGLSISVIKNPNVFEQLLSFCYTGRMSLQLKDVVSFLTAASFLQMQCVIDKCTQILESIHSKISVGDVDSVTVGAEENPESRNGVKDSSFFANPVEISPPYCSQGRQPTASSDLRMETTPSKALRSRLQEEGHSDRGSSGSVSEYEIQIEGDHEQGDLLVRESQITEVKVKMEKSDRPSCSDSSSLGDDGYHTEMVDGEQVVAVNVGSYGSVLQHAYSYSQAASQPTNVSEAFGSLSNSSPSRSMLSCFRGGRARQKRALSVHLHSDLQGLVQGSDSEAMMNNPGYESSPRERSARGHWYPYNERLICIYCGKSFNQKGSLDRHMRLHMGITPFVCKFCGKKYTRKDQLEYHIRGHTDDKPFRCEICGKCFPFQGTLNQHLRKNHPGVAEVRSRIESPERTDVYVEQKLENDASASEMGLDSRMEIHTVSDAPD

SEQ ID NO: 5124 - protein, 197 aa, Homo sapiens
MMFPQSRHSGSSHLPQQLKFTTSDSCDRIKDEFQLLQAQYHSLKLECDKLASEKSEMQRHYVMYYEMSYGLNIEMHKQAEIVKRLNGICAQVLPYLSQEHQQQVLGAIERAKQVTAPELNSIIRQQLQAHQLSQLQALALPLTPLPVGLQPPSLPAVSAGTGLLSLSALGSQAHLSKEDKNGHDGDTHQEDDGEKSD

SEQ ID NO: 5125 - protein, 340 aa, Homo sapiens
MEISSHQSHLLQQLNEQRRQDVFCDCSILVEGKVFKAHRNVLFASSGYFKMLLSQNSKETSQPTTATFQAFSPDTFTVILDFVYSGKLSLTGQNVIEVMSAASFLQMTDVISVCKTFIKSSLDISEKEKDRYFSLSDKDANSNGVERSSFYSGGWQEGSSSPRSHLSPEQGTGIISGKSWNKYNYHPASQKNTQQPLAKHEPRKESIKKTKHLRLSQPSEVTHYKSSKREVRTSDSSSHVSQSEEQAQIDAEMDSTPVGYQYGQGSDVTSKSFPDDLPRMRFKCPYCTHVVKRKADLKRHLRCHTGERPYPCQACGKRFSRLDHLSSHFRTMEIRIPDGT

SEQ ID NO: 5126 - protein, 468 aa, Homo sapiens
MADDAGLETPLCSEQFGSGEARGCRAAADGSLQWEVGGWRWWGLSRAFTVKPEGRDAGEVGASGAPSPPLSGLQAVFLPQGFPDSVSPDYLPYQLWDSVQAFASSLSGSLATQAVLLGIGVGNAKATVSAATATWLVKDSTGMLGRIVFAWWKGSKLDCNAKQWRLFADILNDVAMFLEIMAPVYPICFTMTVSTSNLAKCIVSVAGGATRAALTVHQARRNNMADVSAKDSSQETLVNLAGLLVSLLMLPLVSGCPGFSLGCFFFLTALHIYANYRAVRALVMETLNEGRLRLVLKHYLQRGEVLDPTAANRMEPLWTGFWPAPSLSLGVPLHRLVSSVFELQQLVEGHQESYLLCWDQSQNQVQVVLNQKAGPKTILRAATHGLMLGALQGDGPLPAELEELRNRVRAGPKKESWVVVKETHEVLDMLFPKFLKGLQDAGWKTEKHQLEVDEWRATWLLSPEKKVL

SEQ ID NO: 5127 - protein, 1074 aa, Homo sapiens
MKDIGQQLYTTHLNGGHNSLTMSPKQPDANGAPRPNRQEAQTLLYQGSEAEAAMMTIATCAKCKSVHKISLQDLQKGTGKDGMYVCFQCSLGAAPPNFHFVSNNSSATHVGNKTENFSSSVNSKFKVRNFKPGKYYCDKCRFSTKDPLQYKKHTLQHEEIKFICSHCSYISYTKGEFQRHLVKHTGIFPYQCEYCDYGAIRNDYIVKHTKRVHERAGAKRPVKAVAKLEPKRTGTSKQNPELLKASNPRTTFQNKWSDQLSGFSLHANKDKMHNIMLLPEPKEYQKDVVCIPNKMTLSEPNEVNLFENKNVEVEVLSPAKEPVQPGMPLTVVAPAELVVPANCLAQLIDVKVVNGTQQLVLKLFPLEENNCLEAGRDNGGNSERMVKEKGSNEQEKVLSAEKTKSLTVDGNVGKLVGIDSFQPSVQKQLKNVKWVRSYDFIMPNSSVHNNGKSFINSETIEDFQKKNNLYPHRTAFPSVALKGHSLASVFKNSVLRSLGAASNPFPYKAAVCFAESGRNLHSSSQQLLPFAASPATCSFSGEKGLLPVSENDLESTSKVNIPVKVVSSNRKQEDNQTEEHKAVSTVGQISSQHKSEYLHINITGEDRSQQPGDKPLELKNSERTNNTNDGPVISSVFSLSSGSENVPEGIKWNSSTSKIKSIELLRRKIAQLIESCGKPSSLASNSAHRRSVGQASKGTSKATSEGIQEINVSLTGLGHSTGTLQKPPNDGGITGNRQLTHQQIYPHFADGSNRKTKSRVARKAHVATPVLIPKGAVLRVLNSSENAHIIEATCEAPVSIPCSERQLIKPVPFCPVRQADSDLQPLRSERGPIDMSPNIETPLRPKLRKESAVCSTIHRKTGLLYGQQGSSELNKQGRLLSRSLSISRNKTKQVHLSRKKNKIQAEPSRCLKDPSIFQVARQLRLIAAKPDQLIKCPRRNQPVIVLNHPDVDSPEVTNVMKVINKYKGNVLKVVLSERTRCQLGIRRHHVRLTYQNAEEASQIKRQMMLKMKLKKVHKNNYQVVDSLPDDSSQCVFKCWFCGRLYEDQEEWMSHGQRHLIEATRDWDVLSSKGK

SEQ ID NO: 5128 - protein, 430 aa, Homo sapiens
MAEAVLIDLFGLKLNSQKNCHQTLLKTLNAVQYHHAAKAKFLCIMCCSNISYERDGEQDNCEIETSNGLSALLEEFEIVSCPSMAATLYTIKQKIDEKNLSSIKVIVPRHRKTLMKAFIDQLFTDVYNFEFEDLQVTFRGGLFKQSIEINVITAQELRGIQNEIETFLRSLPALRGKLTIITSSLIPDIFIHGFTTRTGGISYIPTLSSFNLFSSSKRRDPKVVVQENLRRLANAAGFNVEKFYRIKTHHSNDIWIMGRKEPDSYDGITTNQRGVTIAALGADCIPIVFADPVKKACGVAHAGWKGTLLGVAMATVNAMIAEYGCSLEDIVVVLGPSVGPCCFTLPRESAEAFHNLHPACVQLFDSPNPCIDIRKATRILLEQGGILPQNIQDQNQDLNLCTSCHPDKFFSHVRDGLNFGTQIGFISIKE

SEQ ID NO: 5129 - protein, 442 aa, Homo sapiens
MSACREIALLRELKHPNVIALQKVFLSHSDRKVWLLFDYAEHDLWHIIKFHRASKANKKPMQLPRSMVKSLLYQILDGIHYLHANWVLHRDLKPANILVMGEGPERGRVKIADMGFARLFNSPLKPLADLDPVVVTFWYRAPELLLGARHYTKAIDIWAIGCIFAELLTSEPIFHCRQEDIKTSNPFHHDQLDRIFSVMGFPADKDWEDIRKMPEYPTLQKDFRRTTYANSSLIKYMEKHKVKPDSKVFLLLQKLLTMDPTKRITSEQALQDPYFQEDPLPTLDVFAGCQIPYPKREFLNEDDPEEKGDKNQQQQQNQHQQPTAPPQQAAAPPQAPPPQQNSTQTNGTAGGAGAGVGGTGAGLQHSQDSSLNQVPPNKKPRLGPSGANSGGPVMPSDYQHSSSRLNYQSSVQGSSQSQSTLGYSSSSQQSSQYHPSHQAHRY

SEQ ID NO: 5130 - protein, 246 aa, Homo sapiens
MNRFLLLMSLYLLGSARGTSSQPNELSGSIDHQTSVQQLPGEFFSLENPSDAEALYETSSGLNTLSEHGSSEHGSSKHTVAEHTSGEHAESEHASGEPAATEHAEGEHTVGEQPSGEQPSGEHLSGEQPLSELESGEQPSDEQPSGEHGSGEQPSGEQASGEQPSGTILNCYTCAYMNDQGKCLRGEGTCITQNSQQCMLKKIFEGGKLQFMVQGCENMCPSMNLFSHGTRMQIICCRNQSFCNKI

SEQ ID NO: 5131 - protein, 310 aa, Homo sapiens
MSQQLKKRAKTRHQKGLGGRAPSGAKPRQGKSSQDLQAEIEPVSAVWALCDGYVCYEPGPQALGGDDFSDCYIECVIRGEFSQPILEEDSLFESLEYLKKGSEQQLSQKVFEASSLECSLEYMKKGVKKELPQKIVGENSLEYSEYMTGKKLPPGGIPGIDLSDPKQLAEFARKKPPINKEYDSLSAIACPQSGCTRKLRNRAALRKHLLIHGPRDHVCAECGKAFVESSKLKRHFLVHTGEKPFRCTFEGCGKRFSLDFNLRTHVRIHTGEKRFVCPFQGCNRRFIQSNNLKAHILTHANTNKNEQEGK

SEQ ID NO: 5132 - protein, 297 aa, Homo sapiens
MRDRTHELRQGDDSSDEEDKERVALVVHPGTARLGSPDEEFFHKVRTIRQTIVKLGNKVQELEKQQVTILATPLPEESMKQELQNLRDEIKQLGREIRLQLKAIEPQKEEADENYNSVNTRMRKTQHGVLSQQFVELINKCNSMQSEYREKNVERIRRQLKITNAGMVSDEELEQMLDSGQSEVFVSNILKDTQVTRQALNEISARHSEIQQLERSIRELHDIFTFLATEVEMQGEMINRIEKNILSSADYVERGQEHVKTALENQKKARKKKVLIAICVSITVVLLAVIIGVTVVG

SEQ ID NO: 5133 - protein, 349 aa, Homo sapiens
MAIPITVLDCDLLLYGRGHRTLDRFKLDDVTDEYLMSMYGFPRQFIYYLVELLGANLSRPTQRSRAISPETQVLAALGFYTSGSFQTRMGDAIGISQASMSRCVANVTEALVERASQFIRFPADEASIQALKDEFYGLAGMPGVMGVVDCIHVAIKAPNAEDLSYVNRKGLHSLNCLMVCDIRGTLMTVETNWPGSLQDCAVLQQSSLSSQFEAGMHKDSWLLGDSSFFLRTWLMTPLHIPETPAEYRYNMAHSATHSVIEKTFRTLCSRFRCLDGSKGALQYSPEKSSHIILACCVLHNISLEHGMDVWSSPMTGPMEQPPEEEYEHMESLDLEADRIRQELMLTHFS

SEQ ID NO: 5134 - protein, 150 aa, Homo sapiens
MLGAALRRCAVAATTRADPRGLLHSARTPGPAVAIQSVRCYSHGSQETDEEFDARWVTYFNKPDIDAWELRKGINTLVTYDMVPEPKIIDAALRACRRLNDFASTVRILEVVKDKAGPHKEIYPYVIQELRPTLNELGISTPEELGLDKV

SEQ ID NO: 5135 - protein, 463 aa, Homo sapiens
METEQPEETFPNTETNGEFGKRPAEDMEEEQAFKRSRNTDEMVELRILLQSKNAGAVIGKGGKNIKALRTDYNASVSVPDSSGPERILSISADIETIGEILKKIIPTLEEGLQLPSPTATSQLPLESDAVECLNYQHYKGSDFDCELRLLIHQSLAGGIIGVKGAKIKELRENTQTTIKLFQECCPHSTDRVVLIGGKPDRVVECIKIILDLISESPIKGRAQPYDPNFYDETYDYGGFTMMFDDRRGRPVGFPMRGRGGFDRMPPGRGGRPMPPSRRDYDDMSPRRGPPPPPPGRGGRGGSRARNLPLPPPPPPRGGDLMAYDRRGRPGDRYDGMVGFSADETWDSAIDTWSPSEWQMAYEPQGGSGYDYSYAGGRGSYGDLGGPIITTQVTIPKDLAGSIIGKGGQRIKQIRHESGASIKIDEPLEGSEDRIITITGTQDQIQNAQYLLQNSVKQYSGKFF

SEQ ID NO: 5136 - protein, 282 aa, Homo sapiens
MESRMWPALLLSHLLPLWPLLLLPLPPPAQGSSSSPRTPPAPARPPCARGGPSAPRHVCVWERAPPPSRSPRVPRSRRQVLPGTAPPATPSGFEEGPPSSQYPWAIVWGPTVSREDGGDPNSANPGFLDYGFAAPHGLATPHPNSDSMRGDGDGLILGEAPATLRPFLFGGRGEGVDPQLYVTITISIIIVLVATGIIFKFCWDRSQKRRRPSGQQGALRQEESQQPLTDLSPAGVTVLGAFGDSPTPTPDHEEPRGGPRPGMPHPKGAPAFQLNRIPLVNL

SEQ ID NO: 5137 - protein, 129 aa, Homo sapiens
MADSGDAGSSGPWWKSLTNSRKKSKEAAVGVPPPAQPAPGEPTPPAPPSPDWTSSSRENQHPNLLGGAGEPPKPDKLYGDKSGSSRRNLKISRSGRFKEKRKVRATLLPEAGRSPEEAGFPGDPHEDKQ

SEQ ID NO: 5138 - protein, 753 aa, Homo sapiens
MPMDLILVVWFCVCTARTVVGFGMDPDLQMDIVTELDLVNTTLGVAQVSGMHNASKAFLFQDIEREIHAAPHVSEKLIQLFRNKSEFTILATVQQKPSTSGVILSIRELEHRIYERVIDPPDTNLPPGINLWLGQRNQKHGLFKGIIQDGKIIFMPNGYITQCPNLNHTCPTCSDFLSLVQGIMDLQELLAKMTAKLNYAETRLSQLENCHCEKTCQVSGLLYRDQDSWVDGDHCRNCTCKSGAVECRRMSCPPLNCSPDSLPVHIAGQCCKVCRPKCIYGGKVLAEGQRILTKSCRECRGGVLVKITEMCPPLNCSEKDHILPENQCCRVCRGHNFCAEGPKCGENSECKNWNTKATCECKSGYISVQGDSAYCEDIDECAAKMHYCHANTVCVNLPGLYRCDCVPGYIRVDDFSCTEHDECGSGQHNCDENAICTNTVQGHSCTCKPGYVGNGTICRAFCEEGCRYGGTCVAPNKCVCPSGFTGSHCEKDIDECSEGIIECHNHSRCVNLPGWYHCECRSGFHDDGTYSLSGESCIDIDECALRTHTCWNDSACINLAGGFDCLCPSGPSCSGDCPHEGGLKHNGQVWTLKEDRCSVCSCKDGKIFCRRTACDCQNPSADLFCCPECDTRVTSQCLDQNGHKLYRSGDNWTHSCQQCRCLEGEVDCWPLTCPNLSCEYTAILEGECCPRCVSDPCLADNITYDIRKTCLDSYGVSRLSGSVWTMAGSPCTTCKCKNGRVCCSVDFECLQNN

SEQ ID NO: 5139 - protein, 559 aa, Homo sapiens
MRLHRLRARLSAVACGLLLLLVRGQGQDSASPIRTTHTGQVLGSLVHVKGANAGVQTFLGIPFAKPPLGPLRFAPPEPPESWSGVRDGTTHPAMCLQDLTAVESEFLSQFNMTFPSDSMSEDCLYLSIYTPAHSHEGSNLPVMVWIHGGALVFGMASLYDGSMLAALENVVVVIIQYRLGVLGFFSTGDKHATGNWGYLDQVAALRWVQQNIAHFGGNPDRVTIFGESAGGTSVSSLVVSPISQGLFHGAIMESGVALLPGLIASSADVISTVVANLSACDQVDSEALVGCLRGKSKEEILAINKPFKMIPGVVDGVFLPRHPQELLASADFQPVPSIVGVNNNEFGWLIPKVMRIYDTQKEMDREASQAALQKMLTLLMLPPTFGDLLREEYIGDNGDPQTLQAQFQEMMADSMFVIPALQVAHFQCSRAPVYFYEFQHQPSWLKNIRPPHMKADHGDELPFVFRSFFGGNYIKFTEEEEQLSRKMMKYWANFARNGNPNGEGLPHWPLFDQEEQYLQLNLQPAVGRALKAHRLQFWKKALPQKIQELEEPEERHTEL

SEQ ID NO: 5140 - protein, 411 aa, Homo sapiens
MEQRGQNAPAASGARKRHGPGPREARGARPGPRVPKTLVLVVAAVLLLVSAESALITQQDLAPQQRAAPQQKRSSPSEGLCPPGHHISEDGRDCISCKYGQDYSTHWNDLLFCLRCTRCDSGEVELSPCTTTRNTVCQCEEGTFREEDSPEMCRKCRTGCPRGMVKVGDCTPWSDIECVHKESGIIIGVTVAAVVLIVAVFVCKSLLWKKVLPYLKGICSGGGGDPERVDRSSQRPGAEDNVLNEIVSILQPTQVPEQEMEVQEPAEPTGVNMLSPGESEHLLEPAEAERSQRRRLLVPANEGDPTETLRQCFDDFADLVPFDSWEPLMRKLGLMDNEIKVAKAEAAGHRDTLYTMLIKWVNKTGRDASVHTLLDALETLGERLAKQKIEDHLLSSGKFMYLEGNADSAMS

SEQ ID NO: 5141 - protein, 1792 aa, Homo sapiens
MSCVHYKFSSKLNYDTVTFDGLHISLCDLKKQIMGREKLKAADCDLQITNAQTKEEYTDDNALIPKNSSVIVRRIPIGGVKSTSKTYVISRTEPAMATTKAIDDSSASISLAQLTKTANLAEANASEEDKIKAMMSQSGHEYDPINYMKKPLGPPPPSYTCFRCGKPGHYIKNCPTNGDKNFESGPRIKKSTGIPRSFMMEVKDPNMKGAMLTNTGKYAIPTIDAEAYAIGKKEKPPFLPEEPSSSSEEDDPIPDELLCLICKDIMTDAVVIPCCGNSYCDECIRTALLESDEHTCPTCHQNDVSPDALIANKFLRQAVNNFKNETGYTKRLRKQLPPPPPPIPPPRPLIQRNLQPLMRSPISRQQDPLMIPVTSSSTHPAPSISSLTSNQSSLAPPVSGNPSSAPAPVPDITATVSISVHSEKSDGPFRDSDNKILPAAALASEHSKGTSSIAITALMEEKGYQVPVLGTPSLLGQSLLHGQLIPTTGPVRINTARPGGGRPGWEHSNKLGYLVSPPQQIRRGERSCYRSINRGRHHSERSQRTQGPSLPATPVFVPVPPPPLYPPPPHTLPLPPGVPPPQFSPQFPPGQPPPAGYSVPPPGFPPAPANLSTPWVSSGVQTAHSNTIPTTQAPPLSREEFYREQRRLKEEEKKKSKLDEFTNDFAKELMEYKKIQKERRRSFSRSKSPYSGSSYSRSSYTYSKSRSGSTRSRSYSRSFSRSHSRSYSRSPPYPRRGRGKSRNYRSRSRSHGYHRSRSRSPPYRRYHSRSRSPQAFRGQSPNKRNVPQGETEREYFNRYREVPPPYDMKAYYGRSVDFRDPFEKERYREWERKYREWYEKYYKGYAAGAQPRPSANRENFSPERFLPLNIRNSPFTRGRREDYVGGQSHRSRNIGSNYPEKLSARDGHNQKDNTKSKEKESENAPGDGKGNKHKKHRKRRKGEESEGFLNPELLETSRKSREPTGVEENKTDSLFVLPSRDDATPVRDEPMDAESITFKSVSEKDKRERDKPKAKGDKTKRKNDGSAVSKKENIVKPAKGPQEKVDGERERSPRSEPPIKKAKEETPKTDNTKSSSSSQKDEKITGTPRKAHSKSAKEHQETKPVKEEKVKKDYSKDVKSEKLTTKEEKAKKPNEKNKPLDNKGEKRKRKTEEKGVDKDFESSSMKISKLEVTEIVKPSPKRKMEPDTEKMDRTPEKDKISLSAPAKKIKLNRETGKKIGSTENISNTKEPSEKLESTSSKVKQEKVKGKVRRKVTGTEGSSSTLVDYTSTSSTGGSPVRKSEEKTDTKRTVIKTMEEYNNDNTAPAEDVIIMIQVPQSKWDKDDFESEEEDVKSTQPISSVGKPASVIKNVSTKPSNIVKYPEKESEPSEKIQKFTKDVSHEIIQHEVKSSKNSASSEKGKTKDRDYSVLEKENPEKRKNSTQPEKESNLDRLNEQGNFKSLSQSSKEARTSDKHDSTRASSNKDFTPNRDKKTDYDTREYSSSKRRDEKNELTRRKDSPSRNKDSASGQKNKPREERDLPKKGTGDSKKSNSSPSRDRKPHDHKATYDTKRPNEETKSVDKNPCKDREKHVLEARNNKESSGNKLLYILNPPETQVEKEQITGQIDKSTVKPKPQLSHSSRLSSDLTRETDEAAFEPDYNESDSESNVSVKEEESSGNISKDLKDKIVEKAKESLDTAAVVQVGISRNQSHSSPSVSPSRSHSPSGSQTRSHSSSASSAESQDSKKKKKKKEKKKHKKHKKHKKHKKHAGTEVELEKSQKHKHKKKKSKKNKDKEKEKEKDDQKVKSVTV

SEQ ID NO: 5142 - protein, 500 aa, Homo sapiens
MAAASVSAASGSHLSNSFAEPSRSNGSMVRHSSSPYVVYPSDKPFLNSDLRRSPSKPTLAYPESNSRAIFSALKNLQDKIRRLELERIQAEESVKTLSRETIEYKKVLDEQIQERENSKNEESKHNQELTSQLLAAENKCNLLEKQLEYMRNMIKHAEMERTSVLEKQVSLERERQHDQTHVQSQLEKLDLLEQEYNKLTTMQALAEKKMQELEAKLHEEEQERKRMQAKAAELQTGLETNRLIFEDKATPCVPNARRIKKKKSKPPEKKSSRNYFGAQPHYRLCLGDMPFVAGKSTSPSHAVVANVQLVLHLMKQHSKALCNDRVINSIPLAKQVSSRGGKSKKLSVTPPSSNGINEELSEVLQTLQDEFGQMSFDHQQLAKLIQESPTVELKDKLECELEALVGRMEAKANQITKVRKYQAQLEKQKLEKQKKELKATKKTLDEERNSSSRSGITGTTNKKDFMKLRPGEKRRKNLQLLKDMQSIQNSLQSSSLCWDY

SEQ ID NO: 5143 - protein, 737 aa, Homo sapiens
MPLNRTLSMSSLPGLEDWEDEFDLENAVLFEVAWEVANKVGGIYTVLQTKAKVTGDEWGDNYFLVGPYTEQGVRTQVELLEAPTPALKRTLDSMNSKGCKVYFGRWLIEGGPLVVLLDVGASAWALERWKGELWDTCNIGVPWYDREANDAVLFGFLTTWFLGEFLAQSEEKPHVVAHFHEWLAGVGLCLCRARRLPVATIFTTHATLLGRYLCAGAVDFYNNLENFNVDKEAGERQIYHRYCMERAAAHCAHVFTTVSQITAIEAQHLLKRKPDIVTPNGLNVKKFSAMHEFQNLHAQSKARIQEFVRGHFYGHLDFNLDKTLYFFIAGRYEFSNKGADVFLEALARLNYLLRVNGSEQTVVAFFIMPARTNNFNVETLKGQAVRKQLWDTANTVKEKFGRKLYESLLVGSLPDMNKMLDKEDFTMMKRAIFATQRQSFPPVCTHNMLDDSSDPILTTIRRIGLFNSSADRVKVIFHPEFLSSTSPLLPVDYEEFVRGCHLGVFPSYYEPWGYTPAECTVMGIPSISTNLSGFGCFMEEHIADPSAYGIYILDRRFRSLDDSCSQLTSFLYSFCQQSRRQRIIQRNRTERLSDLLDWKYLGRYYMSARHMALSKAFPEHFTYEPNEADAAQGYRYPRPASVPPSPSLSRHSSPHQSEDEEDPRNGPLEEDGERYDEDEEAAKDRRNIRAPEWPRRASCTSSTSGSKRNSVDTATSSSLSTPSEPLSPTSSLGEERN

SEQ ID NO: 5144 - protein, 1411 aa, Homo sapiens
MLRRILQRTPGRVGSQGSDLDSSATPINTVDVNNESSSEGFICPQCMKSLGSADELFKHYEAVHDAGNDSGHGGESNLALKRDDVTLLRQEVQDLQASLKEEKWYSEELKKELEKYQGLQQQEAKPDGLVTDSSAELQSLEQQLEEAQTENFNIKQMKDLFEQKAAQLATEIADIKSKYDEERSLREAAEQKVTRLTEELNKEATVIQDLKTELLQRPGIEDVAVLKKELVQVQTLMDNMTLERERESEKLKDECKKLQSQYASSEATISQLRSELAKGPQEVAVYVQELQKLKSSVNELTQKNQTLTENLLKKEQDYTKLEEKHNEESVSKKNIQATLHQKDLDCQQLQSRLSASETSLHRIHVELSEKGEATQKLKEELSEVETKYQHLKAEFKQLQQQREEKEQHGLQLQSEINQLHSKLLETERQLGEAHGRLKEQRQLSSEKLMDKEQQVADLQLKLSRLEEQLKEKVTNSTELQHQLDKTKQQHQEQQALQQSTTAKLREAQNDLEQVLRQIGDKDQKIQNLEALLQKSKENISLLEKEREDLYAKIQAGEGETAVLNQLQEKNHTLQEQVTQLTEKLKNQSESHKQAQENLHDQVQEQKAHLRAAQDRVLSLETSVNELNSQLNESKEKVSQLDIQIKAKTELLLSAEAAKTAQRADLQNHLDTAQNALQDKQQELNKITTQLDQVTAKLQDKQEHCSQLESHLKEYKEKYLSLEQKTEELEGQIKKLEADSLEVKASKEQALQDLQQQRQLNTDLELRATELSKQLEMEKEIVSSTRLDLQKKSEALESIKQKLTKQEEEKKILKQDFETLSQETKIQHEELNNRIQTTVTELQKVKMEKEALMTELSTVKDKLSKVSDSLKNSKSEFEKENQKGKAAILDLEKTCKELKHQLQVQMENTLKEQKELKKSLEKEKEASHQLKLELNSMQEQLIQAQNTLKQNEKEEQQLQGNINELKQSSEQKKKQIEALQGELKIAVLQKTELENKLQQQLTQAAQELAAEKEKISVLQNNYEKSQETFKQLQSDFYGRESELLATRQDLKSVEEKLSLAQEDLISNRNQIGNQNKLIQELKTAKATLEQDSAKKEQQLQERCKALQDIQKEKSLKEKELVNEKSKLAEIEEIKCRQEKEITKLNEELKSHKLESIKEITNLKDAKQLLIQQKLELQGKADSLKAAVEQEKRNQQILKDQVKKEEEELKKEFIEKEAKLHSEIKEKEVGMKKHEENEAKLTMQITALNENLGTVKKEWQSSQRRVSELEKQTDDLRGEIAVLEATVQNNQDERRALLERCLKGEGEIEKLQTKVLELQRKLDNTTAAVQELGRENQSLQIKHTQALNRKWAEDNEVQNCMACGKGFSVTVRRHHCRQCGNIFCAECSAKNALTPSSKKPVRVCDACFNDLQG

SEQ ID NO: 5145 - protein, 677 aa, Homo sapiens
MAKVNITRDLIRRQIKERGALSFERRYHVTDPFIRRLGLEAELQGHSGCVNCLEWNEKGDLLASGSDDQHTIVWDPLHHKKLLSMHTGHTANIFSVKFLPHAGDRILITGAADSKVHVHDLTVKETIHMFGDHTNRVKRIATAPMWPNTFWSAAEDGLIRQYDLRENSKHSEVLIDLTEYCGQLVEAKCLTVNPQDNNCLAVGASGPFVRLYDIRMIHNHRKSMKQSPSAGVHTFCDRQKPLPDGAAQYYVAGHLPVKLPDYNNRLRVLVATYVTFSPNGTELLVNMGGEQVYLFDLTYKQRPYTFLLPRKCHSSGEVQNGKMSTNGVSNGVSNGLHLHSNGFRLPESRGHVSPQVELPPYLERVKQQANEAFACQQWTQAIQLYSKAVQRAPHNAMLYGNRAAAYMKRKWDGDHYDALRDCLKAISLNPCHLKAHFRLARCLFELKYVAEALECLDDFKGKFPEQAHSSACDALGRDITAALFSKNDGEEKKGPGGGAPVRLRSTSRKDSISEDEMVLRERSYDYQFRYCGHCNTTTDIKEANFFGSNAQYIVSGSDDGSFFIWEKETTNLVRVLQGDESIVNCLQPHPSYCFLATSGIDPVVRLWNPRPESEDLTGRVVEDMEGASQANQRRMNADPLEVMLLNMGYRITGLSSGGAGASDDEDSSEGQVQCRPS

SEQ ID NO: 5146 - protein, 1349 aa, Homo sapiens
MIWYVATFIASVIGTRGLAAEGAHGLREEPEFVTARAGESVVLRCDVIHPVTGQPPPYVVEWFKFGVPIPIFIKFGYYPPHVDPEYAGRASLHDKASLRLEQVRSEDQGWYECKVLMLDQQYDTFHNGSWVHLTINAPPTFTETPPQYIEAKEGGSITMTCTAFGNPKPIVTWLKEGTLLGASGKYQVSDGSLTVTSVSREDRGAYTCRAYSIQGEAVHTTHLLVQGPPFIVSPPENITVNISQDALLTCRAEAYPGNLTYTWYWQDENVYFQNDLKLRVRILIDGTLIIFRVKPEDSGKYTCVPSNSLGRSPSASAYLTVQYPARVLNMPPVIYVPVGIHGYIRCPVDAEPPATVVKWNKDGRPLQVEKNLGWTLMEDGSIRIEEATEEALGTYTCVPYNTLGTMGQSAPARLVLKDPPYFTVLPGWEYRQEAGRELLIPCAAAGDPFPVITWRKVGKPSRSKHSALPSGSLQFRALSKEDHGEWECVATNVVTSITASTHLTVIGTSPHAPGSVRVQVSMTTANVSWEPGYDGGYEQTFSVWMKRAQFGPHDWLSLPVPPGPSWLLVDTLEPETAYQFSVLAQNKLGTSAFSEVVTVNTLAFPITTPEPLVLVTPPRCLIANRTQQGVLLSWLPPANHSFPIDRYIMEFRVAERWELLDDGIPGTEGEFFAKDLSQDTWYEFRVLAVMQDLISEPSNIAGVSSTDIFPQPDLTEDGLARPVLAGIVATICFLAAAILFSTLAACFVNKQRKRKLKRKKDPPLSITHCRKSLESPLSSGKVSPESIRTLRAPSESSDDQGQPAAKRMLSPTREKELSLYKKTKRAISSKKYSVAKAEAEAEATTPIELISRGPDGRFVMDPAEMEPSLKSRRIEGFPFAEETDMYPEFRQSDEENEDPLVPTSVAALKSQLTPLSSSQESYLPPPAYSPRFQPRGLEGPGGLEGRLQATGQARPPAPRPFHHGQYYGYLSSSSPGEVEPPPFYVPEVGSPLSSVMSSPPLPTEGPFGHPTIPEENGENASNSTLPLTQTPTGGRSPEPWGRPEFPFGGLETPAMMFPHQLPPCDVPESLQPKAGLPRGLPPTSLQVPAAYPGILSLEAPKGWAGKSPGRGPVPAPPAAKWQDRPMQPLVSQGQLRHTSQGMGIPVLPYPEPAEPGAHGGPSTFGLDTRWYEPQPRPRPSPRQARRAEPSLHQVVLQPSRLSPLTQSPLSSRTGSPELAARARPRPGLLQQAEMSEITLQPPAAVSFSRKSTPSTGSPSQSSRSGSPSYRPAMGFTTLATGYPSPPPGPAPAGPGDSLDVFGQTPSPRRTGEELLRPETPPPTLPTSGKLQRDRPAPATSPPERALSKL

SEQ ID NO: 5147 - protein, 1388 aa, Homo sapiens
MSRPPPTGKMPGAPETAPGDGAGASRQRKLEALIRDPRSPINVESLLDGLNSLVLDLDFPALRKNKNIDNFLNRYEKIVKKIRGLQMKAEDYDVVKVIGRGAFGEVQLVRHKASQKVYAMKLLSKFEMIKRSDSAFFWEERDIMAFANSPWVVQLFYAFQDDRYLYMVMEYMPGGDLVNLMSNYDVPEKWAKFYTAEVVLALDAIHSMGLIHRDVKPDNMLLDKHGHLKLADFGTCMKMDETGMVHCDTAVGTPDYISPEVLKSQGGDGFYGRECDWWSVGVFLYEMLVGDTPFYADSLVGTYSKIMDHKNSLCFPEDAEISKHAKNLICAFLTDREVRLGRNGVEEIRQHPFFKNDQWHWDNIRETAAPVVPELSSDIDSSNFDDIEDDKGDVETFPIPKAFVGNQLPFIGFTYYRENLLLSDSPSCRETDSIQSRKNEESQEIQKKLYTLEEHLSNEMQAKEELEQKCKSVNTRLEKTAKELEEEITLRKSVESALRQLEREKALLQHKNAEYQRKADHEADKKRNLENDVNSLKDQLEDLKKRNQNSQISTEKVNQLQRQLDETNALLRTESDTAARLRKTQAESSKQIQQLESNNRDLQDKNCLLETAKLKLEKEFINLQSALESERRDRTHGSEIINDLQGRICGLEEDLKNGKILLAKVELEKRQLQERFTDLEKEKSNMEIDMTYQLKVIQQSLEQEEAEHKATKARLADKNKIYESIEEAKSEAMKEMEKKLLEERTLKQKVENLLLEAEKRCSLLDCDLKQSQQKINELLKQKDVLNEDVRNLTLKIEQETQKRCLTQNDLKMQTQQVNTLKMSEKQLKQENNHLMEMKMNLEKQNAELRKERQDADGQMKELQDQLEAEQYFSTLYKTQVRELKEECEEKTKLGKELQQKKQELQDERDSLAAQLEITLTKADSEQLARSIAEEQYSDLEKEKIMKELEIKEMMARHKQELTEKDATIASLEETNRTLTSDVANLANEKEELNNKLKDVQEQLSRLKDEEISAAAIKAQFEKQLLTERTLKTQAVNKLAEIMNRKEPVKRGNDTDVRRKEKENRKLHMELKSEREKLTQQMIKYQKELNEMQAQIAEESQIRIELQMTLDSKDSDIEQLRSQLQALHIGLDSSSIGSGPGDAEADDGFPESRLEGWLSLPVRNNTKKFGWVKKYVIVSSKKILFYDSEQDKEQSNPYMVLDIDKLFHVRPVTQTDVYRADAKEIPRIFQILYANEGESKKEQEFPVEPVGEKSNYICHKGHEFIPTLYHFPTNCEACMKPLWHMFKPPPALECRRCHIKCHKDHMDKKEEIIAPCKVYYDISTAKNLLLLANSTEEQQKWVSRLVKKIPKKPPAPDPFARSSPRTSMKIQQNQSIRRPSRQLAPNKPS

SEQ ID NO: 5148 - protein, 749 aa, Homo sapiens [sequence omitted]

SEQ ID NO: 5149 - protein, 1551 aa, Homo sapiens
MGFCLALAWTLLVGAWTPLGAQNPISWEVQRFDGWYNNLMEHRWGSKGSRLQRLVPASYADGVYQPLGEPHLPNPRDLSNTISRGPAGLASLRNRTVLGVFFGYHVLSDLVSVETPGCPAEFLNIRIPPGDPMFDPDQRGDVVLPFQRSRWDPETGRSPSNPRDPANQVTGWLDGSAIYGSSHSWSDALRSFSRGQLASGPDPAFPRDSQNPLLMWAAPDPATGQNGPRGLYAFGAERGNREPFLQALGLLWFRYHNLWAQRLARQHPDWEDEELFQHARKRVIATYQNIAVYEWLPSFLQKTLPEYTGYRPFLDPSISSEFVAASEQFLSTMVPPGVYMRNASCHFQGVINRNSSVSRALRVCNSYWSREHPSLQSAEDVDALLLGMASQIAEREDHVLVEDVRDFWPGPLKFSRTDHLASCLQRGRDLGLPSYTKARAALGLSPITRWQDINPALSRSNDTVLEATAALYNQDLSWLELLPGGLLESHRDPGPLFSTIVLEQFVRLRDGDRYWFENTRNGLFSKKEIEEIRNTTLQDVLVAVINIDPSALQPNVFVWHKGDPCPQPRQLSTEGLPACAPSVVRDYFEGSGFGFGVTIGTLCCFPLVSLLSAWIVARLRMRNFKRLQGQDRQSIVSEKLVGGMEALEWQGHKEPCRPVLVYLQPGQIRVVDGRLTVLRTIQLQPPQKVNFVLSSNRGRRTLLLKIPKEYDLVLLFNLEEERQALVENLRGALKESGLSIQEWELREQELMRAAVTREQRRHLLETFFRHLFSQVLDINQADAGTLPLDSSQKVREALTCELSRAEFAESLGLKPQDMFVESMFSLADKDGNGYLSFREFLDILVVFMKGSPEEKSRLMFRMYDFDGNGLISKDEFIRMLRSFIEISNNCLSKAQLAEVVESMFRESGFQDKEELTWEDFHFMLRDHNSELRFTQLCVKGVEVPEVIKDLCRRASYISQDMICPSPRVSARCSRSDIETELTPQRLQCPMDTDPPQEIRRRFGKKVTSFQPLLFTEAHREKFQRSCLHQTVQQFKRFIENYRRHIGCVAVFYAIAGGLFLERAYYYAFAAHHTGITDTTRVGIILSRGTAASISFMFSYILLTMCRNLITFLRETFLNRYVPFDAAVDFHRLIASTAIVLTVLHSVGHVVNVYLFSISPLSVLSCLFPGLFHDDGSELPQKYYWWFFQTVPGLTGVVLLLILAIMYVFASHHFRRRSFRGFWLTHHLYILLYVLLIIHGSFALIQLPRFHIFFLVPAIIYGGDKLVSLSRKKVEISVVKAELLPSGVTHLRFQRPQGFEYKSGQWVRIACLALGTTEYHPFTLTSAPHEDTLSLHIRAAGPWTTRLREIYSAPTGDRCARYPKLYLDGPFGEGHQEWHKFEVSVLVGGGIGVTPFASILKDLVFKSSVSCQVFCKKIYFIWVTRTQRQFEWLADIIREVEENDHQDLVSVHIYITQLAEKFDLRTTMLYICERHFQKVLNRSLFTGLRSITHFGRPPFEPFFNSLQEVHPQVRKIGVFSCGPPGMTKNVEKACQLINRQDRTHFSHHYENF

SEQ ID NO: 5150 - protein, 340 aa, Homo sapiens
MATLRRLREAPRHLLVCEKSNFGNHKSRHRHLVQTHYYNYRVSFLIPECGILSEELKNLVMNTGPYYFVKNLPLHELITPEFISTFIKKGKLILSLDKDTYEETGLQGHPSQFSGRKIMKFIVSIDLMELSLNLDSKKYERISWSFKEKKPLKFDFLLAWHKTGSEESTMMSYFSKYQIQEHQPKVALSTLRDLQCPVLQSSELEGTPEVSCRALELFDWLGAVFSNVDLNNEPNNFISTYCCPEPSTVVAKAYLCTITGFILPEKICLLLEHLCHYFDEPKLAPWVTLSVQGFADSPVSWEKNEHGFRKGGEHLYNFVIFNNQDYWLQMAVGANDHCPP

SEQ ID NO: 5151 - protein, 277 aa, Homo sapiens
MSAPAAKVSKKELNSNHDGADETSEKEQQEAIEHIDEVQNEIDRLNEQASEEILKVEQKYNKLRQPFFQKRSELIAKIPNFWVTTFVNHPQVSALLGEEDEEALHYLTRVEVTEFEDIKSGYRIDFYFDENPYFENKVLSKEFHLNESGDPSSKSTEIKWKSGKDLTKRSSQTQNKASRKRQHEEPESFFTWFTDHSDAGADELGEVIKDDIWPNPLQYYLVPDMDDEEGEGEEDDDDDEEEEGLEDIDEEGDEDEGEEDEDDDEGEEGEEDEGEDD

SEQ ID NO: 5152 - protein, 1159 aa, Homo sapiens
MLDFLAENNLCGQAILRIVSCGNAIIAELLRLSEFIPAVFRLKDRADQQKYGDIIFDFSYFKGPELWESKLDAKPELQDLDEEFRENNIEIVTRFYLAFQSVHKYIVDLNRYLDDLNEGVYIQQTLETVLLNEDGKQLLCEALYLYGVMLLVIDQKIEGEVRERMLVSYYRYSAARSSADSNMDDICKLLRSTGYSSQPGAKRPSNYPESYFQRVPINESFISMVIGRLRSDDIYNQVSAYPLPEHRSTALANQAAMLYVILYFEPSILHTHQAKMREIVDKYFPDNWVISIYMGITVNLVDAWEPYKAAKTALNNTLDLSNVREQASRYATVSERVHAQVQQFLKEGYLREEMVLDNIPKLLNCLRDCNVAIRWLMLHTADSACDPNNKRLRQIKDQILTDSRYNPRILFQLLLDTAQFEFILKEMFKQMLSEKQTKWEHYKKEGSERMTELADVFSGVKPLTRVEKNENLQAWFREISKQILSLNYDDSTAAGRKTVQLIQALEEVQEFHQLESNLQVCQFLADTRKFLHQMIRTINIKEEVLITMQIVGDLSFAWQLIDSFTSIMQESIRVNPSMVTKLRATFLKLASALDLPLLRINQANSPDLLSVSQYYSGELVSYVRKVLQIIPESMFTSLLKIIKLQTHDIIEVPTRLDKDKLRDYAQLGPRYEVAKLTHAISIFTEGILMMKTTLVGIIKVDPKQLLEDGIRKELVKRVAFALHRGLIFNPRAKPSELMPKLKELGATMDGFHRSFEYIQDYVNIYGLKIWQEEVSRIINYNVEQECNNFLRTKIQDWQSMYQSTHIPIPKFTPVDESVTFIGRLCREILRITDPKMTCHIDQLNTWYDMKTHQEVTSSRLFSEIQTTLGTFGLNGLDRLLCFMIVKELQNFLSMFQKIILRDRTVQDTLKTLMNAVSPLKSIVANSNKIYFSAIAKTQKIWTAYLEAIMKVGQMQILRQQIANELNYSCRFDSKHLAAALENLNKALLADIEAHYQDPSLPYPKEDNTLLYEITAYLEAAGIHNPLNKIYITTKRLPYFPIVNFLFLIAQLPKLQYNKNLGMVCRKPTDPVDWPPLVLGLLTLLKQFHSRYTEQFLALIGQFICSTVEQCTSQKIPEIPADVVGALLFLEDYVRYTKLPRRVAEAHVPNFIFDEFRTVL

SEQ ID NO: 5153 - protein, 387 aa, Homo sapiens
MTGKLAEKLPVTMSSLLNQLPDNLYPEEIPSALNLFSGSSDSVVHYNQMATENVMDIGLTNEKPNPELSYSGSFQPAPGNKTVTYLGKFAFDSPSNWCQDNIISLMSAGILGVPPASGALSTQTSTASMVQPPQGDVEAMYPALPPYSNCGDLYSEPVSFHDPQGNPGLAYSPQDYQSAKPALDSNLFPMIPDYNLYHHPNDMGSIPEHKPFQGMDPIRVNPPPITPLETIKAFKDKQIHPGFGSLPQPPLTLKPIRPRKYPNRPSKTPLHERPHACPAEGCDRRFSRSDELTRHLRIHTGHKPFQCRICMRSFSRSDHLTTHIRTHTGEKPFACEFCGRKFARSDERKRHAKIHLKQKEKKAEKGGAPSASSAPPVSLAPVVTTCA

SEQ ID NO: 5154 - protein, 453 aa, Homo sapiens
MKLLVILLFSGLITGFRSDSSSSLPPKLLLVSFDGFRADYLKNYEFPHLQNFIKEGVLVEHVKNVFITKTFPNHYSIVTGLYEESHGIVANSMYDAVTKKHFSDSNDKDPFWWNEAVPIWVTNQLQENRSSAAAMWPGTDVPIHDTISSYFMNYNSSVSFEERLNNITMWLNNSNPPVTFATLYWEEPDASGHKYGPEDKENMSRVLKKIDDLIGDLVQRLKMLGLWENLNVIITSDHGMTQCSQDRLINLDSCIDHSYYTLIDLSPVAAILPKINRTEVYNKLKNCSPHMNVYLKEDIPNRFYYQHNDRIQPIILVADEGWTIVLNESSQKLGDHGYDNSLPSMHPFLAAHGPAFHKGYKHSTINIVDIYPMMCHILGLKPHPNNGTFGHTKCLLVDQWCINLPEAIAIVIGSLLVLTMLTCLIIIMQNRLSVPRPFSRLQLQEDDDDPLIG

SEQ ID NO: 5155 - protein, 1062 aa, Homo sapiens
MEVYASEKEQHGDLCRPGEHVTSRFKNEVERMGFDMNNAWRISNINEKYKLCGSYPQELIVPAWITDKELESVSSFRSWKRIPAVIYRHQSNGAVIARCGQPEVSWWGWRNADDEHLVQSVAKACASDSRSSGSKLSTRNTSRDFPNGGDLSDVEFDSSLSNASGAESLAIQPQKLLILDARSYAAAVANRAKGGGCECPEYYPNCEVVFMGMANIHSIRRSFQSLRLLCTQMPDPGNWLSALESTKWLHHLSVLLKSALLVVHAVDQDQRPVLVHCSDGWDRTPQIVALAKLLLDPYYRTIEGFQVLVEMEWLDFGHKFADRCGHGENSDDLNERCPVFLQWLDCVHQLQRQFPCSFEFNEAFLVKLVQHTYSCLFGTFLCNNAKERGEKHTQERTCSVWSLLRAGNKAFKNLLYSSQSEAVLYPVCHVRNLMLWSAVYLPCPSPTTPVDDSCAPYPAPGTSPDDPPLSRLPKTRSYDNLTTACDNTVPLASRRCSDPSLNEKWQEHRRSLELSSLAGPGEDPLSADSLGKPTRVPGGAELSVAAGVAEGQMENILQEATKEESGVEEPAHRAGIEIQEGKEDPLLEKESRRKTPEASAIGLHQDPELGDAALRSHLDMSWPLFSQGISEQQSGLSVLLSSLQVPPRGEDSLEVPVEQFRIEEIAEGREEAVLPIPVDAKVGYGTSQSCSLLPSQVPFETRGPNVDSSTDMLVEDKVKSVSGPQGHHRSCLVNSGKDRLPQTMEPSPSETSLVERPQVGSVVHRTSLGSTLSLTRSPCALPLAECKEGLVCNGAPETENRASEQPPGLSTLQMYPTPNGHCANGEAGRSKDSLSRQLSAMSCSSAHLHSRNLHHKWLHSHSGRPSATSSPDQPSRSHLDDDGMSVYTDTIQQRLRQIESGHQQEVETLKKQVQELKSRLESQYLTSSLHFNGDFGDEVTSIPDSESNLDQNCLSRCSTEIFSEASWEQVDKQDTEMTRWLPDHLAAHCYACDSAFWLASRKHHCRNCGNVFCSSCCNQKVPVPSQQLFEPSRVCKSCYSSLHPTSSSIDLELDKPIAATSN

SEQ ID NO: 5156 - protein, 149 aa, Homo sapiens
MRYNEKELQALSRQPAEMAAELGMRGPKKGSVLKRRLVKLVVNFLFYFRTDEAEPVGALLLERCRVVREEPGTFSISFIEDPERKYHFECSSEEQCQEWMEALRRASYEFMRRSLIFYRNEIRKVTGKDPLEQFGISEEARFQLSGLQA

SEQ ID NO: 5157 - protein, 517 aa, Homo sapiens
MPPPGKVPRKENLWLQCEWGSCSFVCSTMEKFFEHVTQHLQQHLHGSGEEEEEEEEDDPLEEEFSCLWQECGFCSLDSSADLIRHVYFHCYHTKLKQWGLQALQSQADLGPCILDFQSRNVIPDIPDHFLCLWEHCENSFDNPEWFYRHVEAHSLCCEYEAVGKDNPVVLCGWKGCTCTFKDRSKLREHLRSHTQEKVVACPTCGGMFANNTKFLDHIRRQTSLDQQHFQCSHCSKRFATERLLRDHMRNHVNHYKCPLCDMTCPLPSSLRNHMRFRHSEDRPFKCDCCDYSCKNLIDLQKHLDTHSEEPAYRCDFENCTFSARSLCSIKSHYRKVHEGDSEPRYKCHVCDKCFTRGNNLTVHLRKKHQFKWPSGHPRFRYKEHEDGYMRLQLVRYESVELTQQLLRQPQEGSGLGTSLNESSLQGIILETVPGEPGRKEEEEEGKGSEGTALSASQDNPSSVIHVVNQTNAQGQQEIVYYVLSEAPGEPPPAPEPPSGGIMEKLQGIAEEPEIQMV

SEQ ID NO: 5158 - protein, 876 aa, Homo sapiens
MMADGAAAGAGGSPSLRELRARMVAAANEIAKERRKQDVVNRVATHSSNIRSTFKPVIDGSMLKNDIKQRLARERREEKRRQQDANKETQLLEKERKTKLQYEKQMEERQRKLKERKEKEEQRRIAAEEKRHQKDEAQKEKFTAILYRTLERRRLADDYQQKRWSWGGSAMANSESKTANKRSASTEKLEQGTSALIRQMPLSSAGLQNSVAKRKTDKERSSSLNRRDSNLHSSTDKEQAERKPRVTGVTNYVMQYVTVPLRKCTSDELRAVMFPMSTMKIPPQTKVEESPLEKVETPPKASVDAPPQVNVEVFCNTSMEASPKAGVGMAPEVSTDSFPVVSVDVSPVVSTYDSEMSMDASPELSIEALPKVDLETVPKVSIVASPEASLEAPPEVSLEALPEVSVEAAPEGSLEAPPKGSAEVAPKESVKGSPKESMEASPEAMVKASPKTSLEASMEASPKAKARDAPKKSEMDKQALIPIAKKRLSSYTECYKWSSSPENACGLPSPISTNRQIQKNCPPSPLPLISKQSPQTSFPYKIMPIQHTLSVQSASSTVKKKKETVSKTTNRCEALSQRHMIYEESGNKSTAGIMNAEAATKILTELRRLAREQREKEEEERQREEMQQRVIKKSKDMAKEAVGGQAEDHLKLKDGQQQNETKKKKGWLDQEDQEAPLQKGDAKIKAQEEADKRKKEHERIMLQNLQERLERKKRIEEIMKRTRKTDVNASKVTETSSHDIYEEAEADNEESDKDSLNEMFPSAILNGTGSPTKFKMPFNNAKKMTHKLVFLEDGTSQVRKEPKTYFNGDLKNFRQKSMKDTSIQEVVSRPSSKRMTSHTTKTRKADETNTTSRSSAQTKSEGFHDILPKSSDTFRQ

SEQ ID NO: 5159 - protein, 196 aa, Homo sapiens
MNNGGKAEKENTPSEANLQEEEVRTLFVSGLPLDIKPRELYLLFRPFKGYEGSLIKLTSKQPVGFVSFDSRSEAEAAKNALNGIRFDPEIPQTLRLEFAKANTKMAKNKLVGTPNPSTPLPNTVPQFIAREPYELTVPALYPSSPEVWAPYPLYPAELAPALPPPAFTYPASLHAQMRWLPPSEATSQGWKSRQFC

SEQ ID NO: 5160 - protein, 709 aa, Homo sapiens
MESPTKEIEEFESNSLKYLQPEQIEKIWLRLRGLRKYKKTSQRLRSLVKQLERGEASVVDLKKNLEYAATVLESVYIDETRRLLDTEDELSDIQSDAVPSEVRDWLASTFTRQMGMMLRRSDEKPRFKSIVHAVQAGIFVERMYRRTSNMVGLSYPPAVIEALKDVDKWSFDVFSLNEASGDHALKFIFYELLTRYDLISRFKIPISALVSFVEALEVGYSKHKNPYHNLMHAADVTQTVHYLLYKTGVANWLTELEIFAIIFSAAIHDYEHTGTTNNFHIQTRSDPAILYNDRSVLENHHLSAAYRLLQDDEEMNILINLSKDDWREFRTLVIEMVMATDMSCHFQQIKAMKTALQQPEAIEKPKALSLMLHTADISHPAKAWDLHHRWTMSLLEEFFRQGDREAELGLPFSPLCDRKSTMVAQSQVGFIDFIVEPTFTVLTDMTEKIVSPLIDETSQTGGTGQRRSSLNSISSSDAKRSGVKTSGSEGSAPINNSVISVDYKSFKATWTEVVHINRERWRAKVPKEEKAKKEAEEKARLAAEEQQKEMEAKSQAEEGASGKAEKKTSGETKNQVNGTRANKSDNPRGKNSKAEKSSGEQQQNGDFKDGKNKTDKKDHSNIGNDSKKTDGTKQRSHGSPAPSTSSTCRLTLPVIKPPLRHFKRPAYASSSYAPSVSKKTDEHPARYKMLDQRIKMKKIQNISHNWNRK

SEQ ID NO: 5161 - protein, 217 aa, Homo sapiens
MEGSFSDGGALPEGLAEEAEPQGAAWSGDSGTVSQSHSSASGPWEDEGAEDGAPGRDLPLLRRAAAGYAACLLPGAGARPEVEALDASLEDLLTRVDEFVGMLDMLRGDSSHVVSEGVPRIHAKAAEMRRIYSRIDRLEAFVRMVGGRVARMEEQVTKAEAELGTFPRAFKKLLHTMNVPSLFSKSAPSRPQQAGYEAPVLFRTEDYFPCCSERPQL

SEQ ID NO: 5162 - protein, 932 aa, Homo sapiens
MSEAGGRGCGSPVPQRARWRLVAATAAFCLVSATSVWTAGAEPMSREEKQKLGNQVLEMFDHAYGNYMEHAYPADELMPLTCRGRVRGQEPSRGDVDDALGKFSLTLIDSLDTLVVLNKTKEFEDAVRKVLRDVNLDNDVVVSVFETNIRVLGGLLGGHSLAIMLKEKGEYMQWYNDELLQMAKQLGYKLLPAFNTTSGLPYPRINLKFGIRKPEARTGTETDTCTACAGTLILEFAALSRFTGATIFEEYARKALDFLWEKRQRSSNLVGVTINIHTGDWVRKDSGVGAGIDSYYEYLLKAYVLLGDDSFLERFNTHYDAIMRYISQPPLLLDVHIHKPMLNARTWMDALLAFFPGLQVLKGDIRPAIETHEMLYQVIKKHNFLPEAFTTDFRVHWAQHPLRPEFAESTYFLYKATGDPYYLEVGKTLIENLNKYARVPCGFAAMKDVRTGSHEDRMDSFFLAEMFKYLYLLFADKEDIIFDIEDYIFTTEAHLLPLWLSTTNQSISKKNTTSEYTELDDSNFDWTCPNTQILFPNDPLYAQSIREPLKNVVDKSCPRGIIRVEESFRSGAKPPLRARDFMATNPEHLEILKKMGVSLIHLKDGRVQLVQHAIQAASSIDAEDGLRFMQEMIELSSQQQKEQQLPPRAVQIVSHPFFGRVVLTAGPAQFGLDLSKHKETRGFVASSKPSNGCSELTNPEAVMGKIALIQRGQCMFAEKARNIQNAGAIGGIVIDDNEGSSSDTAPLFQMAGDGKDTDDIKIPMLFLFSKEGSIILDAIREYEEVEVLLSDKAKDRDPEMENEEQPSSENDSQNQSGEQISSSSQEVDLVDQESSEENSLNSHPESLSLADMDNAASISPSEQTSNPTENHETTNLNGECTDLDNQLQEQSETEEDSNPNVSWGKKVQPIDSILADWNEDIEAFEMMEKDEL

SEQ ID NO: 5163 - protein, 127 aa, Homo sapiens
MRPLDIDEVEAPEEVEVLEPEEDFEQFLLPVINEMREDIASLIREHGRAYLRTRSKLWEMDNMLIQIKTQVEASEESALNHVQHPSGEADERVSELCEKAEEKAKEIAKMAEMLVELVWRIERSESS

SEQ ID NO: 5164 - protein, 167 aa, Homo sapiens
MAASVCSGLLGPRVLSWSRELPCAWRALHTSPVCAKNRAARVRVSKGDKPVTYEEAHAPHYIAHRKGWLSLHTGNLDGEDHAAERTVEDVFLRKFMWGTFPGCLADQLVLKRRGNQLEICAVVLRQLSPHKYYFLVGYSETLLSYFYKCPVRLHLQTVPSKVVYKYL

SEQ ID NO: 5165 - protein, 667 aa, Homo sapiens
MAAETLLSSLLGLLLLGLLLPASLTGGVGSLNLEELSEMRYGIEILPLPVMGGQSQSSDVVIVSSKYKQRYECRLPAGAIHFQREREEETPAYQGPGIPELLSPMRDAPCLLKTKDWWTYEFCYGRHIQQYHMEDSEIKGEVLYLGYYQSAFDWDDETAKASKQHRLKRYHSQTYGNGSKCDLNGRPREAEVRFLCDEGAGISGDYIDRVDEPLSCSYVLTIRTPRLCPHPLLRPPPSAAPQAILCHPSLQPEEYMAYVQRQADSKQYGDKIIEELQDLGPQVWSETKSGVAPQKMAGASPTKDDSKDSDFWKMLNEPEDQAPGGEEVPAEEQDPSPEAADSASGAPNDFQNNVQVKVIRSPADLIRFIEELKGGTKKGKPNIGQEQPVDDAAEVPQREPEKERGDPERQREMEEEEDEDEDEDEDEDERQLLGEFEKELEGILLPSDRDRLRSEVKAGMERELENIIQETEKELDPDGLKKESERDRAMLALTSTLNKLIKRLEEKQSPELVKKHKKKRVVPKKPPPSPQPTEEDPEHRVRVRVTKLRLGGPNQDLTVLEMKRENPQLKQIEGLVKELLEREGLTAAGKIEIKIVRPWAEGTEEGARWLTDEDTRNLKEIFFNILVPGAEEAQKERQRQKELESNYRRVWGSPGGEGTGDLDEFDF

SEQ ID NO: 5166 - protein, 313 aa, Homo sapiens
MSQSRHRAEAPPLEREDSGTFSLGKMITAKPGKTPIQVLHEYGMKTKNIPVYECERSDVQIHVPTFTFRVTVGDITCTGEGTSKKLAKHRAAEAAINILKANASICFAVPDPLMPDPSKQPKNQLNPIGSLQELAIHHGWRLPEYTLSQEGGPAHKREYTTICRLESFMETGKGASKKQAKRNAAEKFLAKFSNISPENHISLTNVVGHSLGCTWHSLRNSPGEKINLLKRSLLSIPNTDYIQLLSEIAKEQGFNITYLDIDELSANGQYQCLAELSTSPITVCHGSGISCGNAQSDAAHNALQYLKIIAERK

SEQ ID NO: 5167 - protein, 572 aa, Homo sapiens
MAELVQGQSAPVGMKAEGFVDALHRVRQIAAKIDSIPHLNNSTPLVDPSVYGYGVQKRPLDDGVGNQLGALVHQRTVITEEFKVPDKMVGFIIGRGGEQISRIQAESGCKIQIASESSGIPERPCVLTGTPESIEQAKRLLGQIVDRCRNGPGFHNDIDSNSTIQEILIPASKVGLVIGRGGETIKQLQERTGVKMVMIQDGPLPTGADKPLRITGDAFKVQQAREMVLEIIREKDQADFRGVRGDFNSRMGGGSIEVSVPRFAVGIVIGRNGEMIKKIQNDAGVRIQFKPDDGISPERAAQVMGPPDRCQHAAHIISELILTAQERDGFGGLAAARGRGRGRGDWSVGAPGGVQEITYTVPADKCGLVIGKGGENIKSINQQSGAHVELQRNPPPNSDPNLRRFTIRGVPQQIEVARQLIDEKVGGTNLGAPGAFGQSPFSQPPAPPHQNTFPPRSSGCFPNMAAKVNGNPHSTPVSGPPAFLTQGWGSTYQAWQQPTQQVPSQQSQPQSSQPNYSKAWEDYYKKQSHAASAAPQASSPPDYTMAWAEYYRQQVAFYGQTLGQAQAHSQEQ

SEQ ID NO: 5168 - protein, 428 aa, Homo sapiens
MSYYLSSENHLDPGPIYMRENGQLHMVNLALDGVRSSLQKPRPFRLFPKGFSVELCMNREDDTARKEKTDHFIFTYTREGNLRYSAKSLFSLVLGFISDNVDHIDSLIGFPEQIAEKLFSAAEARQKFTEPGAGLRALQKFTEAYGSLVLCSLCLRNRYLVISEKLEEIKSFRELTCLDLSCCKLGDEHELLEHLTNEALSSVTQLHLKDNCLSDAGVRKMTAPVRVMKRGLENLTLLDLSCNPEITDAGIGYLFSFRKLNCLDISGTGLKDIKTVKHKLQTHIGLVHSKVPLKEFDHSNCKTEGWADQIVLQWERVTAEAVKPRETSEPRAAAQRFYGKRSRAEAPLKCPLADTHMNSSEKLQFYKEKAPDCHGPVLKHEAISSQESKKSKKRPFEESETEQNNSSQPSKQKYVCLAVEDWDLLNSY

SEQ ID NO: 5169 - protein, 710 aa, Homo sapiens
MVKLAKAGKNQGDPKKMAPPPKEVEEDSEDEEMSEDEEDDSSGEEVVIPQKKGKKAAATSAKKVVVSPTKKVAVATPAKKAAVTPGKKAAATPAKKTVTPAKAVTTPGKKGATPGKALVATPGKKGAAIPAKGAKNGKNAKKEDSDEEEDDDSEEDEEDDEDEDEDEDEIEPAAMKAAAAAPASEDEDDEDDEDDEDDDDDEEDDSEEEAMETTPAKGKKAAKVVPVKAKNVAEDEDEEEDDEDEDDDDDEDDEDDDDEDDEEEEEEEEEEPVKEAPGKRKKEMAKQKAAPEAKKQKVEGTEPTTAFNLFVGNLNFNKSAPELKTGISDVFAKNDLAVVDVRIGMTRKFGYVDFESAEDLEKALELTGLKVFGNEIKLEKPKGKDSKKERDARTLLAKNLPYKVTQDELKEVFEDAAEIRLVSKDGKSKGIAYIEFKTEADAEKTFEEKQGTEIDGRSISLYYTGEKGQNQDYRGGKNSTWSGESKTLVLSNLSYSATEETLQEVFEKATFIKVPQNQNGKSKGYAFIEFASFEDAKEALNSCNKREIEGRAIRLELQGPRGSPNARSQPSKTLFVKGLSEDTTEETLKESFDGSVRARIVTDRETGSSKGFGFVDFNSEEDAKAAKEAMEDGEIDGNKVTLDWAKPKGEGGFGGRGGGRGGFGGRGGGRGGRGGFGGRGRGGFGGRGGFRGGRGGGGDHKPQGKKTKFE

SEQ ID NO: 5170 - protein, 216 aa, Homo sapiens
MSEAYFRVESGALGPEENFLSLDDILMSHEKLPVRTETAMPRLGAFFLERSAGAETDNAVPQGSKLELPLWLAKGLFDNKRRILSVELPKIYQEGWRTVFSADPNVVDLHKMGPHFYGFGSQLLHFDSPENADISQSLLQTFIGRFRRIMDSSQNAYNEDTSALVARLDEMERGLFQTGQKGLNDFQCWEKGQASQITASNLVQNYKKRKFTDMED

SEQ ID NO: 5171 - protein, 913 aa, Homo sapiens
MGPEALSSLLLLLLVASGDADMKGHFDPAKCRYALGMQDRTIPDSDISASSSWSDSTAARHSRLESSDGDGAWCPAGSVFPKEEEYLQVDLQRLHLVALVGTQGRHAGGLGKEFSRSYRLRYSRDGRRWMGWKDRWGQEVISGNEDPEGVVLKDLGPPMVARLVRFYPRADRVMSVCLRVELYGCLWRDGLLSYTAPVGQTMYLSEAVYLNDSTYDGHTVGGLQYGGLGQLADGVVGLDDFRKSQELRVWPGYDYVGWSNHSFSSGYVEMEFEFDRLRAFQAMQVHCNNMHTLGARLPGGVECRFRRGPAMAWEGEPMRHNLGGNLGDPRARAVSVPLGGRVARFLQCRFLFAGPWLLFSEISFISDVVNNSSPALGGTFPPAPWWPPGPPPTNFSSLELEPRGQQPVAKAEGSPTAILIGCLVAIILLLLLIIALMLWRLHWRRLLSKAERRVLEEELTVHLSVPGDTILINNRPGPREPPPYQEPRPRGNPPHSAPCVPNGSALLLSNPAYRLLLATYARPPRGPGPPTPAWAKPTNTQAYSGDYMEPEKPGAPLLPPPPQNSVPHYAEADIVTLQGVTGGNTYAVPALPPGAVGDGPPRVDFPRSRLRFKEKLGEGQFGEVHLCEVDSPQDLVSLDFPLNVRKGHPLLVAVKILRPDATKNARNDFLKEVKIMSRLKDPNIIRLLGVCVQDDPLCMITDYMENGDLNQFLSAHQLEDKAAEGAPGDGQAAQGPTISYPMLLHVAAQIASGMRYLATLNFVHRDLATRNCLVGENFTIKIADFGMSRNLYAGDYYRVQGRAVLPIRWMAWECILMGKFTTASDVWAFGVTLWEVLMLCRAQPFGQLTDEQVIENAGEFFRDQGRQVYLSRPPACPQGLYELMLRCWSRESEQRPPFSQLHRFLAEDALNTV

SEQ ID NO: 5172 - protein, 597 aa, Homo sapiens
MSSKGSSTDGRTDLANGSLSSSPEEMSGAEEGRETSSGIEVEASDLSLSLTGDDGGPNRTSTESRGTDTESSGEDKDSDSMEDTGHYSINDENRVHDRSEEEEEEEEEEEEEQPRRRVQRKRANRDQDSSDDERALEDWVSSETSALPRPRWQALPALRERELGSSARFVYEACGARVFVQRFRLQHGLEGHTGCVNTLHFNQRGTWLASGSDDLKVVVWDWVRRQPVLDFESGHKSNVFQAKFLPNSGDSTLAMCARDGQVRVAELSATQCCKNTKRVAQHKGASHKLALEPDSPCTFLSAGEDAVVFTIDLRQDRPASKLVVTKEKEKKVGLYTIYVNPANTHQFAVGGRDQFVRIYDQRKIDENENNGVLKKFCPHHLVNSESKANITCLVYSHDGTELLASYNDEDIYLFNSSHSDGAQYVKRYKGHRNNATVKGVNFYGPKSEFVVSGSDCGHIFLWEKSSCQIIQFMEGDKGGVVNCLEPHPHLPVLATSGLDHDVKIWAPTAEASTELTGLKDVIKKNKRERDEDSLHQTDLFDSHMLWFLMHHLRQRRHHRRWREPGVGATDADSDESPSSSDTSDEEEGPDRVQCMPS

SEQ ID NO: 5173 - protein, 455 aa, Homo sapiens
MDRFTVAGVLPDIEQFFNIGDSSSGLIQTVFISSYMVLAPVFGYLGDRYNRKYLMCGGIAFWSLVTLGSSFIPGEHFWLLLLTRGLVGVGEASYSTIAPTLIADLFVADQRSRMLSIFYFAIPVGSGLGYIAGSKVKDMAGDWHWALRVTPGLGVVAVLLLFLVVREPPRGAVERHSDLPPLNPTSWWADLRALARNPSFVLSSLGFTAVAFVTGSLALWAPAFLLRSRVVLGETPPCLPGDSCSSSDSLIFGLITCLTGVLGVGLGVEISRRLRHSNPRADPLVCATGLLGSAPFLFLSLACARGSIVATYIFIFIGETLLSMNWAIVADILLYVVIPTRRSTAEAFQIVLSHLLGDAGSPYLIGLISDRLRRNWPPSFLSEFRALQFSLMLCAFVGALGGAAFLGTAIFIEADRRRAQLHVQGLLHEAGSTDDRIVVPQRGRSTRVPVASVLI

SEQ ID NO: 5174 - protein, 441 aa, Homo sapiens
MKLALLLPWACCCLCGSALATGFLYPFSAAALQQHGYPEPGAGSPGSGYASRRHWCHHTVTRTVSCQVQNGSETVVQRVYQSCRWPGPCANLVSYRTLIRPTYRVSYRTVTVLEWRCCPGFTGSNCDEECMNCTRLSDMSERLTTLEAKVLLLEAAERPSSPDNDLPAPESTPPTWNEDFLPDAIPLAHPVPRQRRPTGPAGPPGQTGPPGPAGPPGSKGDRGQTGEKGPAGPPGLLGPPGPRGLPGEMGRPGPPGPPGPAGNPGPSPNSPQGALYSLQPPTDKDNGDSRLASAIVDTVLAGVPGPRGPPGPPGPPGPRGPPGPPGTPGSQGLAGERGTVGPSGEPGVKGEEGEKAATAEGEGVQQLREALKILAERVLILEHMIGIHDPLASPEGGSGQDAALRANLKMKRGGAQPDGVLAALLGPDPGQKSVDQASSRK

SEQ ID NO: 5175 - protein, 444 aa, Homo sapiens
MSSGLRAADFPRWKRHISEQLRRRDRLQRQAFEEIILQYNKLLEKSDLHSVLAQKLQAEKHDVPNRHEIRRRQARLQKELAEAAKEPLPVEQDDDIEVIVDETSDHTEETSPVRAISRAATRRSVSSFPVPQDNVDTHPGSGKEVRVPATALCVFDAHDGEVNAVQFSPGSRLLATGGMDRRVKLWEVFGEKCEFKGSLSGSNAGITSIEFDSAGSYLLAASNDFASRIWTVDDYRLRHTLTGHSGKVLSAKFLLDNARIVSGSHDRTLKLWDLRSKVCIKTVFAGSSCNDIVCTEQCVMSGHFDKKIRFWDIRSESIVREMELLGKITALDLNPERTELLSCSRDDLLKVIDLRTNAIKQTFSAPGFKCGSDWTRVVFSPDGSYVAAGSAEGSLYIWSVLTGKVEKVLSKQHSSSINAVAWSPSGSHVVSVDKGCKAVLWAQY

SEQ ID NO: 5176 - protein, 834 aa, Homo sapiens
MKHTLALLAPLLGLGLGLALSQLAAGATDCKFLGPAEHLTFTPAARARWLAPRVRAPGLLDSLYGTVRRFLSVVQLNPFPSELVKALLNELASVKVNEVVRYEAGYVVCAVIAGLYLLLVPTAGLCFCCCRCHRRCGGRVKTEHKALACERAALMVFLLLTTLLLLIGVVCAFVTNQRTHEQMGPSIEAMPETLLSLWGLVSDVPQELQAVAQQFSLPQEQVSEELDGVGVSIGSAIHTQLRSSVYPLLAAVGSLGQVLQVSVHHLQTLNATVVELQAGQQDLEPAIREHRDRLLELLQEARCQGDCAGALSWARTLELGADFSQVPSVDHVLHQLKGVPEANFSSMVQEENSTFNALPALAAMQTSSVVQELKKAVAQQPEGVRTLAEGFPGLEAASRWAQALQEVEESSRPYLQEVQRYETYRWIVGCVLCSVVLFVVLCNLLGLNLGIWGLSARDDPSHPEAKGEAGARFLMAGVGLSFLFAAPLILLVFATFLVGGNVQTLVCQSWENGELFEFADTPGNLPPSMNLSQLLGLRKNISIHQAYQQCKEGAALWTVLQLNDSYDLEEHLDINQYTNKLRQELQSLKVDTQSLDLLSSAARRDLEALQSSGLQRIHYPDFLVQIQRPVVKTSMEQLAQELQGLAQAQDNSVLGQRLQEEAQGLRNLHQEKVVPQQSLVAKLNLSVRALESSAPNLQLETSDVLANVTYLKGELPAWAARILRNVSECFLAREMGYFSQYVAWVREEVTQRIATCQPLSGALDNSRVILCDMMADPWNAFWFCLAWCTFFLIPSIIFAVKTSKYFRPIRKRLSSTSSEETQLFHIPRVTSLKL

SEQ ID NO: 5177 - protein, 456 aa, Homo sapiens
MKIEEVKSTTKTQRIASHSHVKGLGLDESGLAKQAASGLVGQENAREACGVIVELIKSKKMAGRAVLLAGPPGTGKTALALAIAQELGSKVPFCPMVGSEVYSTEIKKTEVLMENFRRAIGLRIKETKEVYEGEVTELTPCETENPMGGYGKTISHVIIGLKTAKGTKQLKLDPSIFESLQKERVEAGDVIYIEANSGAVKRQGRCDTYATEFDLEAEEYVPLPKGDVHKKKEIIQDVTLHDLDVANARPQGGQDILSMMGQLMKPKKTEITDKLRGEINKVVNKYIDQGIAELVPGVLFVDEVHMLDIECFTYLHRALESSIAPIVIFASNRGNCVIRGTEDITSPHGIPLDLLDRVMIIRTMLYTPQEMKQIIKIRAQTEGINISEEALNHLGEIGTKTTLRYSVQLLTPANLLAKINGKDSIEKEHVEEISELFYDAKSSAKILADQQDKYMK

SEQ ID NO: 5178 - protein, 442 aa, Homo sapiens
MAEGEGYFAMSEDELACSPYIPLGGDFGGGDFGGGDFGGGDFGGGGSFGGHCLDYCESPTAHCNVLNWEQVQRLDGILSETIPIHGRGNFPTLELQPSLIVKVVRRRLAEKRIGVRDVRLNGSAASHVLHQDSGLGYKDLDLIFCADLRGEGEFQTVKDVVLDCLLDFLPEGVNKEKITPLTLKEAYVQKMVKVCNDSDRWSLISLSNNSGKNVELKFVDSLRRQFEFSVDSFQIKLDSLLLFYECSENPMTETFHPTIIGESVYGDFQEAFDHLCNKIIATRNPEEIRGGGLLKYCNLLVRGFRPASDEIKTLQRYMCSRFFIDFSDIGEQQRKLESYLQNHFVGLEDRKYEYLMTLHGVVNESTVCLMGHERRQTLNLITMLAIRVLADQNVIPNVANVTCYYQPAPYVADANFSNYYIAQVQPVFTCQQQTYSTWLPCN

SEQ ID NO: 5179 - protein, 1208 aa, Homo sapiens
MKVVPEKNAVRILWGRERGARAMGAQRLLQELVEDKTRWMKWEGKRVELPDSPRSTFLLAFSPDRTLLASTHVNHNIYITEVKTGKCVHSLIGHRRTPWCVTFHPTISGLIASGCLDGEVRIWDLHGGSESWFTDSNNAIASLAFHPTAQLLLIATANEIHFWDWSRREPFAVVKTASEMERVRLVRFDPLGHYLLTAIVNPSNQQGDDEPEIPIDGTELSHYRQRALLQSQPVRRTPLLHNFLHMLSSRSSGIQTEPFHPPEQASSTQQDQGLLNRPSAFSTVQSSTAGNTLRNLSLGPTRRSLGGPLSSHPSRYHREIAPGLTGSEWTRTVLSLNSRSEAESMPPPRTSASSVSLLSVLRQQEGGSQASVYTSATEGRGFPASGLATESDGGNGSSQNNSGSIRHELQCDLRRFFLEYDRLQELDQSLSGEAPQTQQAQEMLNNNIESERPGPSHQPTPHSSENNSNLSRGHLNRCRACHNLLTFNNDTLRWERTTPNYSSGEASSSWQVPSSFESVPSSGSQLPPLERTEGQTPSSSRLELSSSASPQEERTVGVAFNQETGHWERIYTQSSRSGTVSQEALHQDMPEESSEEDSLRRRLLESSLISLSRYDGAGSREHPIYPDPARLSPAAYYAQRMIQYLSRRDSIRQRSMRYQQNRLRSSTSSSSSDNQGPSVEGTDLEFEDFEDNGDRSRHRAPRNARMSAPSLGRFVPRRFLLPEYLPYAGIFHERGQPGLATHSSVNRVLAGAVIGDGQSAVASNIANTTYRLQWWDFTKFDLPEISNASVNVLVQNCKIYNDASCDISADGQLLAAFIPSSQRGFPDEGILAVYSLAPHNLGEMLYTKRFGPNAISVSLSPMGRYVMVGLASRRILLHPSTEHMVAQVFRLQQAHGGETSMRRVFNVLYPMPADQRRHVSINSARWLPEPGLGLAYGTNKGDLVICRPEALNSGVEYYWDQLNETVFTVHSNSRSSERPGTSRATWRTDRDMGLMNAIGLQPRNPATSVTSQGTQTLALQLQNAETQTEREVPEPGTAASGPGEGEGSEYGASGEDALSRIQRLMAEGGMTAVVQREQSTTMASMGGFGNNIIVSHRIHRSSQTGTEPGAAHTSSPQPSTSRGLLPEAGQLAERGLSPRTASWDQPGTPGREPTQPTLPSSSPVPIPVSLPSAEGPTLHCELTNNNHLLDGGSSRGDAAGPRGEPRNR

SEQ ID NO: 5180 - protein, 423 aa, Homo sapiens
MAAPRVFPLSCAVQQYAWGKMGSNSEVARLLASSDPLAQIAEDKPYAELWMGTHPRGDAKILDNRISQKTLSQWIAENQDSLGSKVKDTFNGNLPFLFKVLSVETPLSIQAHPNKELAEKLHLQAPQHYPDANHKPEMAIALTPFQGLCGFRPVEEIVTFLKKVPEFQFLIGDEAATHLKQTMSHDSQAVASSLQSCFSHLMKSEKKVVVEQLNLLVKRISQQAAAGNNMEDIFGELLLQLHQQYPGDIGCFAIYFLNLLTLKPGEAMFLEANVPHAYLKGDCVECMACSDNTVRAGLTPKFIDVPTLCEMLSYTPSSSKDRLFLPTRSQEDPYLSIYDPPVPDFTIMKTEVPGSVTEYKVLALDSASILLMVQGTVIASTPTTQTPIPLQRGGVLFIGANESVSLKLTEPKDLLIFRACCLL

SEQ ID NO: 5181 - protein, 612 aa, Homo sapiens
MDVSLCPAKCSFWRIFLLGSVWLDYVGSVLACPANCVCSKTEINCRRPDDGNLFPLLEGQDSGNSNGNASINITDISRNITSIHIENWRSLHTLNAVDMELYTGLQKLTIKNSGLRSIQPRAFAKNPHLRYINLSSNRLTTLSWQLFQTLSLRELQLEQNFFNCSCDIRWMQLWQEQGEAKLNSQNLYCINADGSQLPLFRMNISQCDLPEISVSHVNLTVREGDNAVITCNGSGSPLPDVDWIVTGLQSINTHQTNLNWTNVHAINLTLVNVTSEDNGFTLTCIAENVVGMSNASVALTVYYPPRVVSLEEPELRLEHCIEFVVRGNPPPTLHWLHNGQPLRESKIIHVEYYQEGEISEGCLLFNKPTHYNNGNYTLIAKNPLGTANQTINGHFLKEPFPESTDNFILFDEVSPTPPITVTHKPEEDTFGVSIAVGLAAFACVLLVVLFVMINKYGRRSKFGMKGPVAVISGEEDSASPLHHINHGITTPSSLDAGPDTVVIGMTRIPVIENPQYFRQGHNCHKPDTWVFSNIDNHGILNLKDNRDHLVPSTHYIYEEPEVQSGEVSYPRSHGFREIMLNPISLPGHSKPLNHGIYVEDVNVYFSKGRHGF

SEQ ID NO: 5182 - protein, 324 aa, Homo sapiens
MEPSALGPWSLFPDLAPRDQEGQVLAPRRCFRRECGQNEKVVIMCASSDTIRSIMLVAHRHGMTSGDYAFFNIELFNSSSYGDGSWKRGDKHDFEAKQAYSSLQTVTLLRTVKPEFEKFSMEVKSSVEKQGLNMEDYVNMFVEGFHDAILLYVLALHEVLRAGYSKKDGGKIIQQTWNRTFEGIAGQVSIDANGDRYGDFSVIAMTDVEAGTQEVIGDYFGKEGRFEMRPNVKYPWGPLKLRIDENRIVEHTNSSPCKSCGLEESAVTGIVVGALLGAGLLMAFYFFRKKYRITIERRTQQEESNLGKHRELREDSIRSHFSVA

SEQ ID NO: 5183 - protein, 392 aa, Homo sapiens
MAVVAAAAGWLLRLRAAGAEGHWRRLPGAGLARGFLHPAATVEDAAQRRQVAHFTFQPDPEPREYGQTQKMNLFQSVTSALDNSLAKDPTAVIFGEDVAFGGVFRCTVGLRDKYGKDRVFNTPLCEQGIVGFGIGIAVTGATAIAEIQFADYIFPAFDQIVNEAAKYRYRSGDLFNCGSLTIRSPWGCVGHGALYHSQSPEAFFAHCPGIKVVIPRSPFQAKGLLLSCIEDKNPCIFFEPKILYRAAAEEVPIEPYNIPLSQAEVIQEGSDVTLVAWGTQVHVIREVASMAKEKLGVSCEVIDLRTIIPWDVDTICKSVIKTGRLLISHEAPLTGGFASEISSTVQEECFLNLEAPISRVCGYDTPFPHIFEPFYIPDKWKCYDALRKMINY

SEQ ID NO: 5184 - protein, 127 aa, Homo sapiens
MRPLDIVELAEPEEVEVLEPEEDFEQFLLPVINEMREDIASLTREHGRAYLRNRSKLWEMDNMLIQIKTQVEASEESALNHLQNPGDAAEGRAAKRCEKAEEKAKEIAKMAEMLVELVRRIEKSESS

SEQ ID NO: 5185 - protein, 541 aa, Homo sapiens
MPRRKQSHPQPVKCEGVKVDTEDSLDEGPGALVLESDLLLGQDLEFEEEEEEEEGDGNSDQLMGFERDSEGDSLGARPGLPYGLSDDESGGGRALSAESEVEEPARGPGEARGERPGPACQLCGGPTGEGPCCGAGGPGGGPLLPPRLLYSCRLCTFVSHYSSHLKRHMQTHSGEKPFRCGRCPYASAQLVNLTRHTRTHTGEKPYRCPHCPFACSSLGNLRRHQRTHAGPPTPPCPTCGFRCCTPRPARPPSPTEQEGAVPRRPEDALLLPDLSLHVPPGGASFLPDCGQLRGEGEGLCGTGSEPLPELLFPWTCRGCGQELEEGEGSRLGAAMCGRCMRGEAGGGASGGPQGPSDKGFACSLCPFATHYPNHLARHMKTHSGEKPFRCARCPYASAHLDNLKRHQRVHTGEKPYKCPLCPYACGNLANLKRHGRIHSGDKPFRCSLCNYSCNQSMNLKRHMLRHTGEKPFRCATCAYTTGHWDNYKRHQKVHGHGGAGGPGLSASEGWAPPHSPPSVLSSRGPPALGTAGSRAVHTDSS

SEQ ID NO: 5186 - protein, 800 aa, Homo sapiens
MAANVGDQRSTDWSSQYSMVAGAGRENGMETPMHENPEWEKARQALASISKSGAAGGSAKSSSNGPVASAQYVSQAEASALQQQQYYQWYQQYNYAYPYSYYYPMSMYQSYGSPSQYGMAGSYGSATPQQPSAPQHQGTLNQPPVPGMDESMSYQAPPQQLPSAQPPQPSNPPHGAHTLNSGPQPGTAPATQHSQAGPATGQAYGPHTYTEPAKPKKGQQLWNRMKPAPGTGGLKFNIQKRPFAVTTQSFGSNAEGQHSGFGPQPNPEKVQNHSGSSARGNLSGKPDDWPQDMKEYVERCFTACESEEDKDRTEKLLKEVLQARLQDGSAYTIDWSREPLPGLTREPVAESPKKKRWEAASSLHPPRGAGSATRGGGAPSQRGTPGAGGAGRARGNSFTKFGNRNVFMKDNSSSSSTDSRSRSSSRSPTRHFRRSDSHSDSDSSYSGNECHPVGRRNPPPKGRGGRGAHMDRGRGRAQRGKRHDLAPTKRSRKKMAALECEDPERELKKQKRAARFQHGHSRRLRLEPLVLQMSSLESSGADPDWQELQIVGTCPDITKHYLRLTCAPDPSTVRPVAVLKKSLCMVKCHWKEKQDYAFACEQMKSIRQDLTVQGIRTEFTVEVYETHARIALEKGDHEEFNQCQTQLKSLYAENLPGNVGEFTAYRILYYIFTKNSGDITTELAYLTRELKADPCVAHALALRTAWALGNYHRFFRLYCHAPCMSGYLVDKFADRERKVALKAMIKTFRPALPVSYLQAELAFEGEAACRAFLEPLGLAYTGPDNSSIDCRLSLAQLSAF

SEQ ID NO: 5187 - protein, 200 aa, Homo sapiens
MPLVEERHRILNETGKILLEKFGGSFLNCVRESENSAQKLMHLVVESFPSYRDVTLFEGKRVSFYKRAQILVADTWSVLEGKGDGCFKDISSITMFADYRLPQVLAHLGALKYSDDLLKKLLKGEMLSYGDRQEVEIRGCSLWCVELIRDCLLELIEQKGEKPNGEINSILLDYYLWDYAHDHREDMKGIPFHRIRCIYY

SEQ ID NO: 5188 - protein, 270 aa, Homo sapiens
MTQNTVIVNGVAMASRPSQPTHVNVHIHQESALTQLLKAGGSLKKFLFHPGDTVPSTARIGYEQLALGVTQILLGVVSCVLGVCLSLGPWTVLSASGCAFWAGSVVIAAGAGAIVHEKHPGKLAGYISSLLTLAGFATAMAAVVLCVNSFIWQTEPFLYIDTVCDRSDPVFPTTGYRWMRRSQENQWQKEECRAYMQMLRKLFTAIRALFLAVCVLKVIVSLVSLGVGLRNLCGQSSQPLNEEGSEKRLLGENSVPPSPSREQTSTAIVL

SEQ ID NO: 5189 - protein, 390 aa, Homo sapiens
MVEADRPGKLFIGGLNTETNEKALETVFGKYGRIVEVLLIKDRETNKSRGFAFVTFESPADAKDAARDMNGKSLDGKAIKVEQATKPSFERGRHGPPPPPRSRGPPRGFGAGRGGSGGTRGPPSRGGHMDDGGYSMNFNMSSSRGPLPVKRGPPPRSGGPSPKRSAPSGLVRSSSGMGGRAPLSRGRDSYGGPPRREPLPSRRDVYLSPRDDGYSTKDSYSSRDYPSSRDTRDYAPPPRDYTYRDYGHSSSRDDYPSRGYGDRDGYGRDRDYSDHPSGGSYRDSYESYGNSRSAPLTRGPPPSYGGSSRYDDYSSSRDGYGGSRDSYSSSRSDLYSSCDRVGRQERGLPPSVERGYPSSRDSYSSSSRGAPRGAGPGGSRSDRGGGRSRY

SEQ ID NO: 5190 - protein, 262 aa, Homo sapiens
MARRSRHRLLLLLLRYLVVALGYHKAYGFSAPKDQQVVTAVEYQGDFKNRAEMIDFNIRIKNVTRSDAGKYRCEVSAPSEQGQNLEEDTVTLEVLVAPAVPSCEVPSSALSGTVVELRCQDKEGNPAPEYTWFKDGIRLLENPRLGSQSTNSSYTMNTKTGTLQFNTVSKLDTGEYSCEARNSVGYRRCPGKRMQVDDLNISGIIAAVVVVALVISVCGLGVCYAQRKGYFSKETSFQKSNSSSKATTMSENDFKHTKSFII

SEQ ID NO: 5191 - protein, 757 aa, Homo sapiens
MKVFCEVLEELYKKVLLGATLENDSHDYIFYLNPAVSDQDCSTATSLEWANTCGIQGRHQPISVGVAPIAVAPVCLKTNSQMSGSREVMLLQLTVIKVMTTRILSVKTEFHAKEQYRDVIKILLESAKVDSKLICMFQNSDKLLSHMAAQCLALLLYFQLREKITLSNSWIAFCQKNLSEYSESNKAIYCLWTLTAIIKEIFKDSCSQKTEILKQFLTHFDTIFEVFYNSLFSQHFENCRDTSKIVNILMCFLDLLELLIASRIHLKLHFTCQRILFLKPSCMLEVITWPIQAFVKRKVIIFLKKCLLCKVGEDLCRGSVPALMPPDHHVAVDMLALANAVLQAVNSGLLKTLSVYEKHSFFGGDEVQPECELITSPDHVILRAASLVIMKSLEIKFQNYSSASEVKVDLQRFMSELLTFLKPHLQPSLQLHNPCKWLSRVFIEQDDDMLEAAKASLGIYLTLTRGCEATESLTQGKEMWDHHTHENGYNPHCIFLFFLKNIGFDSTVLLDFLISSETCFLEYFVRYLKLLQKDWDNFFTICNNFDATESKYDISICGCVPSLVQDQSSNQTIPHRLTAPHSHRDVCARHSWASDAPSEPLKAVMSKGAHTMCASSLSSPRASQSLVDYDSSDDSDVESTEQCLANSKQTSLHQQATKEIQDAAGTSRDKKEFSLEPPSRPLVLKEFDTAFSFDCEVAPNDVVSEVGIFYRIVKCFQELQDAICRLQKKNLFPYNPTALLKLLKYIEVISNKTMNTL

SEQ ID NO: 5192 - protein, 85 aa, Homo sapiens
MKKVLLLITAILAVAVGFPVSQDQEREKRSISDSDELASGFFVFPYPYPFRPLPPIPFPRFPWFRRNFPIPIPESAPTTPLPSEK

SEQ ID NO: 5193 - protein, 858 aa, Homo sapiens
MLQTKDLIWTLFFLGTAVSLQVDIVPSQGEISVGESKFFLCQVAGDAKDKDISWFSPNGEKLTPNQQRISVVWNDDSSSTLTIYNANIDDAGIYKCVVTGEDGSESEATVNVKIFQKLMFKNAPTPQEFREGEDAVIVCDVVSSLPPTIIWKHKGRDVILKKDVRFIVLSNNYLQIRGIKKTDEGTYRCEGRILARGEINFKDIQVIVNVPPTIQARQNIVNATANLGQSVTLVCDAEGFPEPTMSWTKDGEQIEQEEDDEKYIFSDDSSQLTIKKVDKNDEAEYICIAENKAGEQDATIHLKVFAKPKITYVENQTAMELEEQVTLTCEASGDPIPSITWRTSTRNISSEEKASWTRPEKQETLDGHMVVRSHARVSSLTLKSIQYTDAGEYICTASNTIGQDSQSMYLEVQYAPKLQGPVAVYTWEGNQVNITCEVFAYPSATISWFRDGQLLPSSNYSNIKIYNTPSASYLEVTPDSENDFGNYNCTAVNRIGQESLEFILVQADTPSSPSIDQVEPYSSTAQVQFDEPEATGGVPILKYKAEWRAVGEEVWHSKWYDAKEASMEGIVTIVGLKPETTYAVRLAALNGKGLGEISAASEFKTQPVQGEPSAPKLEGQMGEDGNSIKVNLIKQDDGGSPIRHYLVRYRALSSEWKPEIRLPSGSDHVMLKSLDWNAEYEVYVVAENQQGKSKAAHFVFRTSAQPTAIPANGSPTSGLSTGAIVGILIVIFVLLLVVVDITCYFLNKCGLFMCIAVNLCGKAGPGAKGKDMEEGKAAFSKDESKEPIVEVRTEEERTPNHDGGKHTEPNETTPLTEPEKGPVEAKPECQETETKPAPAEVKTVPNDATQTKENESKA

SEQ ID NO: 5194 - protein, 372 aa, Homo sapiens
MDVLSPLSFIKVSHVRMQGILLLVFAKYQHLPYIQILSTKSTPTGLFGYWGNKGGVNICLKLYGYYVSIINCHLPPHISNNYQRLEHFDRILEMQNCEGRDIPNILDHDLIIWFGDMNFRIEDFGLHFVRESIKNRCYGGLWEKDQLSIAKKHDPLLREFQEGRLLFPPTYKFDRNSNDYDTSEKKRKPAWTDRILWRLKRQPCAGPDTPIPPASHFSLSLRGYSSHMTYGISDHKPVSGTFDLELKPLVSAPLIVLMPEDLWTVENDMMVSYSSTSDFPSSPWDWIGLYKVGLRDVNDYVSYAWVGDSKVSCSDNLNQVYIDISNIPTTEDEFLLCYYSNSLRSVVGISRPFQIPPGSLREDPLGEAQPQI

SEQ ID NO: 5195 - protein, 618 aa, Homo sapiens
MRALENDFFNSPPRKTVRFGGTVTEVLLKYKKGETNDFELLKNQLLDPDIKDDQIINWLLEFRSSIMYLTKDFEQLISIILRLPWLNRSQTVVEEYLAFLGNLVSAQTVFLRPCLSMIASHFVPPRVIIKEGDVDVSDSDDEDDNLPANFDTCHRALQIIARYVPSTPWFLMPILVEKFPFVRKSERTLECYVHNLLRISVYFPTLRHEILELIIEKLLKLDVNASRQGIEDAEETATQTCGGTDSTEGLFNMDEDEETEHETKAGPERLDQMVHPVAERLDILMSLVLSYMKDVCYVDGKVDNGKTKDLYRDLINIFDKLLLPTHASCHVQFFMFYLCSFKLGFAEAFLEHLWKKLQDPSNPAIIRQAAGNYIGSFLARAKFIPLITVKSCLDLLVNWLHIYLNNQDSGTKAFCDVALHGPFYSACQAVFYTFVFRHKQLLSGNLKEGLQYLQSLNFERIVMSQLNPLKICLPSVVNFFAAITNKYQLVFCYTIIERNNRQMLPVIRSTAGGDSVQICTNPLDTFFPFDPCVLKRSKKFIDPIYQVWEDMSAEELQEFKKPMKKDIVEDEDDDFLKGEVPQNDTVIGITPSSFDTHFRSPSSSVGSPPVLYMQPSPL

SEQ ID NO: 5196 - protein, 147 aa, Homo sapiens
MALKRINKELSDLARDPPAQCSAGPVGDDMFHWQATIMGPNDSPYQGGVFFLTIHFPTDYPFKPPKVAFTTRIYHPNINSNGSICLDILRSQWSPALTISKVLLSICSLLCDPNPDDPLVPEIARIYKTDRDKYNRISREWTQKYAM

SEQ ID NO: 5197 - protein, 1085 aa, Homo sapiens
MPHFTVVPVDGPRRGDYDNLEGLSWVDYGERAELDDSDGHGNHRESSPFLSPLEASRGIDYYDRNLALFEEELDIRPKVSSLLGKLVSYTNLTQGAKEHEEAESGEGTRRRAAEAPSMGTLMGVYLPCLQNIFGVILFLRLTWMVGTAGVLQALLIVLICCCCTLLTAISMSAIATNGVVPAGGSYFMISRSLGPEFGGAVGLCFYLGTTFAAAMYILGAIEILLTYIAPPAAIFYPSGAHDTSNATLNNMRVYGTIFLTFMTLVVFVGVKYVNKFASLFLACVIISILSIYAGGIKSIFDPPVFPVCMLGNRTLSRDQFDICAKTAVVDNETVATQLWSFFCHSPNLTTDSCDPYFMLNNVTEIPGIPGAAAGVLQENLWSAYLEKGDIVEKHGLPSADAPSLKESLPLYVVADIATSFTVLVGIFFPSVTGIMAGSNRSGDLRDAQKSIPVGTILAIITTSLVYFSSVVLFGACIEGVVLRDKYGDGVSRNLVVGTLAWPSPWVIVIGSFFSTCGAGLQSLTGAPRLLQAIAKDNIIPFLRVFGHGKVNGEPTWALLLTALIAELGILIASLDMVAPILSMFFLMCYLFVNLACAVQTLLRTPNWRPRFKYYHWALSFLGMSLCLALMFVSSWYYALVAMLIAGMIYKYIEYQGAEKEWGDGIRGLSLSAARYALLRLEEGPPHTKNWRPQLLVLLKLDEDLHVKYPRLLTFASQLKAGKGLTIVGSVIQGSFLESYGEAQAAEQTIKNMMEIEKVKGFCQVVVASKVREGLAHLIQSCGLGGMRHNSVVLGWPYGWRQSEDPRAWKTFIDTVRCTTAAHLALLVPKNIAFYPSNHERYLEGHIDVWWIVHDGGMLMLLPFLLRQHKVWRKCRMRIFTVAQMDDNSIQMKKDLAVFLYHLRLEAEVEVVEMHNSDISAYTYERTLMMEQRSQMLRQMRLTKTEREREAQLVKDRHSALRLESLYSDEEDESAVGADKIQMTWTRDKYMTETWDPSHAPDNFRELVHIKPDQSNVRRMHTAVKLNEVIVTRSHDARLVLLNMPGPPRNSEGDENYMEFLEVLTEGLERVLLVRGGGREVITIYS

SEQ ID NO: 5198 - protein, 501 aa, Homo sapiens
MAQALPWLLLWMGAGVLPAHGTQHGIRLPLRSGLGGAPLGLRLPRETDEEPEEPGRRGSFVEMVDNLRGKSGQGYYVEMTVGSPPQTLNILVDTGSSNFAVGAAPHPFLHRYYQRQLSSTYRDLRKGVYVPYTQGKWEGELGTDLVSIPHGPNVTVRANIAAITESDKFFINGSNWEGILGLAYAEIARPDDSLEPFFDSLVKQTHVPNLFSLQLCGAGFPLNQSEVLASVGGSMIIGGIDHSLYTGSLWYTPIRREWYYEVIIVRVEINGQDLKMDCKEYNYDKSIVDSGTTNLRLPKKVFEAAVKSIKAASSTEKFPDGFWLGEQLVCWQAGTTPWNIFPVISLYLMGEVTNQSFRITILPQQYLRPVEDVATSQDDCYKFAISQSSTGTVMGAVIMEGFYVVFDRARKRIGFAVSACHVHDEFRTAAVEGPFVTLDMEDCGYNIPQTDESTLMTIAYVMAAICALFMLPLCLMVCQWRCLRCLRQQHDDFADDISLLK

SEQ ID NO: 5199 - protein, 358 aa, Homo sapiens
MYASQWFLTLFTAKFPLCMVFHIIDLLLCEGLNIIFHVALALLKTSKEDLLQADFEGALKFFRVQLPKRYRAEENARRLMEQACNIKVPTKKLKKYEKEYQTMRESQLQQEDPMDRYKRENRRLQEASMRLEQENDDLAHELVTSKIALRNDLDQAEDKADVLNKELLLTKQRLVETEEEKRKQEEETAQLKEVFRKQLEKAEYEIKKTTAIIAEYKQICSQLSTRLEKQQAASKEELEVVKGKMMACKHCSDIFSKEGALKLAATGREDQGIETDDEKDSLKKQLREMELELAQTKLQLVEAKCKIQELEHQRGALMNEIQAAKNSWFSKTLNSIKTATGTQPLQPAPVTQPPKEST

SEQ ID NO: 5200 - protein, 256 aa, Homo sapiens
MKLLENSSFEAINSQLTVETGDAHIIGRIESYSCKMAGDDKHMFKQFCQEGQPHVLEALSPPQTSGLSPSRLSKSQGGEEEGPLSDKCSRKTLFYLIATLNESFRPDYDFSTARSHEFSREPSLSWVVNAVNCSLFSAVREDFKDLKPQLWNAVDEEICLAECDIYSYNPDLDSDPFGEDGSLWSFNYFFYNKRLKRIVFFSCRSISGSTYTPSEAGNELDMELGEEEVEEESRSGGSGAEETSTMEEDRVPVICI

SEQ ID NO: 5201 - protein, 345 aa, Homo sapiens
MWLLGPLCLLLSSAAESQLLPGNNFTNECNIPGNFMCSNGRCIPGAWQCDGLPDCFDKSDEKECPKAKSKCGPTFFPCASGIHCIIGRFRCNGFEDCPDGSDEENCTANPLLCSTARYHCKNGLCIDKSFICDGQNNCQDNSDEESCESSQEPGSGQVFVTSENQLVYYPSITYAIIGSSVIFVLVVALLALVLHHQRKRNNLMTLPVHRLQHPVLLSRLVVLDHPHHCNVTYNVNNGIQYVASQAEQNASEVGSPPSYSEALLDQRPAWYDLPPPPYSSDTESLNQADLPPYRSRSGSANSASSQAASSLLSVEDTSHSPGQPGPQEGTAEPRDSEPSQGTEEV

SEQ ID NO: 5202 - protein, 397 aa, Homo sapiens
MSWLFPLTKSASSSAAGSPGGLTSLQQQKQRLIESLRNSHSSIAEIQKDVEYRLPFTINNLTININILLPPQFPQEKPVISVYPPIRHHLMDKQGVYVTSPLVNNFTMHSDLGKIIQSLLDEFWKNPPVLAPTSTAFPYLYSNPSGMSPYASQGFPFLPPYPPQEANRSITSLSVADTVSSSTTSHTTAKPAAPSFGVLSNLPLPIPTVDASIPTSQNGFGYKMPDVPDAFPELSELSVSQLTDMNEQEEVLLEQFLTLPQLKQIITDKDDLVKSIEELARKNLLLEPSLEAKRQTVLDKYELLTQMKSTFEKKMQRQHELSESCSASALQARLKVAAHEAEEESDNIAEDFLEGKMEIDDFLSSFMEKRTICHCRRAKEEKLQQAIAMHSQFHAPL

SEQ ID NO: 5203 - protein, 317 aa, Homo sapiens
MWLYLAAFVGLYYLLHWYRERQVVSHLQDKYVFITGCDSGFGNLLARQLDARGLRVLAACLTEKGAEQLRGQTSDRLETVTLDVTKMESIAAATQWVKEHVGDRGLWGLVNNAGILTPITLCEWLNTEDSMNMLKVNLIGVIQVTLSMLPLVRRARGRIVNVSSILGRVAFFVGGYCVSKYGVEAFSDILRREIQHFGVKISIVEPGYFRTGMTNMTQSLERMKQSWKEAPKHIKETYGQQYFDALYNIMKEGLLNCSTNLNLVTDCMEHALTSVHPRTRYSAGWDAKFFFIPLSYLPTSLADYILTRSWPKPAQAV

SEQ ID NO: 5204 - protein, 1042 aa, Homo sapiens
MELQKGKGAAAAAAASGAAGGGGGGAGAGAPGGGRLLLSTSLDAKDELEERLERCMSIVTSMTAGVSEREANDALNAYVCKGLPQHEEICLGLFTLILTEPAQAQKCYRDLALVSRDGMNIVLNKINQILMEKYLKLQDTCRTQLVWLVRELVKSGVLGADGVCMTFMKQIAGGDVTAKNIWLAESVLDILTEQREWVLKSSILIAMAVYTYLRLIVDHHGTAQLQALRQKEVDFCISLLRERFMECLMIGRDLVRLLQNVARIPEFELLWKDIIHNPQALSPQFTGILQLLQSRTSRKFLACRLTPDMETKLLFMTSRVRFGQQKRYQDWFQRQYLSTPDSQSLRCDLIRYICGVVHPSNEVLSSDILPRWAIIGWLLTTCTSNVAASNAKLALFYDWLFFSPDKDSIMNIEPAILVMHHSMKPHPAITATLLDFMCRIIPNFYPPLEGHVRQGVFSSLNHIVEKRVLAHLAPLFDNPKLDKELRAMLREKFPEFCSSPSPPVEVKIEEPVSMEMDNHMSDKDESCYDNAEAAFSDDEEDLNSKGKKREFRFHPIKETVVEEPVDITPYLDQLDESLRDKVLQLQKGSDTEAQCEVMQEIVDQVLEEDFDSEQLSVLASCLQELFKAHFRGEVLPEEITEESLEESVGKPLYLIFRNLCQMQEDNSSFSLLLDLLSELYQKQPKIGYHLLYYLRASKAAAGKMNLYESFAQATQLGDLHTCLMMDMKACQEDDVRLLCHLTPSIYTEFPDETLRSGELLNMIVAVIDSAQLQELVCHVMMGNLVMFRKDSVLNILIQSLDWETFEQYCAWQLFLAHNIPLETIIPILQHLKYKEHPEALSCLLLQLRREKPSEEMVKMVLSRPCHPDDQFTTSILRHWCMKHDELLAEHIKSLLIKNNSLPRKRQSLRSSSSKLAQLTLEQILEHLDNLRLNLTNTKQNFFSQTPILQALQHVQASCDEAHKMKFSDLFSLAEEYEDSSTKPPKSRRKAALSSPRSRKNATQPPNAEEESGSSSASEEEDTKPKPTKRKRKGSSAVGSDSD

SEQ ID NO: 5205 - protein, 130 aa, Homo sapiens [sequence omitted]

SEQ ID NO: 5206 - protein, 168 aa, Homo sapiens
MFWKLSLSLFLVAVLVKVAEARKNRPAGAIPSPYKDGSSNNSERWQHQIKEVLASSQEALVVTERKYLKSDWCKTQPLRQTVSEEGCRSRTILNRFCYGQCNSFYIPRHVKKEEESFQSCAFCKPQRVTSVLVELECPGLDPPFRLKKIQKVKQCRCMSVNLSDSDKQ

SEQ ID NO: 5207 - protein, 327 aa, Homo sapiens
MAELPGPFLCGALLGFLCLSGLAVEVKVPTEPLSTPLGKTAELTCTYSTSVGDSFALEWSFVQPGKPISESHPILYFTNGHLYPTGSKSKRVSLLQNPPTVGVATLKLTDVHPSDTGTYLCQVNNPPDFYTNGLGLINLTVLVPPSNPLCSQSGQTSVGGSTALRCSSSEGAPKPVYNWVRLGTFPTPSPGSMVQDEVSGQLILTNLSLTSSGTYRCVATNQMGSASCELTLSVTEPSQGRVAGALIGVLLGVLLLSVAAFCLVRFQKERGKKPKETYGGSDLREDAIAPGISEHTCMRADSSKGFLERPSSASTVTTTKSKLPMVV

SEQ ID NO: 5208 - protein, 858 aa, Homo sapiens
MSVVGLDVGSQSCYIAVARAGGIETIANEFSDRCTPSVISFGSKNRTIGVAAKNQQITHANNTVSNFKRFHGRAFNDPFIQKEKENLSYDLVPLKNGGVGIKVMYMGEEHLFSVEQITAMLLTKLKETAENSLKKPVTDCVISVPSFFTDAERRSVLDAAQIVGLNCLRLMNDMTAVALNYGIYKQDLPSLDEKPRIVVFVDMGHSAFQVSACAFNKGKLKVLGTAFDPFLGGKNFDEKLVEHFCAEFKTKYKLDAKSKIRALLRLYQECEKLKKLMSSNSTDLPLNIECFMNDKDVSGKMNRSQFEELCAELLQKIEVPLYSLLEQTHLKVEDVSAVEIVGGATRIPAVKERIAKFFGKDISTTLNADEAVARGCALQCAILSPAFKVREFSVTDAVPFPISLIWNHDSEDTEGVHEVFSRNHAAPFSKVLTFLRRGPFELEAFYSDPQGVPYPEAKIGRFVVQNVSAQKDGEKSRVKVKVRVNTHGIFTISTASMVEKVPTEENEMSSEADMECLNQRPPENPDTDKNVQQDNSEAGTQPQVQTDAQQTSQSPPSPELTSEENKIPDADKANEKKVDQPPEAKKPKIKVVNVELPIEANLVWQLGKDLLNMYIETEGKMIMQDKLEKERNDAKNAVEEYVYEFRDKLCGPYEKFICEQDHQNFLRLLTETEDWLYEEGEDQAKQAYVDKLEELMKIGTPVKVRFQEAEERPKMFEELGQRLQHYAKIAADFRNKDEKYNHIDESEMKKVEKSVNEVMEWMNNVMNAQAKKSLDQDPVVRAQEIKTKIKELNNTCEPVVTQPKPKIESPKLERTPNGPNIDKKEEDLEDKNNFGAEPPHQNGECYPNEKNSVNMDLD

SEQ ID NO: 5209 - protein, 446 aa, Homo sapiens
MREIVHIQAGQCGNQIGTKFWEVISDEHGIDPAGGYVGDSALQLERINVYYNESSSQKYVPRAALVDLEPGTMDSVRSGPFGQLFRPDNFIFGQTGAGNNWAKGHYTEGAELVDAVLDVVRKECEHCDCLQGFQLTHSLGGGTGSGMGTLLISKIREEFPDRIMNTFSVMPSPKVSDTVVEPYNATLSVHQLVENTDETYCIDNEALYDICFRTLKLTTPTYGDLNHLVSATMSGVTTSLRFPGQLNADLRKLAVNMVPFPRLHFFMPGFAPLTSRGSQQYRALTVPELTQQMFDARNMMAACDPRHGRYLTVATVFRGPMSMKEVDEQMLAIQSKNSSYFVEWIPNNVKVAVCDIPPRGLKMASTFIGNSTAIQELFKRISEQFSAMFRRKAFLHWFTGEGMDEMEFTEAESNMNDLVSEYQQYQDATANDGEEAFEDEEEEIDG

SEQ ID NO: 5210 - protein, 87 aa, Homo sapiens
MVSLMKLWIPMLMTFFCTVLLSVLGEMRKKRYDRKELLLEECWGKPNVKECTNKCSKAFRCKDKNYTCCWTYCGNICWINVETSGDY

SEQ ID NO: 5211 - protein, 353 aa, Homo sapiens
MYPESTTGSPARLSLRQTGSPGMIYRNLGKSGLRVSCLGLGTWVTFGGQITDEMAEQLMTLAYDNGINLFDTAEVYAAGKAEVVLGNIIKKKGWRRSSLVITTKIFWGGKAETERGLSRKHIIEGLKASLERLQLEYVDVVFANRPDPNTPMEETVRAMTHVINQGMAMYWGTSRWSSMEIMEAYSVARQFNLTPPICEQAEYHMFQREKVEVQLPELFHKIGVGAMTWSPLACGIVSGKYDSGIPPYSRASLKGYQWLKDKILSEEGRRQQAKLKELQAIAERLGCTLPQLAIAWCLRNEGVSSVLLGASNADQLMENIGAIQVLPKLSSSIIHEIDSILGNKPYSKKDYRS

SEQ ID NO: 5212 - protein, 808 aa, Homo sapiens
MLRFPTCFPSFRVVGEKQLPQEIIFLVWSPKRDLIALANTAGEVLLHRLASFHRVWSFPPNENTGKEVTCLAWRPDGKLLAFALADTKKIVLCDVEKPESLHSFSVEAPVSCMHWMEVTVESSVLTSFYNAEDESNLLLPKLPTLPKNYSNTSKIFSEENSDEIIKLLGDVRLNILVLGGSSGFIELYAYGMFKIARVTGIAGTCLALCLSSDLKSLSVVTEVSTNGASEVSYFQLETNLLYSFLPEVTRMARKFTHISALLQYINLSLTCMCEAWEEILMQMDSRLTKFVQEKNTTTSVQDEFMHLLLWGKASAELQTLLMNQLTVKGLKKLGQSIESSYSSIQKLVISHLQSGSESLLYHLSELKGMASWKQKYEPLGLDAAGIEEAITAVGSFILKANELLQVIDSSMKNFKAFFRWLYVAMLRMTEDHVLPELNKMTQKDITFVAEFLTEHFNEAPDLYNRKGKYFNVERVGQYLKDEDDDLVSPPNTEGNQWYDFLQNSSHLKESPLLFPYYPRKSLHFVKRRMENIIDQCLQKPADVIGKSMNQAICIPLYRDTRSEDSTRRLFKFPFLWNNKTSNLHYLLFTILEDSLYKMCILRRHTDISQSVSNGLIAIKFGSFTYATTEKVRRSIYSCLDAQFYDDETVTVVLKDTVGREGRDRLLVQLPLSLVYNSEDSAEYQFTGTYSTRLDEQCSAIPTRTMHFEKHWRLLESMKAQYVAGNGFRKVSCVLSSNLRHVRVFEMDIDDEWELDESSDEEEEASNKPVKIKEEVLSESEAENQQAGAAALAPEIVIKVEKLDPELDS

SEQ ID NO: 5213 - protein, 442 aa, Homo sapiens
MRGAMELEPELLLQEARENVEAAQSYRRELGHRLEGLREARRQIKESASQTRDVLKQHFNDLKGTLGKLLDERLVTLLQEVDTIEQETIKPLDDCQKLIEHGVNTAEDLVREGEIAMLGGVGEENEKLWSFTKKASHIQLDSLPEVPLLVDVPCLSAQLDDSILNIVKDHIFKHGTVASRPPVQIEELIEKPGGIIVRWCKVDDDFTAQDYRLQFRKCTSNHFEDVYVGSETEFIVLHIDPNVDYQFRVCARGDGRQEWSPWSVPQIGHSTLVPHEWTAGFEGYSLSSRRNIALRNDSESSGVLYSRAPTYFCGQTLTFRVETVGQPDRRDSIGVCAEKQDGYDSLQRDQAVCISTNGAVFVNGKEMTNQLPAVTSGSTVTFDIEAVTLGTTSNNEGGHFKLRVTISSNNREVVFDWLLDQSCGSLYFGCSFFYPGWKVLVF

SEQ ID NO: 5214 - protein, 933 aa, Homo sapiens
MRALAVLSVTLVMACTEAFFPFISRGKELLWGKPEESRVSSVLEESKRLVDTAMYATMQRNLKKRGILSPAQLLSFSKLPEPTSGVIARAAEIMETSIQAMKRKVNLKTQQSQHPTDALSEDLLSIIANMSGCLPYMLPPKCPNTCLANKYRPITGACNNRDHPRWGASNTALARWLPPVYEDGFSQPRGWNPGFLYNGFPLPPVREVTRHVIQVSNEVVTDDDRYSDLLMAWGQYIDHDIAFTPQSTSKAAFGGGADCQMTCENQNPCFPIQLPEEARPAAGTACLPFYRSSAACGTGDQGALFGNLSTANPRQQMNGLTSFLDASTVYGSSPALERQLRNWTSAEGLLRVHARLRDSGRAYLPFVPPRAPAACAPEPGIPGETRGPCFLAGDGRASEVPSLTALHTLWLREHNRLAAALKALNAHWSADAVYQEARKVVGALHQIITLRDYIPRILGPEAFQQYVGPYEGYDSTANPTVSNVFSTAAFRFGHATIHPLVRRLDASFQEHPDLPGLWLHQAFFSPWTLLRGGGLDPLIRGLLARPAKLQVQDQLMNEELTERLFVLSNSSTLDLASINLQRGRDHGLPGYNEWREFCGLPRLETPADLSTAIASRSVADKILDLYKHPDNIDVWLGGLAENFLPRARTGPLFACLIGKQMKALRDGDWFWWENSHVFTDAQRRELEKHSLSRVICDNTGLTRVPMDAFQVGKFPEDFESCDSITGMNLEAWRETFPQDDKCGFPESVENGDFVHCEESGRRVLVYSCRHGYELQGREQLTCTQEGWDFQPPLCKDVNECADGAHPPCHASARCRNTKGGFQCLCADPYELGDDGRTCVDSGRLPRVTWISMSLAALLIGGFAGLTSTVICRWTRTGTKSTLPISETGGGTPELRCGKHQAVGTSPQRAAAQDSEQESAGMEGRDTHRLPRAL

SEQ ID NO: 5215 - protein, 775 aa, Homo sapiens
MEKFGMNFGGGPSKKDLLETIETQKKQLLQYQARLKDVVRAYKSLLKEKEALEASIKVLSVSHEADVGLAGVQLPGLTFPDSVDDRCSTHSEDSTGTATSLDTAASLTSTKGEFGVEDDRPARGPPPPKSEEASWSESGVSSSSGDGPFAGGEVDKRLHQLKTQLATLTSSLATVTQEKSRMEASYLADKKKMKQDLEDASNKAEEERARLEGELKGLQEQIAETKARLITQQHDRAQEQSDHALMLRELQKLLQEERTQRQDLELRLEETREALAGRAYAAEQMEGFELQTKQLTREVEELKSELQAIRDEKNQPDPRLQELQEEAARLKSHFQAQLQQEMRKTALAEDQLRQQSQVEEQRVAALENQISEVSELLGTYEKAKQKDQLAIQKLKERILQLDLENKTLALAASSRSPLDSHGEESSLDVNVLKDKMEKLKRLLQVAARKSQVTLDVEKLCDLEIMPSSEAADGEKATALYYQQELKQLKEEFERYKMRAQVVLKSKNTKDGNLGKELEAAQEQLAELKEKYISLRLSCEELEHQHQQEADDWKQELARLQQLHRQELERCQLDFRDRTLKLEEELHKQRDRALAVLTEKDLELEQLRSVALASGLPGRRSPVGGGGPGDPADTSSSDSLTQALQLAAANEPTFFLYAEQLARKEVEITSLRKQKHRLEVEVHQLQDRLLEEGERHREEVAALQSHIEKNIRDQSREGANLEYLKNIIYRFLTLPDSLGRQQTLTAILTILHFSPEEKQVIMRLPTSASWWPSGKR

SEQ ID NO: 5216 - protein, 191 aa, Homo sapiens
MEGGAYGAGKAGGAFDPYTLVRQPHTILRVVSWLFSIVVFGSIVNEGYLNSASEGEEFCIYNRNPNACSYGVAVGVLAFLTCLLYLALDVYFPQISSVKDRKKAVLSDIGVSAFWAFLWFVGFCYLANQWQVSKPKDNPLNEGTDAARAAIAFSFFSIFTWSLTAALAVRRFKDLSFQEEYSTLFPASAQP

SEQ ID NO: 5217 - protein, 308 aa, Homo sapiens
MASSNTVLMRLVASAYSIAQKAGMIVRRVIAEGDLGIVEKTCATDLQTKADRLAQMSICSSLARKFPKLTIIGEEDLPSEEVDQELIEDSQWEEILKQPCPSQYSAIKEEDLVVWVDPLDGTKEYTEGLLDNVTVLIGIAYEGKAIAGVINQPYYNYEAGPDAVLGRTIWGVLGLGAFGFQLKEVPAGKHIITTTRSHSNKLVTDCVAAMNPDAVLRVGGAGNKIIQLIEGKASAYVFASPGCKKWDTCAPEVILHAVGGKLTDIHGNVLQYHKDVKHMNSAGVLATLRNYDYYASRVPESIKNALVP

SEQ ID NO: 5218 - protein, 895 aa, Homo sapiens
MATEHPEPPKAELQLPPPPPPGHYGAWAAQELQAKLAEIGAPIQGNREELVERLQSYTRQTGIVLNRPVLRGEDGDKAAPPPMSAQLPGIPMPPPPLGLPPLQPPPPPPPPPPGLGLGFPMAHPPNLGPPPPLRVGEPVALSEEERLKLAQQQAALLMQQEERAKQQGDHSLKEHELLEQQKRAAVLLEQERQQEIAKMGTPVPRPPQDMGQIGVRTPLGPRVAAPVGPVGPTPTVLPMGAPVPRPRGPPPPPGDENREMDDPSVGPKIPQALEKILQLKESRQEEMNSQQEEEEMETDARSSLGQSASETEEDTVSVSKKEKNRKRRNRKKKKKPQRVRGVSSESSGDREKDSTRSRGSDSPAADVEIEYVTEEPEIYEPNFIFFKRIFEAFKLTDDVKKEKEKEPEKLDKLENSAAPKKKGFEEEHKDSDDDSSDDEQEKKPEAPKLSKKKLRRMNRFTVAELKQLVARPDVVEMHDVTAQDPKLLVHLKATRNSVPVPRHWCFKRKYLQGKRGIEKPPFELPDFIKRTGIQEMREALQEKEEQKTMKSKMREKVRPKMGKIDIDYQKLHDAFFKWQTKPKLTIHGDLYYEGKEFETRLKEKKPGDLSDELRISLGMPVGPNAHKVPPPWLIAMQRYGPPPSYPNLKIPGLNSPIPESCSFGYHAGGWGKPPVDETGKPLYGDVFGTNAAEFQTKTEEEEIDRTPWGELEPSDEESSEEEEEEESDEDKPDETGFITPADSGLITPGGFSSVPAGMETPELIELRKKKIEEAMDGSETPQLFTVLPEKRTATVGGAMMGSTHIYDMSTVMSRKGPAPELQGVEVALAPEELELDPMAMTQKYEEHVREQQAQVEKEDFSDMVAEHAAKQKQKKRKAQPQDSRGGSKKYKEFKF

SEQ ID NO: 5219 - protein, 501 aa, Homo sapiens
MVLWGPVLGALLVVIAGYLCLPGMLRQRRPWEPPLDKGTVPWLGHAMAFRKNMFEFLKRMRTKHGDVFTVQLGGQYFTFVMDPLSFGSILKDTQRKLDFGQYAKKLVLKVFGYRSVQGDHEMIHSASTKHLRGDGLKDLNETMLDSLSFVMLTSKGWSLDASCWHEDSLFRFCYYILFTAGYLSLFGYTKDKEQDLLQAGELFMEFRKFDLLFPRFVYSLLWPREWLEVGRLQRLFHKMLSVSHSQEKEGISNWLGNMLQFLREQGVPSAMQDKFNFMMLWASQGNTGPTSFWALLYLLKHPEAIRAVREEATQVLGEARLETKQSFAFKLGALQHTPVLDSVVEETLRLRAAPTLLRLVHEDYTLKMSSGQEYLFRHGDILALFPYLSVHMDPDIHPEPTVFKYDRFLNPNGSRKVDFFKTGKKIHHYTMPWGSGVSICPGRFFALSEVKLFILLMVTHFDLELVDPDTPLPHVDPQRWGFGTMQPSHDVRFRYRLHPTE

SEQ ID NO: 5220 - protein, 483 aa, Homo sapiens
MTMPVNGAHKDADLWSSHDKMLAQPLKDSDVEVYNIIKKESNRQRVGLELIASENFASRAVLEALGSCLNNKYSEGYPGQRYYGGTEFIDELETLCQKRALQAYKLDPQCWGVNVQPYSGSPANFAVYTALVEPHGRIMGLDLPDGGHLTHGFMTDKKKISATSIFFESMPYKVNPDTGYINYDQLEENARLFHPKLIIAGTSCYSRNLEYARLRKIADENGAYLMADMAHISGLVAAGVVPSPFEHCHVVTTTTHKTLRGCRAGMIFYRKGVKSVDPKTGKEILYNLESLINSAVFPGLQGGPHNHAIAGVAVALKQAMTLEFKVYQHQVVANCRALSEALTELGYKIVTGGSDNHLILVDLRSKGTDGGRAEKVLEACSIACNKNTCPGDRSALRPSGLRLGTPALTSRGLLEKDFQKVAHFIHRGIELTLQIQSDTGVRATLKEFKERLAGDKYQAAVQALREEVESFASLFPLPGLPDF

SEQ ID NO: 5221 - protein, 485 aa, Homo sapiens
MASSSTVPLGFHYETKYVVLSYLGLLSQEKLQEQHLSSPQGVQLDIASQSLDQEILLKVKTEIEEELKSLDKEISEAFTSTGFDRHTSPVFSPANPESSMEDCLAHLGEKVSQELKEPLHKALQMLLSQPVTYQAFRECTLETTVHASGWNKILVPLVLLRQMLLELTRRGQEPLSALLQFGVTYLEDYSAEYIIQQGGWGTVFSLESEEEEYPGITAEDSNDIYILPSDNSGQVSPPESPTVTTSWQSESLPVSLSASQSWHTESLPVSLGPESWQQIAMDPEEVKSLDSNGAGEKSENNSSNSDIVHVEKEEVPEGMEEAAVASVVLPARELQEALPEAPAPLLPHITATSLLGTREPDTEVITVEKSSPATSLFVELDEEEVKAATTEPTEVEEVVPALEPTETLLSEKEINAREESLVEELSPASEKKPVPPSEGKSRLSPAGEMKPMPLSEGKSILLFGGAAAVAILAVAIGVALALRKK

SEQ ID NO: 5222 - protein, 1722 aa, Homo sapiens
MGNQDGKLKRSAGDALHEGGGGAEDALGPRDVEATKKGSGGKKALGKHGKGGGGGGGGGESGKKKSKSDSRASVFSNLRIRKNLSKGKGAGGSREDVLDSQALQTGELDSAHSLLTKTPDLSLSADEAGLSDTECADPFEVTGPGGPGPAEARVGGRPIAEDVETAAGAQDGQRTSSGSDTDIYSFHSATEQEDLLSDIQQAIRLQQQQQQQLQLQLQQQQQQQQLQGAEEPAAPPTAVSPQPGAFLGLDRFLLGPSGGAGEAPGSPDTEQALSALSDLPESLAAEPREPQQPPSPGGLPVSEAPSLPAAQPAAKDSPSSTAFPFPEAGPGEEAAGAPVRGAGDTDEEGEEDAFEDAPRGSPGEEWAPEVGEDAPQRLGEEPEEEAQGPDAPAAASLPGSPAPSQRCFKPYPLITPCYIKTTTRQLSSPNHSPSQSPNQSPRIKRRPEPSLSRGSRTALASVAAPAKKHRADGGLAAGLSRSADWTEELGARTPRVGGSAHLLERGVASDSGGGVSPALAAKASGAPAAADGFQNVFTGRTLLEKLFSQQENGPPEEAEKFCSRIIAMGLLLPFSDCFREPCNQNAQTNAASFDQDQLYTWAAVSQPTHSLDYSEGQFPRRVPSMGPPSKPPDEEHRLEDAETESQSAVSETPQKRSDAVQKEVVDMKSEGQATVIQQLEQTIEDLRTKIAELERQYPALDTEVASGHQGLENGVTASGDVCLEALRLEEKEVRHHRILEAKSIQTSPTEEGGVLTLPPVDGLPGRPPCPPGAESGPQTKFCSEISLIVSPRRISVQLDSHQPTQSISQPPPPPSLLWSAGQGQPGSQPPHSISTEFQTSHEHSVSSAFKNSCNIPSPPPLPCTESSSSMPGLGMVPPPPPPLPGMTVPTLPSTAIPQPPPLQGTEMLPPPPPPLPGAGIPPPPPLPGAGILPLPPLPGAGIPPPPPLPGAAIPPPPPLPGAGIPLPPPLPGAGIPPPPPLPGAGIPPPPPLPGAGIPPPPPLPGAGIPPPPPLPGAGIPPPPPLPGAGIPPPPPLPGAGIPPPPPLPGAGIPPPPPLPGAGIPPPPPLPGAGIPPPPPLPGAGIPPPPPLPGAGIPPPPPLPGVGIPPPPPLPGAGIPPPPPLPGAGIPPPPPLPGAGIPPPPPLPRVGIPPPPPLPGAGIPPPPPLPGAGIPPPPPLPGVGIPPPPPLPGVGIPPPPPLPGAGIPPPPPLPGMGIPPAPAPPLPPPGTGIPPPPLLPVSGPPLLPQVGSSTLPTPQVCGFLPPPLPSGLFGLGMNQDKGSRKQPIEPCRPMKPLYWTRIQLHSKRDSSTSLIWEKIEEPSIDCHEFEELFSKTAVKERKKPISDTISKTKAKQVVKLLSNKRSQAVGILMSSLHLDMKDIQHAVVNLDNSVVDLETLQALYENRAQSDELEKIEKHGRSSKDKENAKSLDKPEQFLYELSLIPNFSERVFCILFQSTFSESICSIRRKLELLQKLCETLKNGPGVMQVLGLVLAFGNYMNGGNKTRGQADGFGLDILPKLKDVKSSDNSRSLLSYIVSYYLRNFDEDAGKEQCLFPLPEPQDLFQASQMKFEDFQKDLRKLKKDLKACEVEAGKVYQVSSKEHMQPFKENMEQFIIQAKIDQEAEENSLTETHKCFLETTAYFFMKPKLGEKEVSPNAFFSIWHEFSSDFKDFWKKENKLLLQERVKEAEEVCRQKKGKSLYKIKPRHDSGIKAKISMKT

SEQ ID NO: 5223 - protein, 873 aa, Homo sapiens
MAEMEKEGRPPENKRSRKPAHPVKREINEEMKNFAENTMNELLGWYGYDKVELKDGEDIEFRSYPTDGESRQHISVLKENSLPKPKLPEDSVISPYNISTGYSGLATGNGLSDSPAGSKDHGSVPIIVPLIPPPFIKPPAEDDVSNVQIMCAWCQKVGIKRYSLSMGSEVKSFCSEKCFAACRRAYFKRNKARDEDGHAENFPQQHYAKETPRLAFKNNCELLVCDWCKHIRHTKEYLDFGDGERRLQFCSAKCLNQYKMDIFYKETQANLPAGLCSTLHPPMENKAEGTGVQLLTPDSWNIPLTDARRKAPSPVATAGQSQGPGPSASTTVSPSDTANCSVTKIPTPVPKSIPISETPNIPPVSVQPPASIGPPLGVPPRSPPMVMTNRGPVPLPIFMEQQIMQQIRPPFIRGPPHHASNPNSPLSNPMLPGIGPPPGGPRNLGPTSSPMHRPMLSPHIHPPSTPTMPGNPPGLLPPPPPGAPLPSLPFPPVSMMPNGPMPVPQMMNFGLPSLAPLVPPPTLLVPYPVIVPLPVPIPIPIPIPHVSDSKPPNGFSSNGENFIPNAPGDSAAAGGKPSGHSLSPRDSKQGSSKSADSPPGCSGQALSLAPTPAEHGRSEVVDLTRRAGSPPGPPGAGGQLGFPGVLQGPQDGVIDLTVGHRARLHNVIHRALHAHVKAEREPSAAERRTCGGCRDGHCSPPAAGDPGPGAPAGPEAAAACNVIVNGTRGAAAEGAKSAEPPPEQPPPPPPPAPPKKLLSPEEPAVSELESVKENNCASNCHLDGEAAKKLMGEEALAGGDKSDPNLNNPADEDHAYALRMLPKTGCVIQPVPKPAEKAAMAPCIISSPMLSAGPEDLEPPLKRRCLRIRNQNK

SEQ ID NO: 5224 - protein, 677 aa, Homo sapiens
MMQESGTETKSNGSAIQNGSGGSNHLLECGGLREGRSNGETPAVDIGAADLAHAQQQQQQALQVARQLLLQQQQQQQVSGLKSPKRNDKQPALQVPVSVAMMTPQVITPQQMQQILQQQVLSPQQLQVLLQQQQALMLQQQQLQEFYKKQQEQLQLQLLQQQHAGKQPKEQQQVATQQLAFQQQLLQMQQLQQQHLLSLQRQGLLTIQPGQPALPLQPLAQGMIPTELQQLWKEVTSAHTAEETTGNNHSSLDLTTTCVSSSAPSKTSLIMNPHASTNGQLSVHTPKRESLSHEEHPHSHPLYGHGVCKWPGCEAVCEDFQSFLKHLNSEHALDDRSTAQCRVQMQVVQQLELQLAKDKERLQAMMTHLHVKSTEPKAAPQPLNLVSSVTLSKSASEASPQSLPHTPTTPTAPLTPVTQGPSVITTTSMHTVGPIRRRYSDKYNVPISSADIAQNQEFYKNAEVRPPFTYASLIRQAILESPEKQLTLNEIYNWFTRMFAYFRRNAATWKNAVRHNLSLHKCFVRVENVKGAVWTVDEVEFQKRRPQKISGNPSLIKNMQSSHAYCTPLNAALQASMAENSIPLYTTASMGNPTLGNLASAIREELNGAMEHTNSNESDSSPGRSPMQAVHPVHVKEEPLDPEEAEGPLSLVTTANHSPDFDHDRDYEDEPVNEDME

SEQ ID NO: 5225 - protein, 262 aa, Homo sapiens
MSRLSWGYREHNGPIHWKEFFPIADGDQQSPIEIKTKEVKYDSSLRPLSIKYDPSSAKIISNSGHSFNVDFDDTENKSVLRGGPLTGSYRLRQVHLHWGSADDHGSEHIVDGVSYAAELHVVHWNSDKYPSFVEAAHEPDGLAVLGVFLQIGEPNSQLQKITDTLDSIKEKGKQTRFTNFDLLSLLPPSWDYWTYPGSLTVPPLLESVTWIVLKQPINISSQQLAKFRSLLCTAEGEAAAFLVSNHRPPQPLKGRKVRASFH

SEQ ID NO: 5226 - protein, 353 aa, Homo sapiens
MAMTLLEDWCRGMDVNSQRALLVWGIPVNCDEAEIEETLQAAMPQVSYRMLGRMFWREENAKAALLELTGAVDYAAIPREMPGKGGVWKVLFKPPTSDAEFLERLHLFLAREGWTVQDVARVLGFQNPTPTPGPEMPAEMLNYILDNVIQPLVESIWYKRLTLFSGRDIPGPGEETFDPWLEHTNEVLEEWQVSDVEKRRRLMESLRGPAADVIRILKSNNPAITTAECLKALEQVFGSVESSRDAQIKFLNTYQNPGEKLSAYVIRLEPLLQKVVEKGAIDKDNVNQARLEQVIAGANHSGAIRRQLWLTGAGEGPAPNLFQLLVQIREEEAKEEEEEAEATLLQLGLEGHF

SEQ ID NO: 5227 - protein, 670 aa, Homo sapiens
MSSGKSARYNRFSGGPSNLPTPDVTTGTRMETTFGPAFSAVTTITKADGTSTYKQHCRTPSSSSTLAYSPRDEEDSMPPISTPRRSDSAISVRSLHSESSMSLRSTFSLPEEEEEPEPLVFAEQPSVKLCCQLCCSVFKDPVITTCGHTFCRRCALKSEKCPVDNVKLTVVVNNIAVAEQIGELFIHCRHGCRVAGSGKPPIFEVDPRGCPFTIKLSARKDHEGSCDYRPVRCPNNPSCPPLLRMNLEAHLKECEHIKCPHSKYGCTFIGNQDTYETHLETCRFEGLKEFLQQTDDRFHEMHVALAQKDQEIAFLRSMLGKLSEKIDQLEKSLELKFDVLDENQSKLSEDLMEFRRDASMLNDELSHINARLNMGILGSYDPQQIFKCKGTFVGHQGPVWCLCVYSMGDLLFSGSSDKTIKVWDTCTTYKCQKTLEGHDGIVLALCIQGCKLYSGSADCTIIVWDIQNLQKVNTIRAHDNPVCTLVSSHNVLFSGSLKAIKVWDIVGTELKLKKELTGLNHWVRALVAAQSYLYSGSYQTIKIWDIRTLDCIHVLQTSGGSVYSIAVTNHHIVCGTYENLIHVWDIESKEQVRTLTGHVGTVYALAVISTPDQTKVFSASYDRSLRVWSMDNMICTQTLLRHQGSVTALAVSRGRLFSGAVDSTVKVWTC

SEQ ID NO: 5228 - protein, 328 aa, Homo sapiens
MSMLAERRRKQKWAVDPQNTAWSNDDSKFGQRMLEKMGWSKGKGLGAQEQGATDHIKVQVKNNHLGLGATINNEDNWIAHQDDFNQLLAELNTCHGQETTDSSDKKEKKSFSLEEKSKISKNRVHYMKFTKGKDLSSRSKTDLDCIFGKRQSKKTPEGDASPSTPEENETTTTSAFTIQEYFAKRMAALKNKPQVPVPGSDISETQVERKRGKKRNKEATGKDVESYLQPKAKRHTEGKPERAEAQERVAKKKSAPAEEQLRGPCWDQSSKASAQDAGDHVQPPEGRDFTLKPKKRRGKKKLQKPVEIAEDATLEETLVKKKKKKDSK

SEQ ID NO: 5229 - protein, 908 aa, Homo sapiens
MGVNDLWQILEPVKQHIPLRNLGGKTIAVDLSLWVCEAQTVKKMMGSVMKPHLRNLFFRISYLTQMDVKLVFVMEGEPPKLKADVISKRNQSRYGSSGKSWSQKTGRSHFKSVLRECLHMLECLGIPWVQAAGEAEAMCAYLNAGGHVDGCLTNDGDTFLYGAQTVYRNFTMNTKDPHVDCYTMSSIKSKLGLDRDALVGLAILLGCDYLPKGVPGVGKEQALKLIQILKGQSLLQRFNRWNETSCNSSPQLLVTKKLAHCSVCSHPGSPKDHERNGCRLCKSDKYCEPHDYEYCCPCEWHRTEHDRQLSEVENNIKKKACCCEGFPFHEVIQEFLLNKDKLVKVIRYQRPDLLLFQRFTLEKMEWPNHYACEKLLVLLTHYDMIERKLGSRNSNQLQPIRIVKTRIRNGVHCFEIEWEKPEHYAMEDKQHGEFALLTIEEESLFEAAYPEIVAVYQKQKLEIKGKKQKRIKPKENNLPEPDEVMSFQSHMTLKPTCEIFHKQNSKLNSGISPDPTLPQESISASLNSLLLPKNTPCLNAQEQFMSSLRPLAIQQIKAVSKSLISESSQPNTSSHNISVIADLHLSTIDWEGTSFSNSPAIQRNTFSHDLKSEVESELSAIPDGFENIPEQLSCESERYTANIKKVLDEDSDGISPEEHLLSGITDLCLQDLPLKERIFTKLSYPQDNLQPDVNLKTLSILSVKESCIANSGSDCTSHLSKDLPGIPLQNESRDSKILKGDQLLQEDYKVNTSVPYSVSNTVVKTCNVRPPNTALDHSRKVDMQTTRKILMKKSVCLDRHSSDEQSAPVFGKAKYTTQRMKHSSQKHNSSHFKESGHNKLSSPKIHIKETEQCVRSYETAENEESCFPDSTKSSLSSLQCHKKENNSGTCLDSPLPLRQRLKLRFQST

SEQ ID NO: 5230 - protein, 467 aa, Homo sapiens
MSVVVQHVEEKAVHSWSRISTAGKKALEEALLVFNPMSQDLSATEAQLVAFLQGLRDDGFQPTILRSGDVYGYSSCTANPPSQTKLQARAPNPTATSPPASAPRTAMRLPAGRATLLPMPLSGRLAKASTPALAKHATTNLLLSSLKQSSASHARGAAVGFPTHLYPGVYPAMRLSVVLEALVPLKTPMPCLGAKHKAQSLQLSLADSPLKLRKSSGKGPGNPRPKAPRKTTSKGPKCLTRKGPGAGPRRGSGHQSKTNRATGSPSVRRMKGGSALGTKTAQAKVARTLAKAARAQAKVARTQAKAAKARAKAKAAQVKAKAKAKAAQVKAKAKVMAAWAKAKAKAKAVRAKAKVARTQPRGRGRPKGSAKARTTRKGQKNRPETVGQKRKRAEEAKDLPPKKRTRLGPRSPKAWLGPGTAKLLKFRAIKVDRRSSDDEVRQRAQRILRVNLSPVIRLQPLLPYSAV

SEQ ID NO: 5231 - protein, 275 aa, Homo sapiens
MGNFRGHALPGTFFFIIGLWWCTKSILKYICKKQKRTCYLGSKTLFYRLEILEGITIVGMALTGMAGEQFIPGGPHLMLYDYKQGHWNQLLGWHHFTMYFFFGLLGVADILCFTISSLPVSLTKLMLSNALFVEAFIFYNHTHGREMLDIFVHQLLVLVVFLTGLVAFLEFLVRNNVLLELLRSSLILLQGSWFFQIGFVLYPPSGGPAWDLMDHENILFLTICFCWHYAVTIVIVGMNYAFITWLVKSRLKRLCSSEVGLLKNAEREQESEEEM

SEQ ID NO: 5232 - protein, 556 aa, Homo sapiens
MATTATCTRFTDDYQLFEELGKGAFSVVRRCVKKTSTQEYAAKIINTKKLSARDHQKLEREARICRLLKHPNIVRLHDSISEEGFHYLVFDLVTGGELFEDIVAREYYSEADASHCIHQILESVNHIHQHDIVHRDLKPENLLLASKCKGAAVKLADFGLAIEVQGEQQAWFGFAGTPGYLSPEVLRKDPYGKPVDIWACGVILYILLVGYPPFWDEDQHKLYQQIKAGAYDFPSPEWDTVTPEAKNLINQMLTINPAKRITADQALKHPWVCQRSTVASMMHRQETVECLRKFNARRKLKGAILTTMLVSRNFSAAKSLLNKKSDGGVKPQSNNKNSLVSPAQEPAPLQTAMEPQTTVVHNATDGIKGSTESCNTTTEDEDLKAAPLRTGNGSSVPEGRSSRDRTAPSAGMQPQPSLCSSAMRKQEIIKITEQLIEAINNGDFEAYTKICDPGLTSFEPEALGNLVEGMDFHKFYFENLLSKNSKPIHTTILNPHVHVIGEDAACIAYIRLTQYIDGQGRPRTSQSEETRVWHRRDGKWLNVHYHCSGAPAAPLQ

SEQ ID NO: 5233 - protein, 183 aa, Homo sapiens
MREYKVVVLGSGGVGKSALTVQFVTGSFIEKYDPTIEDFYRKEIEVDSSPSVLEILDTAGTEQFASMRDLYIKNGQGFILVYSLVNQQSFQDIKPMRDQIIRVKRYERVPMILVGNKVDLEGEREVSYGEGKALAEEWSCPFMETSAKNKASVDELFAEIVRQMNYAAQPNGDEGCCSACVIL

SEQ ID NO: 5234 - protein, 1726 aa, Homo sapiens
MSDFVESEAEESEEEYNDEGEVVPRVTKKFVEEEDDDEEEEEENLDDQDEQGNLKGFINDDDDEDEGEEDEGSDSGDSEDDVGHKKRKRTSFDDRLEDDDFDLIEENLGVKVKRGQKYRRVKKMSDDEDDDEEEYGKEEHEKEAIAEEIFQDGEGEEGQEAMEAPMAPPEEEEEDDEESDIDDFIVDDDGQPLKKPKWRKKLPGYTDAALQEAQEIFGVDFDYDEFEKYNEYDEELEEEYEYEDDEAEGEIRVRPKKTTKKRVSRRSIFEMYEPSELESSHLTDQDNEIRATDLPERFQLRSIPVKGAEDDELEEEADWIYRNAFATPTISLQESCDYLDRGQPASSFSRKGPSTIQKIKEALGFMRNQHFEVPFIAFYRKEYVEPELHINDLWRVWQWDEKWTQLRIRKENLTRLFEKMQAYQYEQISADPDKPLADGIRALDTTDMERLKDVQSMDELKDVYNHFLLYYGRDIPKMQNAAKASRKKLKRVREEGDEEGEGDEAEDEEQRGPELKQASRRDMYTICQSAGLDGLAKKFGLTPEQFGENLRDSYQRHETEQFPAEPLELAKDYVCSQFPTPEAVLEGARYMVALQIAREPLVRQVLRQTFQERAKLNITPTKKGRKDVDEAHYAYSFKYLKNKPVKELRDDQFLKICLAEDEGLLTTDISIDLKGVEGYGNDQTYFEEIKQFYYRDEFSHQVQEWNRQRTMAIERALQQFLYVQMAKELKNKLLAEAKEYVIKACSRKLYNWLRVAPYRPDQQVEEDDDFMDENQGKGIRVLGIAFSSARDHPVFCALVNGEGEVTDFLRLPHFTKRRTAWREEEREKKAQDIETLKKFLLNKKPHVVTVAGENRDAQMLIEDVKRIVHELDQGQQLSSIGVELVDNELAILYMNSKKSEAEFRDYPPVLRQAVSLARRIQDPLIEFAQVCSSDEDILCLKFHPLQEHVVKEELLNALYCEFINRVNEVGVDVNRAIAHPYSQALIQYVCGLGPRKGTHLLKILKQNNTRLESRTQLVTMCHMGPKVFMNCAGFLKIDTASLGDSTDSYIEVLDGSRVHPETYEWARKMAVDALEYDESAEDANPAGALEEILENPERLKDLDLDAFAEELERQGYGDKHITLYDIRAELSCRYKDLRTAYRSPNTEEIFNMLTKETPETFYIGKLIICNVTGIAHRRPQGESYDQAIRNDETGLWQCPFCQQDNFPELSEVWNHFDSGSCPGQAIGVKTRLDNGVTGFIPTKFLSDKVVKRPEERVKVGMTVHCRIMKIDIEKFSADLTCRTSDLMDRNNEWKLPKDTYYDFDAEAADHKQEEDMKRKQQRTTYIKRVIAHPSFHNINFKQAEKMMETMDQGDVIIRPSSKGENHLTVTWKVSDGIYQHVDVREEGKENAFSLGATLWINSEEFEDLDEIVARYVQPMASFARDLLNHKYYQDCSGGDRKKLEELLIKTKKEKPTFIPYFICACKELPGKFLLGYQPRGKPRIEYVTVTPEGFRYRGQIFPTVNGLFRWFKDHYQDPVPGITPSSSSRTRTPASINATPANINLADLTRAVNALPQNMTSQMFSAIAAVTGQGQNPNATPAQWASSQYGYGGSGGGSSAYHVFPTPAQQPVATPLMTPSYSYTTPSQPITTPQYHQLQASTTPQSAQAQPQPSSSSRQRQQQPKSNSHAAIDWGKMAEQWLQEKEAERRKQKQRLTPRPSPSPMIESTPMSIAGDATPLLDEMDR

SEQ ID NO: 5235 - protein, 286 aa, Homo sapiens
MAMEGYWRFLALLGSALLVGFLSVIFALVWVLHYREGLGWDGSALEFNWHPVLMVTGFVFIQGIAIIVYRLPWTWKCSKLLMKSIHAGLNAVAAILAIISVVAVFENHNVNNIANMYSLHSWVGLIAVICYLLQLLSGFSVFLLPWAPLSLRAFLMPIHVYSGIVIFGTVIATALMGLTEKLIFSLRDPAYSTFPPEGVFVNTLGLLILVFGALIFWIVTRPQWKRPKEPNSTILHPNGGTEQGARGSMPAYSGNNMDKSDSELNSEVAARKRNLALDEAGQRSTM

SEQ ID NO: 5236 - protein, 187 aa, Homo sapiens
MFLLLNCIVAVSQNMGIGKNGDLPRPPLRNEFRYFQRMTTTSSVEGKQNLVIMGRKTWFSIPEKNRPLKDRINLVLSRELKEPPQGAHFLARSLDDALKLTERPELANKVDMIWIVGGSSVYKEAMNHLGHLKLFVTRIMQDFESDTFFSEIDLEKYKLLPEYPGVLSDVQEGKHIKYKFEVCEKDD

SEQ ID NO: 5237 - protein, 414 aa, Homo sapiens
MIPLEKPGSGGSSPGATSGSGRAGRGLSGPCRPPPPPQARGLLTEIRAVVRTEPFQDGYSLCPGRELGRGKFAVVRKCIKKDSGKEFAAKFMRKRRKGQDCRMEIIHEIAVLELAQDNPWVINLHEVYETASEMILVLEYAAGGEIFDQCVADREEAFKEKDVQRLMRQILEGVHFLHTRDVVHLDLKPQNILLTSESPLGDIKIVDFGLSRILKNSEELREIMGTPEYVAPEILSYDPISMATDMWSIGVLTYVMLTGISPFLGNDKQETFLNISQMNLSYSEEEFDVLSESAVDFIRTLLVKKPEDRATAEECLKHPWLTQSSIQEPSFRMEKALEEANALQEGHSVPEINSDTDKSETKESIVTEELIVVTSYTLGQCRQSEKEKMEQKAISKRFKFEEPLLQEIPGEFIY

SEQ ID NO: 5238 - protein, 1015 aa, Homo sapiens
MTVSQKGGPQPTPSPAGPGTQLGPITGEMDEADSAFLKFKQTADDSLSLTSPNTESIFVEDPYTASLRSEIESDGHEFEAESWSLAVDAAYAKKQKREVVKRQDVLYELMQTEVHHVRTLKIMLKVYSRALQEELQFSSKAIGRLFPCADDLLETHSHFLARLKERRQESLEEGSDRNYVIQKIGDLLVQQFSGENGERMKEKYGVFCSGHNEAVSHYKLLLQQNKKFQNLIKKIGNFSIVRRLGVQECILLVTQRITKYPVLVERIIQNTEAGTEDYEDLTQALNLIKDIISQVDAKVSECEKGQRLREIAGKMDLKSSSKLKNGLTFRKEDMLQRQLHLEGMLCWKTTSGRLKDILAILLTDVLLLLQEKDQKYVFASVDSKPPVISLQKLIVREVANEEKAMFLISASLQGPEMYEIYTSSKEDRNAWMAHIQRAVESCPDEEEGPFSLPEEERKVVEARATRLRDFQERLSMKDQLIAQSLLEKQQIYLEMAEMGGLEDLPQPRGLFRGGDPSETLQGELILKSAMSEIEGIQSLICRQLGSANGQAEDGGSSTGPPRRAETFAGYDCTNSPTKNGSFKKKVSSTDPRPRDWRGPPNSPDLKLSDSDIPGSSEESPQVVEAPGTESDPRLPTVLESELVQRIQTLSQLLLNLQAVIAHQDSYVETQRAAIQEREKQFRLQSTRGNLLLEQERQRNFEKQREERAALEKLQSQLRHEQQRWERERQWQHQELERAGARLQEREGEARQLRERLEQERAELERQRQAYQHDLERLREAQRAVERERERLELLRRLKKQNTAPGALPPDTLAEAQPPSHPPSFNGEGLEGPRVSMLPSGVGPEYAERPEVARRDSAPTENRLAKSDVPIQLLSATNQFQRQAAVQQQIPTKLAASTKGGKDKGGKSRGSQRWESSASFDLKQQLLLNKLMGKDESTSRNRRSLSPILPGRHSPAPPPDPGFPAPSPPPADSPSEGFSLKAGGTALLPGPPAPSPLPATPLSAKEDASKEDVIFF

SEQ ID NO: 5239 - protein, 809 aa, Homo sapiens
MGTPRAQHPPPPQLLFLILLSCPWIQGLPLKEEEILPEPGSETPTVASEALAELLHGALLRRGPEMGYLPGSDRDPTLATPPAGQTLAVPSLPRATEPGTGPLTTAVTPNGVRGAGPTAPELLTPPPGTTAPPPPSPASPGPPLGPEGGEEETTTTIITTTTVTTTVTSPAYLLSCGFPPRPAHGDVSVTDLHPGGTATFHCDSGYQLQGEETLICLNGTRPSWNGETPSCMASCGGTIHNATLGRIVSPEPGGAVGPNLTCRWVIEAAEGRRLHLHFERVSLDEDNDRLMVRSGGSPLSPVIYDSDMDDVPERGLISDAQSLYVELLSETPANPLLLSLRFEAFEEDRCFAPFLAHGNVTTTDPEYRPGALATFSCLPGYALEPPGPPNAIECVDPTEPHWNDTEPACKAMCGGELSEPAGVVLSPDWPQSYSPGQDCVWGVHVQEEKRILLQVEILNVREGDMLTLFDGDGPSARVLAQLRGPQPRRRLLSSGPDLTLQFQAPPGPPNPGLGQGFVLHFKEVPRNDTCPELPPPEWGWRTASHGDLIRGTVLTYQCEPGYELLGSDILTCQWDLSWSAAPPACQKIMTCADPGEIANGHRTASDAGFPVGSHVQYRCLPGYSLEGAAMLTCYSRDTGTPKWSDRVPKCALKYEPCLNPGVPENGYQTLYKHHYQAGESLRFFCYEGFELIGEVTITCVPGHPSQWTSQPPLCKVAYEELLDNRKLEVTQTTDPSRQLEGGNLALAILLPLGLVIVLGSGVYIYYTKLQGKSLFGFSGSHSYSPITVESDFSNPLYEAGDTREYEVSI

SEQ ID NO: 5240 - protein, 126 aa, Homo sapiens
MGLLTFRDVAIEFSREEWEHLDSDQKLLYGDVMLENYGNLVSLGLAVSKPDLITFLEQRKEPWNVKSAETVAIQPDIFSHDTQGLLRKKLIEASFQKVILDGYGSCGPQNLNLRKEWESEGKIILW

SEQ ID NO: 5241 - protein, 152 aa, Homo sapiens
MKSPDEVLREGELEKRSDSLFQLWKKKRGVLTSDRLSLFPASPRARPKELRFHSILKVDCVERTGKYVYFTIVTTDHKEIDFRCAGESCWNAAIALALIDFQNRRALQDFRSRQERTAPAAPAEDAVAAAAAAPSEPSEPSRPSPQPKPRTP

SEQ ID NO: 5242 - protein, 148 aa, Homo sapiens
MAVASDFYLRYYVGHKGKFGHEFLEFEFRPDGKLRYANNSNYKNDVMIRKEAYVHKSVMEELKRIIDDSEITKEDDALWPPPDRVGRQELEIVIGDEHISFTTSKIGSLIDVNQSKDPEGLRVFYYLVQDLKCLVFSLIGLHFKIKPI

SEQ ID NO: 5243 - protein, 1124 aa, Homo sapiens
MADGPRCKRRKQANPRRNNVTNYNTVVETNSDSDDEDKLHIVEEESVTDAADCEGVPEDDLPTDQTVLPGRSSEREGNAKNCWEDDRKEGQEILGPEAQADEAGCTVKDDECESDAENEQNHDPNVEEFLQQQDTAVIFPEAPEEDQRQGTPEASGHDENGTPDAFSQLLTCPYCDRGYKRFTSLKEHIKYRHEKNEDNFSCSLCSYTFAYRTQLERHMTSHKSGRDQRHVTQSGCNRKFKCTECGKAFKYKHHLKEHLRIHSGEKPYECPNCKKRFSHSGSYSSHISSKKCISLIPVNGRPRTGLKTSQCSSPSLSASPGSPTRPQIRQKIENKPLQEQLSVNQIKTEPVDYEFKPIVVASGINCSTPLQNGVFTGGGPLQATSSPQGMVQAVVLPTVGLVSPISINLSDIQNVLKVAVDGNVIRQVLENNQANLASKEQETINASPIQQGGHSVISAISLPLVDQDGTTKIIINYSLEQPSQLQVVPQNLKKENPVATNSCKSEKLPEDLTVKSEKDKSFEGGVNDSTCLLCDDCPGDINALPELKHYDLKQPTQPPPLPAAEAEKPESSVSSATGDGNLSPSQPPLKNLLSLLKAYYALNAQPSAEELSKIADSVNLPLDVVKKWFEKMQAGQISVQSSEPSSPEPGKVNIPAKNNDQPQSANANEPQDSTVNLQSPLKMTNSPVLPVGSTTNGSRSSTPSPSPLNLSSSRNTQGYLYTAEGAQEEPQVEPLDLSLPKQQGELLERSTITSVYQNSVYSVQEEPLNLSCAKKEPQKDSCVTDSEPVVNVIPPSANPINIAIPTVTAQLPTIVAIADQNSVPCLRALAANKQTILIPQVAYTYSTTVSPAVQEPPLKVIQPNGNQDERQDTSSEGVSNVEDQNDSDSTPPKKKMRKTENGMYACDLCDKIFQKSSSLLRHKYEHTGKRPHECGICKKAFKHKHHLIEHMRLHSGEKPYQCDKCGKRFSHSGSYSQHMNHRYSYCKREAEERDSTEQEEAGPEILSNEHVGARASPSQGDSDERESLTREEDEDSEKEEEEEDKEMEELQEEKECEKPQGDEEEEEEEEEVEEEEVEEAENEGEEAKTEGLMKDDRAESQASSLGQKVGESSEQVSEEKTNEA

SEQ ID NO: 5244 - protein, 332 aa, Homo sapiens
MALLCYNRGCGQRFDPETNSDDACTYHPGVPVFHDALKGWSCCKRRTTDFSDFLSIVGCTKGRHNSEKPPEPVKPEVKTTEKKELCELKPKFQEHIIQAPKPVEAIKRPSPDEPMTNLELKISASLKQALDKLKLSSGNEENKKEEDNDEIKIGTSCKNGGCSKTYQGLESLEEVCVYHSGVPIFHEGMKYWSCCRRKTSDFNTFLAQEGCTKGKHMWTKKDAGKKVVPCRHDWHQTGGEVTISVYAKNSLPELSRVEANSTLLNVHIVFEGEKEFDQNVKLWGVIDVKRSYVTMTATKIEITMRKAEPMQWASLELPAAKKQEKQKDATTD

SEQ ID NO: 5245 - protein, 227 aa, Homo sapiens
MGGKLSKKKKGYNVNDEKAKEKDKKAEGAATEEEGTPKESEPQAAAEPAEAKEGKEKPDQDAEGKAEEKEGEKDAAAAKEEAPKAEPEKTEGAAEAKAEPPKAPEQEQAAPGPAAGGEAPKAAEAAAAPAESAAPAAGEEPSKEEGEPKKTEAPAAPAAQETKSDGAPASDSKPGSSEAAPSSKETPAATEAPSSTPKAQGPAASAEEPKPVEAPAANSDQTVTVKE

SEQ ID NO: 5246 - protein, 803 aa, Homo sapiens
MAEAHQAVGFRPSLTSDGAEVELSAPVLQEIYLSGLRSWKRHLSRFWNDFLTGVFPASPLSWLFLFSAIQLAWFLQLDPSLGLMEKIKELLPDWGGQHHGLRGVLAAALFASCLWGALIFTLHVALRLLLSYHGWLLEPHGAMSSPTKTWLALVRIFSGRHPMLFSYQRSLPRQPVPSVQDTVRKYLESVRPILSDEDFDWTAVLAQEFLRLQASLLQWYLRLKSWWASNYVSDWWEEFVYLRSRNPLMVNSNYYMMDFLYVTPTPLQAARAGNAVHALLLYRHRLNRQEIPPTLLMGMRPLCSAQYEKIFNTTRIPGVQKDYIRHLHDSQHVAVFHRGRFFRMGTHSRNSLLSPRALEQQFQRILDDPSPACPHEEHLAALTAAPRGTWAQVRTSLKTQAAEALEAVEGAAFFVSLDAEPAGLTREDPAASLDAYAHALLAGRGHDRWFDKSFTLIVFSNGKLGLSVEHSWADCPISGHMWEFTLATECFQLGYSTDGHCKGHPDPTLPQPQRLQWDLPDQIHSSISLALRGAKILSENVDCHVVPFSLFGKSFIRRCHLSSDSFIQIALQLAHFRDRGQFCLTYESAMTRLFLEGRTETVRSCTREACNFVRAMEDKEKTDPQCLALFRVAVDKHQALLKAAMSGQGVDRHLFALYIVSRFLHLQSPFLTQVHSEQWQLSTSQIPVQQMHLFDVHNYPDYVSSGGGFGPADDHGYGVSYIFMGDGMITFHISSKKSSTKTDSHRLGQHIEDALLDVASLFQAGQHFKRRFRGSGKENSRHRCGFLSRQTGASKASMTSTDF

SEQ ID NO: 5247 - protein, 919 aa, Homo sapiens
MTDSKYFTTTKKGEIFELKAELNSDKKEKKKEAVKKVIASMTVGKDVSALFPDVVNCMQTDNLELKKLVYLYLMNYAKSQPDMAIMAVNTFVKDCEDPNPLIRALAVRTMGCIRVDKITEYLCEPLRKCLKDEDPYVRKTAAVCVAKLHDINAQLVEDQGFLDTLKDLISDSNPMVVANAVAALSEIAESHPSSNLLDLNPQSINKLLTALNECTEWGQIFILDCLANYMPKDDREAQSICERVTPRLSHANSAVVLSAVKVLMKFMEMLSKDLDYYGTLLKKLAPPLVTLLSAEPELQYVALRNINLIVQKRPEILKHEMKVFFVKYNDPIYVKLEKLDIMIRLASQANIAQVLAELKEYATEVDVDFVRKAVRAIGRCAIKVEQSAERCVSTLLDLIQTKVNYVVQEAIVVIKDIFRKYPNKYESVIATLCENLDSLDEPEARAAMIWIVGEYAERIDNADELLESFLEGFHDESTQVQLQLLTAIVKLFLKKPTETQELVQQVLSLATQDSDNPDLRDRGYIYWRLLSTDPVAAKEVVLAEKPLISEETDLIEPTLLDELICYIGTLASVYHKPPSAFVEGGRGVVHKSLPPRTASSESAESPETAPTGAPPGEQPDVIPAQGDLLGDLLNLDLGPPVSGPPLATSSVQMGAVDLLGGGLDSLIGGTNFVAPPTAAVPANLGAPIGSGLSDLFDLTSGVGTLSGSYVAPKAVGSISMDLQLTNKALQVMTDFAIQFNRNSFGLAPAAPLQVHAPLSPNQTVEISLPLSTVGSVMKMEPLNNLQVAVKNNIDVFYFSTLYPLHILFVEDGKMDRQMFLATWKDIPNENEAQFQIRDCPLNAEAASSKLQSSNIFTVAKRNVEGQDMLYQSLKLTNGIWVLAELRIQPGNPSCTLSLKCRAPEVSQHVYQAYETILKN

SEQ ID NO: 5248 - protein, 348 aa, Homo sapiens
MLGRSGYRALPLGDFDRFQQSSFGFLGSQKGCLSPERGGVGTGADVPQSWPSCLCHGLISFLGFLLLLVTFPISGWFALKLASKDGAVLSVGADVQFRIWDPVLSVMTVKDLNTATRMTAQNAMTKALLKRPLREIQMEKLKISDQLLLEINDVTRAWGLEVDRVELAVEAVLQPPQDSPAGPNLDSTLQQLALHFLGGSMNSMAGGAPSPGPADTVEMVSEVEPPAPQVGARSSPKQPLAEGLLTALQPFLSEALVSQVGACYQFNVVLPSGTQSAYFLDLTTGRGRVGHGVPDGIPDVVVEMAEADLRALLCRELRPLGAYMSGRLKVKGDLAMAMKLEAVLRALK

SEQ ID NO: 5249 - protein, 1137 aa, Homo sapiens
MPLSSHLLPALVLFLAGSSGWAWVPNHCRSPGQAVCNFVCDCRDCSDEAQCGYHGASPTLGAPFACDFEQDPCGWRDISTSGYSWLRDRAGAALEGPGPHSDHTLGTDLGWYMAVGTHRGKEASTAALRSPTLREAASSCKLRLWYHAASGDVAELRVELTHGAETLTLWQSTGPWGPGWQELAVTTGRIRGDFRVTFSATRNATHRGAVALDDLEFWDCGLPTPQANCPPGHHHCQNKVCVEPQQLCDGEDNCGDLSDENPLTCGRHIATDFETGLGPWNRSEGWSRNHRAGGPERPSWPRRDHSRNSAQGSFLVSVAEPGTPAILSSPEFQASGTSNCSLVFYQYLSGSEAGCLQLFLQTLGPGAPRAPVLLRRRRGELGTAWVRDRVDIQSAYPFQILLAGQTGPGGVVGLDDLILSDHCRPVSEVSTLQPLPPGPRAPAPQPLPPSSRLQDSCKQGHLACGDLCVPPEQLCDFEEQCAGGEDEQACGTTDFESPEAGGWEDASVGRLQWRRVSAQESQGSSAAAAGHFLSLQRAWGQLGAEARVLTPLLGPSGPSCELHLAYYLQSQPREVSCNFERDTCSWYPGHLSDTHWRWVESRGPDHDHTTGQGHFVLLDPTDPLAWGHSAHLLSRPQVPAAPTECLSFWYHLHGPQIGTLRLAMRREGEETHLWSRSGTQGNRWHEAWATLSHQPGSHAQYQLLFEGLRDGYHGTMALDDVAVRPGPCWAPNYCSFEDSDCGFSPGGQGLWRRQANASGHAAWGPPTDHTTETAQGHYMVVDTSPDALPRGQTASLTSKEHRPLAQPACLTFWYHGSLRSPGTLRVYLEERGRHQVLSLSAHGGLAWRLGSMDVQAERAWRVVFEAVAAGVAHSYVALDDLLLQDGPCPQPGSCDFESGLCGWSHLAWPGLGGYSWDWGGGATPSRYPQPPVDHTLGTEAGHFAFFETGVLGPGGRAAWLRSEPLPATPASCLRFWYHMGFPEHFYKGELKVLLHSAQGQLAVWGAGGHRRHQWLEAQVEVASAKEFQIVFEATLGGQPALGPIALDDVEYLAGQHCQQPAPSPGNTAAPGSVPAVVGSALLLLMLLVLLGLGGRRWLQKKGSCPFQSNTEATAPGFDNILFNADGVTLPASVTSDP

SEQ ID NO: 5250 - protein, 382 aa, Homo sapiens
MAVSVTPIRDTKWLTLEVCREFQRGTCSRPDTECKFAHPSKSCQVENGRVIACFDSLKGRCSRENCKYLHPPPHLKTQLEINGRNNLIQQKNMAMLAQQMQLANAMMPGAPLQPVPMFSVAPSLATNASAAAFNPYLGPVSPSLVPAEILPTAPMLVTGNPGVPVPAAAAAAAQKLMRTDRLEVCREYQRGNCNRGENDCRFAHPADSTMIDTNDNTVTVCMDYIKGRCSREKCKYFHPPAHLQAKIKAAQYQVNQAAAAQAAATAAAMGIPQAVLPPLPKRPALEKTNGATAVFNTGIFQYQQALANMQLQQHTAFLPPGSILCMTPATSVVPMVHGATPATVSAATTSATSVPFAATATANQIPIISAEHLTSHKYVTQM

SEQ ID NO: 5251 - protein, 545 aa, Homo sapiens
MLPGAWLLWTSLLLLARPAQPCPMGCDCFVQEVFCSDEELATVPLDIPPYTKNIIFVETSFTTLETRAFGSNPNLTKVVFLNTQLCQFRPDAFGGLPRLEDLEVTGSSFLNLSTNIFSNLTSLGKLTLNFNMLEALPEGLFQHLAALESLHLQGNQLQALPRRLFQPLTHLKTLNLAQNLLAQLPEELFHPLTSLQTLKLSNNALSGLPQGVFGKLGSLQELFLDSNNISELPPQVFSQLFCLERLWLQRNAITHLPLSIFASLGNLTFLSLQWNMLRVLPAGLFAHTPCLVGLSLTHNQLETVAEGTFAHLSNLRSLMLSYNAITHLPAGIFRDLEELVKLYLGSNNLTALHPALFQNLSKLELLSLSKNQLTTLPEGIFDTNYNLFNLALHGNPWQCDCHLAYLFNWLQQYTDRLLNIQTYCAGPAYLKGQVVPALNEKQLVCPVTRDHLGFQVTWPDESKAGGSWDLAVQERAARSQCTYSNPEGTVVLACDQAQCRWLNVQLSPQQGSLGLQYNASQEWDLRSSCGSLRLTVSIEARAAGP

SEQ ID NO: 5252 - protein, 199 aa, Homo sapiens
MKSGLWYFFLFCLRIKVLTGEINGSANYEMFIFHNGGVQILCKYPDIVQQFKMQLLKGGQILCDLTKTKGSGNTVSIKSLKFCHSQLSNNSVSFFLYNLDHSHANYYFCNLSIFDPPPFKVTLTGGYLHIYESQLCCQLKFWLPIGCAAFVVVCILGCILICWLTKKKYSSSVHDPNGEYMFMRAVNTAKKSRLTDVTL

SEQ ID NO: 5253 - protein, 304 aa, Homo sapiens
MGQCVTKCKNPSSTLGSKNGDREPSNKSHSRRGAGHREEQVPPCGKPGGDILVNGTKKAEAATEACQLPTSSGDAGRESKSNAEESSLQRLEELFRRYKDEREDAILEEGMERFCNDLCVDPTEFRVLLLAWKFQAATMCKFTRKEFFDGCKAISADSIDGICARFPSLLTEAKQEDKFKDLYRFTFQFGLDSEEGQRSLHREIAIALWKLVFTQNNPPVLDQWLNFLTENPSGIKGISRDTWNMFLNFTQVIGPDLSNYSEDEAWPSLFDTFVEWEMERRKREGEGRGALSSGPEGLCPEEQT

SEQ ID NO: 5254 - protein, 494 aa, Homo sapiens
MFEIKKICCIGAGYVGGPTCSVIAHMCPEIRVTVVDVNESRINAWNSPTLPIYEPGLKEVVESCRGKNLFFSTNIDDAIKEADLVFISVNTPTKTYGMGKGRAADLKYIEACARRIVQNSNGYKIVTEKSTVPVRAAESIRRIFDANTKPNLNLQVLSNPEFLAEGTAIKDLKNPDRVLIGGDETPEGQRAVQALCAVYEHWVPREKILTTNTWSSELSKLAANAFLAQRISSINSISALCEATGADVEEVATAIGMDQRIGNKFLKASVGFGGSCFQKDVLNLVYLCEALNLPEVARYWQQVIDMNDYQRRRFASRIIDSLFNTVTDKKIAILGFAFKKDTGDTRESSSIYISKYLMDEGAHLHIYDPKVPREQIVVDLSHPGVSEDDQVSRLVTISKDPYEACDGAHAVVICTEWDMFKELDYERIHKKMLKPAFIFDGRRVLDGLHNELQTIGFQIETIGKKVSSKRIPYAPSGEIPKFSLQDPPNKKPKV

SEQ ID NO: 5255 - protein, 173 aa, Homo sapiens
MALRVVRSVRALLCTLRAVPSPAAPCPPRPWQLGVGAVRTLRTGPALLSVRKFTEKHEWVTTENGIGTVGISNFAQEALGDVVYCSLPEVGTKLNKQDEFGALESVKAASELYSPLSGEVTEINEALAENPGLVNKSCYEDGWLIKMTLSNPSELDELMSEEAYEKYIKSIEE

SEQ ID NO: 5256 - protein, 406 aa, Homo sapiens
MAAPEEHDSPTEASQPIVEEEETKTFKDLGVTDVLCEACDQLGWTKPTKIQIEAIPLALQGRDIIGLAETGSGKTGAFALPILNALLETPQRLFALVLTPTRELAFQISEQFEALGSSIGVQSAVIVGGIDSMSQSLALAKKPHIIIATPGRLIDHLENTKGFNLRALKYLVMDEADRILNMDFETEVDKILKVIPRDRKTFLFSATMTKKVQKLQRAALKNPVKCAVSSKYQTVEKLQQYYIFIPSKFKSKRLGSLNKFKAKARSILLATDVASRGLDIPHVDVVVNFDIPTHSKDYIHRVGRTARAGRSGKAITFVTQYDVELFQRIEHLIGKKLPGFPTQDDEVMMLTERVAEAQRFARMELREHGEKKKRSREDAGDNDDTEGAIGVRNKVAGGKMKKRKGR

SEQ ID NO: 5257 - protein, 655 aa, Homo sapiens
MAAGVAAWLPFARAAAIGWMPVANCPMPLAPADKNKRQDELIVLNVSGRRFQTWRTTLERYPDTLLGSTEKEFFFNEDTKEYFFDRDPEVFRCVLNFYRTGKLHYPRYECISAYDDELAFYGILPEIIGDCCYEEYKDRKRENAERLMDDNDSENNQESMPSLSFRQTMWRAFENPHTSTLALVFYYVTGFFIAVSVITNVVETVPCGTVPGSKELPCGERYSVAFFCLDTACVMIFTVEYLLRLFAAPSRYRFIRSVMSIIDVVAIMPYYIGLVMTNNEDVSGAFVTLRVFRVFRIFKFSRHSQGLRILGYTLKSCASELGFLLFSLTMAIIIFATVMFYAEKGSSASKFTSIPASFWYTIVTMTTLGYGDMVPKTIAGKIFGSICSLSGVLVIALPVPVIVSNFSRIYHQNQRADKRRAQKKARLARIRVAKTGSSNAYLHSKRNGLLNEALELTGTPEEEHMGKTTSLIESQHHHLLHCLEKTTGLSYLVDDPLLSVRTSTIKNHEFIDEQMFEQNCMESSMQNYPSTRSPSLSSHPGLTTTCCSRRSKKTTHLPNSNLPATRLRSMQELSTIHIQGSEQPSLTTSRSSLNLKADDGLRPNCKTSQITTAIISIPTPPALTPEGESRPPPASPGPNTNIPSIASNVVKVSAL

SEQ ID NO: 5258 - protein, 98 aa, Homo sapiens
MLSRLQELRKEEETLLRLKAALHDQLNRLKVEELALQSMISSRRGDEMLSSHTVPEQSHDMLVHVDNEASINQTTLELSTKSHVTEEEEEEEEEESDS

SEQ ID NO: 5259 - protein, 1250 aa, Homo sapiens
MARGDAGRGRGLLALTFCLLAARGELLLPQETTVELSCGVGPLQVILGPEQAAVLNCSLGAAAAGPPTRVTWSKDGDTLLEHDHLHLLPNGSLWLSQPLAPNGSDESVPEAVGVIEGNYSCLAHGPLGVLASQTAVVKLATLADFSLHPESQTVEENGTARFECHIEGLPAPIITWEKDQVTLPEEPRLIVLPNGVLQILDVQESDAGPYRCVATNSARQHFSQEALLSVAHRGSLASTRGQDVVIVAAPENTTVVSGQSVVMECVASADPTPFVSWVRQDGKPISTDVIVLGRTNLLIANAQPWHSGVYVCRANKPRTRDFATAAAELRVLAAPAITQAPEALSRTRASTARFVCRASGEPRPALRWLHNGAPLRPNGRVKVQGGGGSLVITQIGLQDAGYYQCVAENSAGMACAAASLAVVVREGLPSAPTRVTATPLSSSAVLVAWERPEMHSEQIIGFSLHYQKARGMDNVEYQFAVNNDTTELQVRDLEPNTDYEFYVVAYSQLGASRTSTPALVHTLDDVPSAAPQLSLSSPNPSDIRVAWLPLPPSLSNGQVVKYKIEYGLGKEDQIFSTEVRGNETQLMLNSLQPNKVYRVRISAGTAAGFGAPSQWMHHRTPSMHNQSHVPFAPAELKVQAKMESLVVSWQPPPHPTQISGYKLYWREVGAEEEANGDRLPGGRGDQAWDVGPVRLKKKVKQYELTQLVPGRLYEVKLVAFNKHEDGYAAVWKGKTEKAPAPDMPIQRGPPLPPAHVHAESNSSTSIWLRWKKPDFTTVKIVNYTVRFSPWGLRNASLVTYYTSSGEDILIGGLKPFTKYEFAVQSHGVDMDGPFGSVVERSTLPDRPSTPPSDLRLSPLTPSTVRLHWCPPTEPNGEIVEYLILYSSNHTQPEHQWTLLTTQGNIFSAEVHGLESDTRYFFKMGARTEVGPGPFSRLQDVITLQEKLSDSLDMHSVTGIIVGVCLGLLCLLACMCAGLRRSPHRESLPGLSSTATPGNPALYSRARLGPPSPPAAHELESLVHPHPQDWSPPPSDVEDRAEVHSLMGGGVSEGRSHSKRKISWAQPSGLSWAGSWAGCELPQAGPRPALTRALLPPAGTGQTLLLQALVYDAIKGNGRKKSPPACRNQVEAEVIVHSDFSASNGNPDLHLQDLEPEDPLPPEAPDLISGVGDPGQGAAWLDRELGGCELAAPGPDRLTCLPEAASASCSYPDLQPGEVLEETPGDSCQLKSPCPLGASPGLPRSPVSSSA

SEQ ID NO: 5260 - protein, 331 aa, Homo sapiens
MGGEQEEERFDGMLLAMAQQHEGGVQELVNTFFSFLRRKTDFFIGGEEGMAEKLITQTFSHHNQLAQKTRREKRARQEAERREKAERAARLAKEAKSETSGPQIKELTDEEAERLQLEIDQKKDAENHEAQLKNGSLDSPGKQDTEEDEEEDEKDKGKLKPNLGNGADLPNYRWTQTLSELDLAVPFCVNFRLKGKDMVVDIQRRHLRVGLKGQPAIIDGELYNEVKVEESSWLIEDGKVVTVHLEKINKMEWWSRLVSSDPEINTKKINPENSKLSDLDSETRSMVEKMMYDQRQKSMGLPTSDEQKKQEILKKFMDQHPEMDFSKAKFN

SEQ ID NO: 5261 - protein, 455 aa, Homo sapiens
MSFLIDSSIMITSQILFFGFGWLFFMRQLFKDYEIRQYVVQVIFSVTFAFSCTMFELIIFEILGVLNSSSRYFHWKMNLCVILLILVFMVPFYIGYFIVSNIRLLHKQRLLFSCLLWLTFMYFFWKLGDPFPILSPKHGILSIEQLISRVGVIGVTLMALLSGFGAVNCPYTYMSYFLRNVTDTDILALERRLLQTMDMIISKKKRMAMARRTMFQKGEVHNKPSGFWGMIKSVTTSASGSENLTLIQQEVDALEELSRQLFLETADLYATKERIEYSKTFKGKYFNFLGYFFSIYCVWKIFMATINIVFDRVGKTDPVTRGIEITVNYLGIQFDVKFWSQHISFILVGIIIVTSIRGLLITLTKFFYAISSSKSSNVIVLLLAQIMGMYFVSSVLLIRMSMPLEYRTIITEVLGELQFNFYHRWFDVIFLVSALSSILFLYLAHKQAPEKQMAP

SEQ ID NO: 5262 - protein, 1409 aa, Homo sapiens
MKSSGPVERLLRALGRRDSSRAASRPRKAEPHSFREKVFRKKPPVCAVCKVTIDGTGVSCRVCKVATHRKCEAKVTSACQALPPVELRRNTAPVRRIEHLGSTKSLNHSKQRSTLPRSFSLDPLMERRWDLDLTYVTERILAAAFPARPDEQRHRGHLRELAHVLQSKHRDKYLLFNLSEKRHDLTRLNPKVQDFGWPELHAPPLDKLCSICKAMETWLSADPQHVVVLYCKGNKGKLGVIVSAYMHYSKISAGADQALATLTMRKFCEDKVATELQPSQRRYISYFSGLLSGSIRMNSSPLFLHYVLIPMLPAFEPGTGFQPFLKIYQSMQLVYTSGVYHIAGPGPQQLCISLEPALLLKGDVMVTCYHKGGRGTDRTLVFRVQFHTCTIHGPQLTFPKDQLDEAWTDERFPFQASVEFVFSSSPEKIKGSTPRNDPSVSVDYNTTEPAVRWDSYENFNQHHEDSVDGSLTHTRGPLDGSPYAQVQRPPRQTPPAPSPEPPPPPMLSVSSDSGHSSTLTTEPAAESPGRPPPTAAERQELDRLLGGCGVASGGRGAGRETAILDDEEQPTVGGGPHLGVYPGHRPGLSRHCSCRQGYREPCGVPNGGYYRPEGTLERRRLAYGGYEGSPQGYAEASMEKRRLCRSLSEGLYPYPPEMGKPATGDFGYRAPGYREVVILEDPGLPALYPCPACEEKLALPTAALYGLRLEREAGEGWASEAGKPLLHPVRPGHPLPLLLPACGHHHAPMPDYSCLKPPKAGEEGHEGCSYTMCPEGRYGHPGYPALVTYSYGGAVPSYCPAYGRVPHSCGSPGEGRGYPSPGAHSPRAGSISPGSPPYPQSRKLSYEIPTEEGGDRYPLPGHLASAGPLASAESLEPVSWREGPSGHSTLPRSPRDAPCSASSELSGPSTPLHTSSPVQGKESTRRQDTRSPTSAPTQRLSPGEALPPVSQAGTGKAPELPSGSGPEPLAPSPVSPTFPPSSPSDWPQERSPGGHSDGASPRSPVPTTLPGLRHAPWQGPRGPPDSPDGSPLTPVPSQMPWLVASPEPPQSSPTPAFPLAASYDTNGLSQPPLPEKRHLPGPGQQPGPWGPEQASSPARGISHHVTFAPLLSDNVPQTPEPPTQESQSNVKFVQDTSKFWYKPHLSRDQAIALLKDKDPGAFLIRDSHSFQGAYGLALKVATPPPSAQPWKGDPVEQLVRHFLIETGPKGVKIKGCPSEPYFGSLSALVSQHSISPISLPCCLRIPSKDPLEETPEAPVPTNMSTAADLLRQGAACSVLYLTSVETESLTGPQAVARASSAALSCSPRPTPAVVHFKVSAQGITLTDNQRKLFFRRHYPVNSITFSSTDPQDRRWTNPDGTTSKIFGFVAKKPGSPWENVCHLFAELDPDQPAGAIVTFITKVLLGQRK

SEQ ID NO: 5263 - protein, 159 aa, Homo sapiens
MELPAVNLKVILLGHWLLTTWGCIVFSGSYAWANFTILALGVWAVAQRDSIDAISMFLGGLLATIFLDIVHISIFYPRVSLTDTGRFGVGMAILSLLLKPLSCCFVYHMYRERGGELLVHTGFLGSSQDRSAYQTIDSAEAPADPFAVPEGRSQDARGY

SEQ ID NO: 5264 - protein, 464 aa, Homo sapiens
MDGTEGSAGQPGPAERSHRSSVSSVGARAADVLVYLADDTVVPLAVENLPSLSAHELHRAVREVLQLPDIALDVFALWLVSPLLEVQLKPKHQPYKLGRQWPELLLRFTSAPDDDVAMDEPFLQFRRNVFFPKRRELQIHDEEVLRLLYEEAKGNVLAARYPCDVEDCEALGALVCRVQLGPYQPGRPAACDLREKLDSFLPAHLCKRGQSLFAALRGRGARAGPGEQGLLNAYRQVQEVSSDGGCEAALGTHYRAYLLKCHELPFYGCAFFHGEVDKPAQGFLHRGGRKPVSVAISLEGVHVIDSREKHVLLGLRFQELSWDHTSPEEEEPILWLEFDGDSEGTPVNKLLKIYSKQAELMSSLIEYCIELSQAAEPAGPQDSATGSPSDPSSSLAPVQRPKLRRQGSVVSSRIQHLSTIDYVEDGKGIRRVKPKRTTSFFSRQLSLGQGSYTVVQPGDSLEQG

SEQ ID NO: 5265 - protein, 343 aa, Homo sapiens
MAQKGVLGPGQLGAVAILLYLGLLRSGTGAEGAEAPCGVAPQARITGGSSAVAGQWPWQVSITYEGVHVCGGSLVSEQWVLSAAHCFPSEHHKEAYEVKLGAHQLDSYSEDAKVSTLKDIIPHPSYLQEGSQGDIALLQLSRPITFSRYIRPICLPAANASFPNGLHCTVTGWGHVAPSVSLLTPKPLQQLEVPLISRETCNCLYNIDAKPEEPHFVQEDMVCAGYVEGGKDACQGDSGGPLSCPVEGLWYLTGIVSWGDACGARNRPGVYTLASSYASWIQSKVTELQPRVVPQTQESQPDSNLCGSHLAFSSAPAQGLLRPILFLPLGLALGLLSPWLSEH

SEQ ID NO: 5266 - protein, 313 aa, Homo sapiens
MAGQPGHMPHGGSSNNLCHTLGPVHPPDPQRHPNTLSFRCSLADFQIEKKIGRGQFSEVYKATCLLDRKTVALKKVQIFEMMDAKARQDCVKEIGLLKQLNHPNIIKYLDSFIEDNELNIVLELADAGDLSQMIKYFKKQKRLIPERTVWKYFVQLCSAVEHMHSRRVMHRDIKPANVFITATGVVKLGDLGLGRFFSSETTAAHSLVGTPYYMSPERIHENGYNFKSDIWSLGCLLYEMAALQSPFYGDKMNLFSLCQKIEQCDYPPLPGEHYSEKLRELVSMCICPDPHQRPDIGYVHQVAKQMHIWMSST

SEQ ID NO: 5267 - protein, 335 aa, Homo sapiens
MRLGPRTAALGLLLLCAAAAGAGKAEELHYPLGERRSDYDREALLGVQEDVDEYVKLGHEEQQKRLQAIIKKIDLDSDGFLTESELSSWIQMSFKHYAMQEAKQQFVEYDKNSDDTVTWDEYNIQMYDRVIDFDENTALDDAEEESFRKEFAICKKQSFCFWLLRFNLHLKDKKRFEKANQDSGPGLSLEEFIAFEHPEEVDYMTEFVIQEALEEHDKNGDGFVSLEEFLGDYRWDPTANEDPEWILVEKDRFVNDYDKDNDGRLDPQELLPWVVPNNQGIAQEEALHLIDEMDLNGDKKLSEEEILENPDLFLTSEATDYGRQLHDDYFYHDEL

SEQ ID NO: 5268 - protein, 1419 aa, Homo sapiens
MDGGGVCVGRGDLLSSPQALGQLLRKESRPRRAMKPRKAEPHSFREKVFRKKPPVCAVCKVTIDGTGVSCRVCKVATHRKCEAKVTSACQALPPVELRRNTAPVRRIEHLGSTKSLNHSKQRSTLPRSFSLDPLMERRWDLDLTYVTERILAAAFPARPDEQRHRGHLRELAHVLQSKHRDKYLLFNLSEKRHDLTRLNPKVQDFGWPELHAPPLDKLCSICKAMETWLSADPQHVVVLYCKGNKGKLGVIVSAYMHYSKISAGADQALATLTMRKFCEDKVATELQPSQRRYISYFSGLLSGSIRMNSSPLFLHYVLIPMLPAFEPGTGFQPFLKIYQSMQLVYTSGVYHIAGPGPQQLCISLEPALLLKGDVMVTCYHKGGRGTDRTLVFRVQFHTCTIHGPQLTFPKDQLDEAWTDERFPFQASVEFVFSSSPEKIKGSTPRNDPSVSVDYNTTEPAVRWDSYENFNQHHEDSVDGSLTHTRGPLDGSPYAQVQRPPRQTPPAPSPEPPPPPMLSVSSDSGHSSTLTTEPAAESPGRPPPTAAERQELDRLLGGCGVASGGRGAGRETAILDDEEQPTVGGGPHLGVYPGHRPGLSRHCSCRQGYREPCGVPNGGYYRPEGTLERRRLAYGGYEGSPQGYAEASMEKRRLCRSLSEGLYPYPPEMGKPATGDFGYRAPGYREVVILEDPGLPALYPCPACEEKLALPTAALYGLRLEREAGEGWASEAGKPLLHPVRPGHPLPLLLPACGHHHAPMPDYSCLKPPKAGEEGHEGCSYTMCPEGRYGHPGYPALVTYSYGGAVPSYCPAYGRVPHSCGSPGEGRGYPSPGAHSPRAGSISPGSPPYPQSRKLSYEIPTEEGGDRYPLPGHLASAGPLASAESLEPVSWREGPSGHSTLPRSPRDAPCSASSELSGPSTPLHTSSPVQGKESTRRQDTRSPTSAPTQRLSPGEALPPVSQAGTGKAPELPSGSGPEPLAPSPVSPTFPPSSPSDWPQERSPGGHSDGASPRSPVPTTLPGLRHAPWQGPRGPPDSPDGSPLTPVPSQMPWLVASPEPPQSSPTPAFPLAASYDTNGLSQPPLPEKRHLPGPGQQPGPWGPEQASSPARGISHHVTFAPLLSDNVPQTPEPPTQESQSNVKFVQDTSKFWYKPHLSRDQAIALLKDKDPGAFLIRDSHSFQGAYGLALKVATPPPSAQPWKGDPVEQLVRHFLIETGPKGVKIKGCPSEPYFGSLSALVSQHSISPISLPCCLRIPSKDPLEETPEAPVPTNMSTAADLLRQGAACSVLYLTSVETESLTGPQAVARASSAALSCSPRPTPAVVHFKVSAQGITLTDNQRKLFFRRHYPVNSITFSSTDPQDRRWTNPDGTTSKIFGFVAKKPGSPWENVCHLFAELDPDQPAGAIVTFITKVLLGQRK

SEQ ID NO: 5269 - protein, 199 aa, Homo sapiens
MLLGRLTSQLLRAVPWAGGRPPWPVSGVLGSRVCGPLYSTSPAGPGRAASLPRKGAQLELEEMLVPRKMSVSPLESWLTARCFLPRLDTGTAGTVAPPQSYQCPPSQIGEGAEQGDEGVADAPQIQCKNVLKIRRRKMNHHKYRKLVKKTRFLRRKVQEGRLRRKQIKFEKDLRRIWLKAGLKEAPEGWQTPKIYLRGK

SEQ ID NO: 5270 - protein, 526 aa, Homo sapiens
MRCALALSALLLLLSTPPLLPSSPSPSPSPSQNATQTTTDSSNKTAPTPASSVTIMATDTAQQSTVPTSKANEILASVKATTLGVSSDSPGTTTLAQQVSGPVNTTVARGGGSGNPTTTIESPKSTKSADTTTVATSTATAKPNTTSSQNGAEDTTNSGGKSSHSVTTDLTSTKAEHLTTPHPTSPLSPRQPTSTHPVATPTSSGHDHLMKISSSSSTVAIPGYTFTSPGMTTTLPSSVISQRTQQTSSQMPASSTAPSSQETVQPTSPATALRTPTLPETMSSSPTAASTTHRYPKTPSPTVAHESNWAKCEDLETQTQSEKQLVLNLTGNTLCAGGASDEKLISLICRAVKATFNPAQDKCGIRLASVPGSQTVVVKEITIHTKLPAKDVYERLKDKWDELKEAGVSDMKLGDQGPPEEAEDRFSMPLIITIVCMASFLLLVAALYGCCHQRLSQRKDQQRLTEELQTVENGYHDNPTLEVMETSSEMQEKKVVSLNGELGDSWIVPLDNLTKDDLDEEEDTHL

SEQ ID NO: 5271 - protein, 274 aa, Homo sapiens
MVGRRALIVLAHSERTSFNYAMKEAAAAALKKKGWEVVESDLYAMNFNPIISRKDITGKLKDPANFQYPAESVLAYKEGHLSPDIVAEQKKLEAADLVIFQFPLQWFGVPAILKGWFERVFIGEFAYTYAAMYDKGPFRSKKAVLSITTGGSGSMYSLQGIHGDMNVILWPIQSGILHFCGFQVLEPQLTYSIGHTPADARIQILEGWKKRLENIWDETPLYFAPSSLFDLNFQAGFLMKKEVQDEEKNKKFGLSVGHHLGKSIPTDNQIKARK

SEQ ID NO: 5272 - protein, 622 aa, Homo sapiens
MPPQLQNGLNLSAKVVQGSLDSLPQAVREFLENNAELCQPDHIHICDGSEEENGRLLGQMEEEGILRRLKKYDNCWLALTDPRDVARIESKTVIVTQEQRDTVPIPKTGLSQLGRWMSEEDFEKAFNARFPGCMKGRTMYVIPFSMGPLGSPLSKIGIELTDSPYVVASMRIMTRMGTPVLEAVGDGEFVKCLHSVGCPLPLQKPLVNNWPCNPELTLIAHLPDRREIISFGSGYGGNSLLGKKCFALRMASRLAKEEGWLAEHMLILGITNPEGEKKYLAAAFPSACGKTNLAMMNPSLPGWKVECVGDDIAWMKFDAQGHLRAINPENGFFGVAPGTSVKTNPNAIKTIQKNTIFTNVAETSDGGVYWEGIDEPLASGVTITSWKNKEWSSEDGEPCAHPNSRFCTPASQCPIIDAAWESPEGVPIEGIIFGGRRPAGVPLVYEALSWQHGVFVGAAMRSEATAAAEHKGKIIMHDPFAMRPFFGYNFGKYLAHWLSMAQHPAAKLPKIFHVNWFRKDKEGKFLWPGFGENSRVLEWMFNRIDGKASTKLTPIGYIPKEDALNLKGLGHINMMELFSISKEFWEKEVEDIEKYLEDQVNADLPCEIEREILALKQRISQM

SEQ ID NO: 5273 - protein, 180 aa, Homo sapiens
MVVGAFPMAKLLYLGIRQVSKPLANRIKEAARRSEFFKTYICLPPAQLYHWLEMRTKMRIMGFNAAAIKPLNEGAAAELGAELLGEGIIFITACSCLMLEYWRHQLQQRRKEKERRVAREALRGEVGHLGLALEELQAQVQATSTQLALEELRAQLQEVRAHLCLRDPPPAPPVAPASEK

SEQ ID NO: 5274 - protein, 1560 aa, Homo sapiens
MAAGSGGSGGSGGGPGPGPGGGGGPSGSGSGPGSNGGLGSGGELHPRTGRLVSLSACGRTARRQQPGQEFNHGLVLSREPLRDGRVFTVRIDRKVNSWSGSIEIGVTALDPSVLDFPSSATGLKGGSWVVSGCSVLRDGRSVLEEYGQDLDQLGEGDRVGVERTVAGELRLWVNGRDCGVAATGLPPRVWAVVDLYGKCTQITVLPPEPGFSPPTPIPTPPLEPLAPTEDSALAEQGTSADEAFMVSPAQARPETFPNSLESHNDFANMELSEVVSNTILSAYNGGLLNVNLSSPPAGEGLGSSGAATSPILTSNDALLFHEKCGTLIKLSNNNKTAERRRPLDEFNNGVVMTNRPLRDNEMFEIRIDKLVDKWSGSIEIGVTTHNPNSLEYPATMTNLQSGTIMMSGCGILTNGKGTRREYCEFSLDELQEGDHIGLTRKSNSALHFFINGIDQGVATPLTPPVVYGVVDLYGMAVKVTIVHNNNHSDRLRRNNAILRALSPEGALRRAAPAAQAEPERLLFHPNCGQKAAITHEGRTALRPHATDDFNHGVVLSSRALRDGEVFQVRIDKMVDKWAGSIEIGVTTHNPAYLQLPSTMTNLRSGTWMMTGNGVMHNGTTILDEYGHNLDRLKAGDTVGVVRREDGTLHFFVNGMTQGPAAWNVPPGVYAVVDLYGQAAQATIVDDVEVAPVPEPLPEGNNQVSPSSPSSGAGGSDLRFHQLHGSNAVITNGGRTALRHNCRSEFNDAIVISNRALRDGELFEIVIQKMVDRWSGSIEAGVTAIRPEDLEFPNTMTDIDYDTWMLSGTAIMQDGNTMRNNYGCDLDALGTGARIGMMRTAKGDLHYFINGQDQGAACSGLPPEVYAVVDLYGQCVQVSITNATGPMDNSLATSNTATEKSFPLHSPVAGVAHRFHSTCGKNVTLEEDGTRAVRAAGYAHGLVFSTKELRAEEVFEVKVEELDEKWAGSLRLGLTTLAPGEMGPGAGGGGPGLPPSLPELRTKTTWMVSSCEVRRDGQLQRMNYGRNLERLGVGSRVGVRRGADDTMHILVDGEDMGPAATGIAKNVWAVLDLYGPVRGVSIVSSTRLEESEGTQPPSPSSDTGSEGEEDDEGEEHGLGGQNEVGIIPTTLEFLENHGKNILLSNGNRTATRVASYNQGIVVINQPLVPQLLVQVRIDFLNRQWTSSLVLGVITCAPERLNFPASACALKRAAWLLRGRGVFHNGLKICEKFGPNLDTCPEGTILGLRLDSSGGLHLHVNGVDQGVAVPDVPQPCHALVDLYGQCEQVTIVNPEPGAASGKSAGTQGDMEKADMVDGIKESVCWGPPPAASPLKSCEYHALCSRFQELLLLPEDYFMPPPKRSLCYCESCRKLRGDEAHRRRGEPPREYALPFGWCRFNLRVNPRLEAGTLTKKWHMAYHGSNVAAVRRVLDRGELGAGTASILSCRPLKGEPGVGFEEPGENCAPPREEQPPPVLLSPSLQYAGAETLASKVQFRDPKSQRTHQAQVAFQVCVRPGSYTPGPPSAALGEPPDPHFSPAELEWVTKEKGATLLCALLVRVE

SEQ ID NO: 5275 - protein, 1237 aa, Homo sapiens
MGDMKTPDFDDLLAAFDIPDIDANEAIHSGPEENEGPGGPGKPEPGVGSESEDTAAASAGDGPGVPAQASDHGLPPPDISVVSVIVKNTVCPEQSEALAGGSAGDGAQAAGVTKEGPVGPHRMQNGFGSPEPSLPGTPHSPAPPSGGTWKEKGMEGKTPLDLFAHFGPEPGDHSDPLPPSAPSPTREGALTPPPFPSSFELAQENGPGMQPPVSSPPLGALKQESCSPHHPQVLAQQGSGSSPKATDIPASASPPPVAGVPFFKQSPGHQSPLASPKVPVCQPLKEEDDDEGPVDKSSPGSPQSPSSGAEAADEDSNDSPASSSSRPLKVRIKTIKTSCGNITRTVTQVPSDPDPPAPLAEGAFLAEASLLKLSPATPTSEGPKVVSVQLGDGTRLKGTVLPVATIQNASTAMLMAASVARKAVVLPGGTATSPKMIAKNVLGLVPQALPKADGRAGLGTGGQKVNGASVVMVQPSKTATGPSTGGGTVISRTQSSLVEAFNKILNSKNLLPAYRPNLSPPAEAGLALPPTGYRCLECGDAFSLEKSLARHYDRRSMRIEVTCNHCARRLVFFNKCSLLLHAREHKDKGLVMQCSHLVMRPVALDQMVGQPDITPLLPVAVPPVSGPLALPALGKGEGAITSSAITTVAAEAPVLPLSTEPPAAPATSAYTCFRCLECKEQCRDKAGMAAHFQQLGPPAPGATSNVCPTCPMMLPNRCSFSAHQRMHKNRPPHVCPECGGNFLQANFQTHLREACLHVSRRVGYRCPSCSVVFGGVNSIKSHIQTSHCEVFHKCPICPMAFKSGPSAHAHLYSQHPSFQTQQAKLIYKCAMCDTVFTHKPLLSSHFDQHLLPQRVSVFKCPSCPLLFAQKRTMLEHLKNTHQSGRLEETAGKGAGGALLTPKTEPEELAVSQGGAAPATEESSSSSEEEEVPSSPEPPRPAKRPRRELGSKGLKGGGGGPGGWTCGLCHSWFPERDEYVAHMKKEHGKSVKKFPCRLCERSFCSAPSLRRHVRVNHEGIKRVYPCRYCTEGKRTFSSRLILEKHVQVRHGLQLGAQSPGRGTTLARGSSARAQGPGRKRRQSSDSCSEEPDSTTPPAKSPRGGPGSGGHGPLRYRSSSSTEQSLMMGLRVEDGAQQCLDCGLCFASPGSLSRHRFISHKKRRGVGKASALGLGDGEEEAPPSRSDPDGGDSPLPASGGPLTCKVCGKSCDSPLNLKTHFRTHGMAFIRARQGAVGDN

SEQ ID NO: 5276 - protein, 97 aa, Homo sapiens
MQLGTGLLLAAVLSLQLAAAEAIWCHQCTGFGGCSHGSRCLRDSTHCVTTATRVLSNTEDLPLVTKMCHIGCPDIPSLGLGPYVSIACCQTSLCNHD

SEQ ID NO: 5277 - protein, 823 aa, Homo sapiens
MGGRVFLVFLAFCVWLTLPGAETQDSRGCARWCPQDSSCVNATACRCNPGFSSFSEIITTPMETCDDINECATLSKVSCGKFSDCWNTEGSYDCVCSPGYEPVSGAKTFKNESENTCQDVDECQQNPRLCKSYGTCVNTLGSYTCQCLPGFKLKPEDPKLCTDVNECTSGQNPCHSSTHCLNNVGSYQCRCRPGWQPIPGSPNGPNNTVCEDVDECSSGQHQCDSSTVCFNTVGSYSCRCRPGWKPRHGIPNNQKDTVCEDMTFSTWTPPPGVHSQTLSRFFDKVQDLGRDYKPGLANNTIQSILQALDELLEAPGDLETLPRLQQHCVASHLLDGLEDVLRGLSKNLSNGLLNFSYPAGTELSLEVQKQVDRSVTLRQNQAVMQLDWNQAQKSGDPGPSVVGLVSIPGMGKLLAEAPLVLEPEKQMLLHETHQGLLQDGSPILLSDVISAFLSNNDTQNLSSPVTFTFSHRSVIPRQKVLCVFWEHGQNGCGHWATTGCSTIGTRDTSTICRCTHLSSFAVLMAHYDVQEEDPVLTVITYMGLSVSLLCLLLAALTFLLCKAIQNTSTSLHLQLSLCLFLAHLLFLVAIDQTGHKVLCSIIAGTLHYLYLATLTWMLLEALYLFLTARNLTVVNYSSINRFMKKLMFPVGYGVPAVTVAISAASRPHLYGTPSRCWLQPEKGFIWGFLGPVCAIFSVNLVLFLVTLWILKNRLSSLNSEVSTLRNTRMLAFKATAQLFILGCTWCLGILQVGPAARVMAYLFTIINSLQGVFIFLVYCLLSQQVREQYGKWSKGIRKLKTESEMHTLSSSAKADTSKPSTVN

SEQ ID NO: 5278 - protein, 459 aa, Homo sapiens
MSAGWFRRRFLPGEPLPAPRPPGPHASPVPYRRPRFLRGSSSSPGAADASRRPDSRPVRSPARGRTLPWNAGYAEIINAEKSEFNEDQAACGKLCIRRCEFGAEEEWLTLCPEEFLTGHYWALFDGHGGPAAAILAANTLHSCLRRQLEAVVEGLVATQPPMHLNGRCICPSDPQFVEEKGIRAEDLVIGALESAFQECDEVIGRELEASGQMGGCTALVAVSLQGKLYMANAGDSRAILVRRDEIRPLSFEFTPETERQRIQQLAFVYPELLAGEFTRLEFPRRLKGDDLGQKVLFRDHHMSGWSYKRVEKSDLKYPLIHGQGRQARLLGTLAVSRGLGDHQLRVLDTNIQLKPFLLSVPQVTVLDVDQLELQEDDVVVMATDGLWDVLSNEQVAWLVRSFLPGNQEDPHRFSKLAQMLIHSTQGKEDSLTEEGQVSYDDVSVFVIPLHSQGQESSDH

SEQ ID NO: 5279 - protein, 538 aa, Homo sapiens
MRHVQAEPSPSSEPEAGPSQPPVRQGALQGGLLMGYSPAGGATSPGVYQVSIFSPPAGTSEPHRALKRQAPSTEGPRELKRGPGLGAREGLPPEEPSTVGLLGPEGPGLGLGVASQHFSHRGLCVVEQRSSVTSSWTSGAWSPPCPPSNASCNTLHTRDWASPDPGGQGSLGESPGPAPPGQLHTLDTDLHSLAQIGGKSPVAGVGNGGSLWPRESPGTANGHSPEHTPPGPGPPGPCPTKRRLLPAGEAPDVSSEEEGPAPRRRRGSLGHPTAANSSDAKATPFWSHLLPGPKEPVLDPTDCGPMGRRLKGARRLKLSPLRSLRKGPGLLSPPSASPVPTPAVSRTLLGNFEESLLRGRFAPSGHIEGFTAEIGASGSYCPQHVTLPVTVTFFDVSEQNAPAPFLGIVDLNPLGRKGYSVPKVGTVQVTLFNPNQTVVKMFLVTFDFSDMPAAHMTFLRHRLFLVPVGEEGNANPTHRLLCYLLHLRFRSSRSGRLSLHGDIRLLFSRRSLELDTGLPYELQAVTEAPHNPRYSPLP

SEQ ID NO: 5280 - protein, 612 aa, Homo sapiens
MAAAGRLPSSWALFSPLLAGLALLGVGPVPARALHNVTAELFGAEAWGTLAAFGDLNSDKQTDLFVLRERNDLIVFLADQNAPYFKPKVKVSFKNHSALITSVVPGDYDGDSQMDVLLTYLPKNYAKSELGAVIFWGQNQTLDPNNMTILNRTFQDEPLIMDFNGDLIPDIFGITNESNQPQILLGGNLSWHPALTTTSKMRIPHSHAFIDLTEDFTADLFLTTLNATTSTFQFEIWENLDGNFSVSTILEKPQNMMVVGQSAFADFDGDGHMDHLLPGCEDKNCQKSTIYLVRSGMKQWVPVLQDFSNKGTLWGFVPFVDEQQPTEIPIPITLHIGDYNMDGYPDALVILKNTSGSNQQAFLLENVPCNNASCEEARRMFKVYWELTDLNQIKDAMVATFFDIYEDGILDIVVLSKGYTKNDFAIHTLKNNFEADAYFVKVIVLSGLCSNDCPRKITPFGVNQPGPYIMYTTVDANGYLKNGSAGQLSQSAHLALQLPYNVLGLGRSANFLDHLYVGIPRPSGEKSIRKQEWTAIIPNSQLIVIPYPHNVPRSWSAKLYLTPSNIVLLTAIALIGVCVFILAIIGILHWQEKKADDREKRQEAHRFHFDAM

SEQ ID NO: 5281 - protein, 597 aa, Homo sapiens
MTPIVTVLICLGLSLGPRTRVQTGTIPKPTLWAEPDSVITQGSPVTLSCQGSLEAQEYRLYREKKSASWITRIRPELVKNGQFHIPSITWEHTGRYGCQYYSRARWSELSDPLVLVMTGAYPKPTLSAQPSPVVTSGGRVTLQCESQVAFGGFILCKEGEDEHPQCLNSQPHARGSSRAIFSVGPVSPNRRWSHRCYGYDLNSPYVWSSPSDLLELLVPGVSKKPSLSVQPGPVMAPGESLTLQCVSDVGYDRFVLYKEGERDLRQLPGRQPQAGLSQANFTLGPVSRSYGGQYRCYGAHNLSSECSAPSDPLDILITGQIRGTPFISVQPGPTVASGENVTLLCQSWRQFHTFLLTKAGAADAPLRLRSIHEYPKYQAEFPMSPVTSAHAGTYRCYGSLNSDPYLLSHPSEPLELVVSGPSMGSSPPPTGPISTPGPEDQPLTPTGSDPQSGLGRHLGVVIGILVAVVLLLLLLLLLFLILRHRRQGKHWTSTQRKADFQHPAGAVGPEPTDRGLQWRSSPAADAQEENLYAAVKDTQPEDGVEMDTRAAASEAPQDVTYAQLHSLTLRRKATEPPPSQEREPPAEPSIYATLAIH

SEQ ID NO: 5282 - protein, 941 aa, Homo sapiens
MKGSNRNKDHSAEGEGVGKRPKRKCLQWHPLLAKKLLDFSEEEEEEDEEEDIDKVQLLGADGLEQDVGETEDDESPEQRARRPMNAFLLFCKRHRSLVRQEHPRLDNRGATKILADWWAVLDPKEKQKYTDMAKEYKDAFMKANPGYKWCPTTNKPVKSPTPTVNPRKKLWAFPSDSSRDLPSPKKAKTEEMPQLNFGMADPTQMGGLSMLLLAGEHALGTPEVSSGTCRPDVSESPELRQKSPLFQFAEISSSTSHSDASTKQCQTSALFQFAEISSNTSQLGGAEPVKRCGKSALFQLAEMCLASEGMKMEESKLIKAKESDGGRIKELEKGKEEKEIKMEKTDETRLQKEAEFEKSAKENLRDSKELRNFEALQIDDIMAIKMEDPKEIRKEELEEDHKCSHFPDFSYSASSKIIISDVPSRKDHMCHPHGIMIIEDPAALNKPEKLKKKKKKSKMDRHGNDKSTPKKTCKKRQSSESDIESVIYTIEAVAKGDWGIEKLGDTPRKKVRTSSSGKGSILDAKPPKKKVKSREKKMSKEKSSDTTKESRPPDFISISASKNISGETPEGIKAEPLTPMEDALPPSLSGQAKPEDSDCHRKIETCGSRKSERSCKGALYKTLVSEGMLTSLRANVDRGKRSSGKGNSSDHEGCWNEESWTFSQSGTSGSKKFKKTKPKEDCLLGSAKLDEEFEKKFNSLPQYSPVTFDRKCVPVPRKKKKTGNVSSEPTKTSKGPFQSQKKNLFHKIVSKYKHKKEKPNVPEKGSGDKWSNKQLFLDAIHPTEAIFSEDRNTMEPVHKVKNIPSIFNTPEPTTTQEPLVGSQKRKARKTKITHLVRTADGRVSPAGGTLDDKPKEQLQRSLPKATETDCNDKCSHNTEVGETRSSTPEMPAVSAFFSLAALAEVAAMENVHRGQRSTPLTHDGQPKEMPQAPVLISCADQ

SEQ ID NO: 5283 - protein, 394 aa, Homo sapiens
MSREMQDVDLAEVKPLVEKGETITGLLQEFDVQEQDIETLHGSVHVTLCGTPKGNRPVILTYHDIGMNHKTCYNPLFNYEDMQEITQHFAVCHVDAPGQQDGAASFPAGYMYPSMDQLAEMLPGVLQQFGLKSIIGMGTGAGAYILTRFALNNPEMVEGLVLINVNPCAEGWMDWAASKISGWTQALPDMVVSHLFGKEEMQSNVEVVHTYRQHIVNDMNPGNLHLFINAYNSRRDLEIERPMPGTHTVTLQCPALLVVGDSSPAVDAVVECNSKLDPTKTTLLKMADCGGLPQISQPAKLAEAFKYFVQGMGYMPSASMTRLMRSRTASGSSVTSLDGTRSRSHTSEGTRSRSHTSEGTRSRSHTSEGAHLDITPNSGAAGNSAGPKSMEVSC

SEQ ID NO: 5284 - protein, 192 aa, Homo sapiens
MAAWGRRRLGPGSSGGSARERVSLSATDCYIVHEIYNGENAQDQFEYELEQALEAQYKYIVIEPTRIGDETARWITVGNCLHKTAVLAGTACLFTPLALPLDYSHYISLPAGVLSLACCTLYGISWQFDPCCKYQVEYDAYKLSRLPLHTLTSSTPVVLVRKDDLHRKRLHNTIALAALVYCVKKIYELYAV

SEQ ID NO: 5285 - protein, 255 aa, Homo sapiens
MFHQVRRVMTILFLTMVISYFGCMKAAPMKEANIRGQGGLAYPGVRTHGTLESVNGPKAGSRGLTSLADTFEHVIEELLDEDQKVRPNEENNKDADLYTSRVMLSSQVPLEPPLLFLLEEYKNYLDAANMSMRVRRHSDPARRGELSVCDSISEWVTAADKKTAVDMSGGTVTVLEKVPVSKGQLKQYFYETKCNPMGYTKEGCRGIDKRHWNSQCRTTQSYVRALTMDSKKRIGWRFIRIDTSCVCTLTIKRGR

SEQ ID NO: 5286 - protein, 172 aa, Homo sapiens
MLLLPPRPPHPRSSSPEAMDPPPPKAPPFPKAEGPSSTPSSAAGPRPPRLGRHLLIDANGVPYTYTVQLEEEPRGPPQREAPPGEPGPRKGYSCPECARVFASPLRLQSHRVSHSDLKPFTCGACGKAFKRSSHLSRHRATHRARAGPPHTCPLCPRRFQDAAELAQHVRLH

SEQ ID NO: 5287 - protein, 316 aa, Homo sapiens
MLRRRGSPGMGVHVGAALGALWFCLTGALEVQVPEDPVVALVGTDATLCCSFSPEPGFSLAQLNLIWQLTDTKQLVHSFAEGQDQGSAYANRTALFPDLLAQGNASLRLQRVRVADEGSFTCFVSIRDFGSAAVSLQVAAPYSKPSMTLEPNKDLRPGDTVTITCSSYRGYPEAEVFWQDGQGVPLTGNVTTSQMANEQGLFDVHSVLRVVLGANGTYSCLVRNPVLQQDAHGSVTITGQPMTFPPEALWVTVGLSVCLIALLVALAFVCWRKIKQSCEEENAGAEDQDGEGEGSKTALQPLKHSDSKEDDGQEIA

SEQ ID NO: 5288 - protein, 534 aa, Homo sapiens
MLRRRGSPGMGVHVGAALGALWFCLTGALEVQVPEDPVVALVGTDATLCCSFSPEPGFSLAQLNLIWQLTDTKQLVHSFAEGQDQGSAYANRTALFPDLLAQGNASLRLQRVRVADEGSFTCFVSIRDFGSAAVSLQVAAPYSKPSMTLEPNKDLRPGDTVTITCSSYQGYPEAEVFWQDGQGVPLTGNVTTSQMANEQGLFDVHSILRVVLGANGTYSCLVRNPVLQQDAHSSVTITPQRSPTGAVEVQVPEDPVVALVGTDATLRCSFSPEPGFSLAQLNLIWQLTDTKQLVHSFTEGRDQGSAYANRTALFPDLLAQGNASLRLQRVRVADEGSFTCFVSIRDFGSAAVSLQVAAPYSKPSMTLEPNKDLRPGDTVTITCSSYRGYPEAEVFWQDGQGVPLTGNVTTSQMANEQGLFDVHSVLRVVLGANGTYSCLVRNPVLQQDAHGSVTITGQPMTFPPEALWVTVGLSVCLIALLVALAFVCWRKIKQSCEEENAGAEDQDGEGEGSKTALQPLKHSDSKEDDGQEIA

SEQ ID NO: 5289 - protein, 910 aa, Homo sapiens
MKKMSRNVLLQMEEEEDDDDGDIVLENLGQTIVPDLGSLESQHDFRTPEFEEFNGKPDSLFFNDGQRRIDFVLVYEDESRKETNKKGTNEKQRRKRQAYESNLICHGLQLEATRSVLDDKLVFVKVHAPWEVLCTYAEIMHIKLPLKPNDLKNRSSAFGTLNWFTKVLSVDESIIKPEQEFFTAPFEKNRMNDFYIVDRDAFFNPATRSRIVYFILSRVKYQVINNVSKFGINRLVNSGIYKAAFPLHDCKFRRQSEDPSCPNERYLLYREWAHPRSIYKKQPLDLIRKYYGEKIGIYFAWLGYYTQMLLLAAVVGVACFLYGYLNQDNCTWSKEVCHPDIGGKIIMCPQCDRLCPFWKLNITCESSKKLCIFDSFGTLVFAVFMGVWVTLFLEFWKRRQAELEYEWDTVELQQEEQARPEYEARCTHVVINEITQEEERIPFTAWGKCIRITLCASAVFFWILLIIASVIGIIVYRLSVFIVFSAKLPKNINGTDPIQKYLTPQTATSITASIISFIIIMILNTIYEKVAIMITNFELPRTQTDYENSLTMKMFLFQFVNYYSSCFYIAFFKGKFVGYPGDPVYWLGKYRNEECDPGGCLLELTTQLTIIMGGKAIWNNIQEVLLPWIMNLIGRFHRVSGSEKITPRWEQDYHLQPMGKLGLFYEYLEMIIQFGFVTLFVASFPLAPLLALVNNILEIRVDAWKLTTQFRRLVPEKAQDIGAWQPIMQGIAILAVVTNAMIIAFTSDMIPRLVYYWSFSVPPYGDHTSYTMEGYINNTLSIFKVADFKNKSKGNPYSDLGNHTTCRYRDFRYPPGHPQEYKHNIYYWHVIAAKLAFIIVMEHVIYSVKFFISYAIPDVSKRTKSKIQREKYLTQKLLHENHLKDMTKNMGVIAERMIEAVDNNLRPKSE

SEQ ID NO: 5290 - protein, 323 aa, Homo sapiens
MAAARPEAQSRSSPTPESRSQEPLDLVLVPDDCRPGTPPSDLIEIQVVKVTDTTLVPEPPEPGSFHCALCPAAFRLVSELLFHEHGHLAGAEGGGQGGDPSRCHVCGHSCPGPASLRAHYSLHTGERPYRCALCPRAFKALAPLLRHQHRHGVEPGTSRRPPDTAAVAEQRPGVAPERAEVVMAAAAAGAAVGKPFACRFCAKPFRRSSDMRDHERVHTGERPYHCGICGKGFTQSSVLSGHARIHTGERPFRCTLCDRTFNNSSNFRKHQRTHFHGPGPGLGDSGGQLGSSAAEGSGSGCGVGDPAEEGRGETAKVKVEADQ

SEQ ID NO: 5291 - protein, 319 aa, Homo sapiens
MAPQRRAATKAPEGNGAAERRNRSSTKKDRAPREVQRLWQRPWLRTAGLGAGFVLTALLLWSSLGADDGVAEVLARRGEVVAGRFIEVPCSEDYDSHRRFEGCTPRKCGRGVTDVVITREEAERIRSVAEKGLSLGGSDGGASILDLHSGALSVGKHFVNLYRYFGDKIQNIFSEEDFRLYREVRQKVQLTIAEAFGISASSLHLTKPTFFSRINSTEARTAHDEYWHAHVDKVTYGSFDYTSLLYLSNYLEDFGGGRFMFMEEGANKTVEPRAGRVSFFTSGSENLHRVEKVHWGTRYAITIAFSCNPDHGIEDPAFP

SEQ ID NO: 5292 - protein, 601 aa, Homo sapiens
MDWGTELWDQFEVLERHTQWGLDLLDRYVKFVKERTEVEQAYAKQLRSLVKKYLPKRPAKDDPESKFSQQQSFVQILQEVNDFAGQRELVAENLSVRVCLELTKYSQEMKQERKMHFQEGRRAQQQLENGFKQLENSKRKFERDCREAEKAAQTAERLDQDINATKADVEKAKQQAHLRSHMAEESKNEYAAQLQRFNRDQAHFYFSQMPQIFDKLQDMDERRATRLGAGYGLLSEAELEVVPIIAKCLEGMKVAANAVDPKNDSHVLIELHKSGFARPGDVEFEDFSQPMNRAPSDSSLGTPSDGRPELRGPGRSRTKRWPFGKKNKPRPPPLSPLGGPVPSALPNGPPSPRSGRDPLAILSEISKSVKPRLASFRSLRGSRGTVVTEDFSHLPPEQQRKRLQQQLEERSRELQKEVDQREALKKMKDVYEKTPQMGDPASLEPQIAETLSNIERLKLEVQKYEAWLAEAESRVLSNRGDSLSRHARPPDPPASAPPDSSSNSASQDTKESSEEPPSEESQDTPIYTEFDEDFEEEPTSPIGHCVAIYHFEGSSEGTISMAEGEDLSLMEEDKGDGWTRVRRKEGGEGYVPTSYLRVTLN

SEQ ID NO: 5293 - protein, 636 aa, Homo sapiens
MEKAVNDGSHSEELFCHLKTISEKEDLPRCTSESHLSCLKQDILNEKTELEATLKEAELVTHSVELLLPLFKDTIEKINFENANLSALNLKISEQKEILIKELDTFKSVKLALEHLLRKRDYKQTGDNLSSMLLENLTDNESENTNLKKKVFEKEAHIQELSCLFQSEKANTLKANRFSQSVKVVHERLQIQIHKREAENDKLKEYVKSLETKIAKWNLQSRMNKNEAIVMKEASRQKTVALKKASKVYKQRLDHFTGAIEKLTSQIRDQEAKLSETISASNAWKSHYEKIVIEKTELEVQIETMKKQIINLLEDLKKMEDHGKNSCEEILRKVHSIEYENETLNLENTKLKLRFPCRITESKNMNILIVLDMLCYISSEKTTLAALKDEVVSVENELSELQEVEKKQKTLIEMYKTQVQKLQEAAEIVKSRCENLLHKNNQITKTKNKNVEKMRGQMESHLKELERVCDSLTAAERRLHECQESLQCCKGKCADQEHTIRELQGQVDGNHNLLTKLSLEEENCLIQLKCENLQQKLEQMDAENKELEKKLANQEECLKHSNLKFKEKSAEYTALARQLEAALEEGRQKVAEEIEKMSSRESALQIKILDLETELRKKNEEQNQLVCKMNSDPETP

SEQ ID NO: 5294 - protein, 420 aa, Homo sapiens
MRWRTILLQYCFLLITCLLTALEAVPIDIDKTKVQNIHPVESAKIEPPDTGLYYDEYLKQVIDVLETDKHFREKLQKADIEEIKSGRLSKELDLVSHHVRTKLDELKRQEVGRLRMLIKAKLDSLQDIGMDHQALLKQFDHLNHLNPDKFESTDLDMLIKAATSDLEHYDKTRHEEFKKYEMMKEHERREYLKTLNEEKRKEEESKFEEMKKKHENHPKVNHPGSKDQLKEVWEETDGLDPNDFDPKTFFKLHDVNSDGFLDEQELEALFTKELEKVYDPKNEEDDMVEMEEERLRMREHVMNEVDTNKDRLVTLEEFLKATEKKEFLEPDSWETLDQQQFFTEEELKEYENIIALQENELKKKADELQKQKEELQRQHDQLEAQKLEYHQVIQQMEQKKLQQGIPPSGPAGELKFEPRV

SEQ ID NO: 5295 - protein, 531 aa, Homo sapiens
MSKPHSEAGTAFIQTQQLHAAMADTFLEHMCRLDIDSPPITARNTGIICTIGPASRSVETLKEMIKSGMNVARLNFSHGTHEYHAETIKNVRTATESFASDPILYRPVAVALDTKGPEIRTGLIKGSGTAEVELKKGATLKITLDNAYMEKCDENILWLDYKNICKVVEVGSKIYVDDGLISLQVKQKGADFLVTEVENGGSLGSKKGVNLPGAAVDLPAVSEKDIQDLKFGVEQDVDMVFASFIRKASDVHEVRKVLGEKGKNIKIISKIENHEGVRRFDEILEASDGIMVARGDLGIEIPAEKVFLAQKMMIGRCNRAGKPVICATQMLESMIKKPRPTRAEGSDVANAVLDGADCIMLSGETAKGDYPLEAVRMQHLIAREAEAAMFHRKLFEELVRASSHSTDLMEAMAMGSVEASYKCLAAALIVLTESGRSAHQVARYRPRAPIIAVTRNPQTARQAHLYRGIFPVLCKDPVQEAWAEDVDLRVNFAMNVGKARGFFKKGDVVIVLTGWRPGSGFTNTMRVVPVP

SEQ ID NO: 5296 - protein, 486 aa, Homo sapiens
MWKSVVGHDVSVSVETQGDDWDTDPDFVNDISEKEQRWGAKTIEGSGRTEHINIHQLRNKVSEEHDVLRKKEMESGPKASHGYGGRFGVERDRMDKSAVGHEYVAEVEKHSSQTDAAKGFGGKYGVERDRADKSAVGFDYKGEVEKHTSQKDYSRGFGGRYGVEKDKWDKAALGYDYKGETEKHESQRDYAKGFGGQYGIQKDRVDKSAVGFNEMEAPTTAYKKTTPIEAASSGTRGLKAKFESMAEEKRKREEEEKAQQVARRQQERKAVTKRSPEAPQPVIAMEEPAVPAPLPKKISSEAWPPVGTPPSSESEPVRTSREHPVPLLPIRQTLPEDNEEPPALPPRTLEGLQVEEEPVYEAEPEPEPEPEPEPENDYEDVEEMDRHEQEDEPEGDYEEVLEPEDSSFSSALAGSSGCPAGAGAGAVALGISAVAVYDYQGEGSDELSFDPDDVITDIEMVDEGWWRGRCHGHFGLFPANYVKLLE

SEQ ID NO: 5297 - protein, 190 aa, Homo sapiens
MAGSRLETVGSIFSRTRDLVRAGVLKEKPLWFDVYDAFPPLREPVFQRPRVRYGKAKAPIQDIWYHEDRIRAKFYSVYGSGQRAFDLFNPNFKSTCQRFVEKYTELQKLGETDEEKLFVETGKALLAEGVILRRVGEARTQHGGSHVSRKSEHLSVRPQTALEENETQKEVPQDQHLEAPADQSKGLLPP

SEQ ID NO: 5298 - protein, 562 aa, Homo sapiens
MDPQPPPPAQGSPPHRGRGRGRGRGRGRGRGRGRGGAGAPRAPLPCPTCGRLFRFPYYLSRHRLSHSGLRPHACPLCPKAFRRPAHLSRHLRGHGPQPPLRCAACPRTFPEPAQLRRHLAQEHAGGEVELAIERVAKETAEPSWGPQDEGSEPPTTAAAGATEEEAVAAWPETWPAGEPSTLAAPTSAAEPRESESEEAEAGAAELRAELALAAGRQEEKQVLLQADWTLLCLRCREAFATKGELKAHPCLRPEGEQEGEGGPPPRPKRHQCSICLKAFARPWSLSRHRLVHSTDRPFVCPDCGLAFRLASYLRQHRRVHGPLSLLAPLPAAGKKDDKASGARNSAKGPEGGEGAECGGASEGGEGQNGGDAAPARPPAGEPRFWCPECGKGFRRRAHLRQHGVTHSGARPFQCVRCQREFKRLADLARHAQVHAGGPAPHPCPRCPRRFSRAYSLLRHQRCHRAELERAAALQALQAQAPTSPPPPPPPLKAEQEEEGLPLPLANIKEEPPSPGTPPQSPPAPPVFLSASCFDSQDHSAFEMEEEEVDSKAHLRGLGGLAS

SEQ ID NO: 5299 - protein, 803 aa, Homo sapiens
MESGPRAELGAGAPPAVVARTPPEPRPSPEGDPSPPPPPMSALVPDTPPDTPPAMKNATSSKQLPLEPESPSGQVGPRPAPPQEESPSSEAKSRGPTPPAMGPRDARPPRRSSQPSPTAVPASDSPPTKQEVKKAGERHKLAKERREERAKYLAAKKAVWLEKEEKAKALREKQLQERRRRLEEQRLKAEQRRAALEERQRQKLEKNKERYEAAIQRSVKKTWAEIRQQRWSWAGALHHSSPGHKTNRSLQLSAWESSIVDRLMTPTLSFLARSRSAVTLPRNGRDQGRGCDPGRGPTWGRAGASLARGPQPDRTHPSAAVPVCPRSASASPLTPCSVTRSVHRCAPAGERGERRKPNAGGSPAPVRRRPEASPVQKKEKKDKERENEKEKSALARERSLKKRQSLPASPRARLSASTASELSPKSKARPSSPSTSWHRPASPCPSPGPGHTLPPKPPSPRGTTASPKGRVRRKEEAKESPSAAGPEDKSQSKRRASNEKESAAPASPAPSPAPSPTPAPPQKEQPPAETPTDAAVLTSPPAPAPPVTPSKPMAGTTDREEATRLLAEKRRQAREQREREEQERRLQAERDKRMREEQLAREAEARAEREAEARRREEQEAREKAQAEQEEQERLQKQKEEAEARSREEAERQRLEREKHFQQQEQERQERRKRLEEIMKRTRKSEVSETKKQDSKEANANGSSPEPVKAVEARSPGLQKEAVQKEEPIPQEPQWSLPSKELPASLVNGLQPLPAHQENGFSTNGPSGDKSLSRTPETLLPFAEAEAFLKKAVVQSPQVTEVL

SEQ ID NO: 5300 - protein, 559 aa, Homo sapiens
MAGPTEAETGLAEPRALCAQRGHRTYARRWVFLLAISLLNCSNATLWLSFAPVADVIAEDLVLSMEQINWLSLVYLVVSTPFGVAAIWILDSVGLRAATILGAWLNFAGSVLRMVPCMVVGTQNPFAFLMGGQSLCALAQSLVIFSPAKLAALWFPEHQRATANMLATMSNPLGVLVANVLSPVLVKKGEDIPLMLGVYTIPAGVVCLLSTICLWESVPPTPPSAGAASSTSEKFLDGLKLLMWNKAYVILAVCLGGMIGISASFSALLEQILCASGHSSGFSGLCGALFITFGILGALALGPYVDRTKHFTEATKIGLCLFSLACVPFALVSQLQGQTLALAATCSLLGLFGFSVGPVAMELAVECSFPVGEGAATGMIFVLGQAEGILIMLAMTALTVRRSEPSLSTCQQGEDPLDWTVSLLLMAGLCTFFSCILAVFFHTPYRRLQAESGEPPSTRNAVGGADSGPGVDRGGAGRAGVLGPSTATPECTARGASLEDPRGPGSPHPACHRATPRAQGPAATDAPSRPGRLAGRVQASRFIDPAGSHSSFSSPWVIT

SEQ ID NO: 5301 - protein, 194 aa, Homo sapiens
MAAAAPNAGGSAPETAGSAEAPLQYSLLLQYLVGDKRQPRLLEPGSLGGIPSPAKSEEQKMIEKAMESCAFKAALACVGGFVLGGAFGVFTAGIDTNVGFDPKDPYRTPTAKEVLKDMGQRGMSYAKNFAIVGAMFSCTECLIESYRGTSDWKNSVISGCITGGAIGFRAGLKAGAIGCGGFAAFSAAIDYYLR

SEQ ID NO: 5302 - protein, 645 aa, Homo sapiens
MERQSRVMSEKDEYQFQHQGAVELLVFNFLLILTILTIWLFKNHRFRFLHETGGAMVYGLIMGLILRYATAPTDIESGTVYDCVKLTFSPSTLLVNITDQVYEYKYKREISQHNINPHQGNAILEKMTFDPEIFFNVLLPPIIFHAGYSLKKRHFFQNLGSILTYAFLGTAISCIVIGLIMYGFVKAMIHAGQLKNGDFHFTDCLFFGSLMSATDPVTVLAIFHELHVDPDLYTLLFGESVLNDAVAIVLTYSISIYSPKENPNAFDAAAFFQSVGNFLGIFAGSFAMGSAYAIITALLTKFTKLCEFPMLETGLFFLLSWSAFLSAEAAGLTGIVAVLFCGVTQAHYTYNNLSSDSKIRTKQLFEFMNFLAENVIFCYMGLALFTFQNHIFNALFILGAFLAIFVARACNIYPLSFLLNLGRKQKIPWNFQHMMMFSGLRGAIAFALAIRNTESQPKQMMFTTTLLLVFFTVWVFGGGTTPMLTWLQIRVGVDLDENLKEDPSSQHQEANNLDKNMTKAESARLFRMWYSFDHKYLKPILTHSGPPLTTTLPEWCGPISRLLTSPQAYGEQLKEDDVECIVNQDELAINYQEQASSPCSPPARLGLDQKASPQTPGKENIYEGDLGLGGYELKLEQTLGQSQLN

SEQ ID NO: 5303 - protein, 450 aa, Homo sapiens
MREIVHIQAGQCGNQIGAKFWEVISDEHGIDPSGNYVGDSDLQLERISVYYNEASSHKYVPRAILVDLEPGTMDSVRSGAFGHLFRPDNFIFGQSGAGNNWAKGHYTEGAELVDSVLDVVRKECENCDCLQGFQLTHSLGGGTGSGMGTLLISKVREEYPDRIMNTFSVVPSPKVSDTVVEPYNATLSIHQLVENTDETYCIDNEALYDICFRTLKLATPTYGDLNHLVSATMSGVTTSLRFPGQLNADLRKLAVNMVPFPRLHFFMPGFAPLTARGSQQYRALTVPELTQQMFDAKNMMAACDPRHGRYLTVATVFRGRMSMKEVDEQMLAIQSKNSSYFVEWIPNNVKVAVCDIPPRGLKMSSTFIGNSTAIQELFKRISEQFTAMFRRKAFLHWYTGEGMDEMEFTEAESNMNDLVSEYQQYQDATAEEEGEMYEDDEEESEAQGPK

SEQ ID NO: 5304 - protein, 508 aa, Homo sapiens
MADGQVAELLLRRLEASDGGLDSAELAAELGMEHQAVVGAVKSLQALGEVIEAELRSTKHWELTAEGEEIAREGSHEARVFRSIPPEGLAQSELMRLPSGKVGFSKAMSNKWIRVDKSAADGPRVFRVVDSMEDEVQRRLQLVRGGQAEKLGEKERSELRKRKLLAEVTLKTYWVSKGSAFSTSISKQETELSPEMISSGSWRDRPFKPYNFLAHGVLPDSGHLHPLLKVRSQFRQIFLEMGFTEMPTDNFIESSFWNFDALFQPQQHPARDQHDTFFLRDPAEALQLPMDYVQRVKRTHSQGGYGSQGYKYNWKLDEARKNLLRTHTTSASARALYRLAQKKPFTPVKYFSIDRVFRNETLDATHLAEFHQIEGVVADHGLTLGHLMGVLREFFTKLGITQLRFKPAYNPYTEPSMEVFSYHQGLKKWVEVGNSGVFRPEMLLPMGLPENVSVIAWGLSLERPTMIKYGINNIRELVGHKVNLQMVYDSPLCRLDAEPRPPPTQEAA

SEQ ID NO: 5305 - protein, 919 aa, Homo sapiens
MWLAAAAPSLARRLLFLGPPPPPLLLLVFSRSSRRRLHSLGLAAMPEKRPFERLPADVSPINYSLCLKPDLLDFTFEGKLEAAAQVRQATNQIVMNCADIDIITASYAPEGDEEIHATGFNYQNEDEKVTLSFPSTLQTGTGTLKIDFVGELNDKMKGFYRSKYTTPSGEVRYAAVTQFEATDARRAFPCWDEPAIKATFDISLVVPKDRVALSNMNVIDRKPYPDDENLVEVKFARTPVMSTYLVAFVVGEYDFVETRSKDGVCVRVYTPVGKAEQGKFALEVAAKTLPFYKDYFNVPYPLPKIDLIAIADFAAGAMENWGLVTYRETALLIDPKNSCSSSRQWVALVVGHELAHQWFGNLVTMEWWTHLWLNEGFASWIEYLCVDHCFPEYDIWTQFVSADYTRAQELDALDNSHPIEVSVGHPSEVDEIFDAISYSKGASVIRMLHDYIGDKDFKKGMNMYLTKFQQKNAATEDLWESLENASGKPIAAVMNTWTKQMGFPLIYVEAEQVEDDRLLRLSQKKFCAGGSYVGEDCPQWMVPITISTSEDPNQAKLKILMDKPEMNVVLKNVKPDQWVKLNLGTVGFYRTQYSSAMLESLLPGIRDLSLPPVDRLGLQNDLFSLARAGIISTVEVLKVMEAFVNEPNYTVWSDLSCNLGILSTLLSHTDFYEEIQEFVKDVFSPIGERLGWDPKPGEGHLDALLRGLVLGKLGKAGHKATLEEARRRFKDHVEGKQILSADLRSPVYLTVLKHGDGTTLDIMLKLHKQADMQEEKNRIERVLGATLLPDLIQKVLTFALSEEVRPQDTVSVIGGVAGGSKHGRKAAWKFIKDNWEELYNRYQGGFLISRLIKLSVEGFAVDKMAGEVKAFFESHPAPSAERTIQQCCENILLNAAWLKRDAESIHQYLLQRKASPPTV

SEQ ID NO: 5306 - protein, 162 aa, Homo sapiens
MRAPIPEPKPGDLIEIFRPFYRHWAIYVGDGYVVHLAPPSEVAGAGAASVMSALTDKAIVKKELLYDVAGSDKYQVNNKHDDKYSPLPCSKIIQRAEELVGQEVLYKLTSENCEHFVNELRYGVARSDQVRDVIIAASVAGMGLAAMSLIGVMFSRNKRQKQ

SEQ ID NO: 5307 - protein, 502 aa, Homo sapiens
MGTENKEVIPKEEISEESEPHGSLLEKFPKVVYQGHEFGAGCEEDMLEGHSRESMEEVIEQMSPQERDFPSGLMIFKKSPSSEKDRENNESERGCSPSPNLVTHQGDTTEGVSAFATSGQNFLEILESNKTQRSSVGEKPHTCKECGKAFNQNSHLIQHMRVHSGEKPFECKECGKTFGTNSSLRRHLRIHAGEKPFACNECGKAFIQSSHLIHHHRIHTGERPYKCEECGKAFSQNSALILHQRIHTGEKPYECNECGKTFRVSSQLIQHQRIHTEERYHECNECGKAFKHSSGLIRHQKIHTGEKPYLCNECGKGFGQSSELIRHQRIHTGDKPYECNECGKTFGQNSEIIRHIRIHTGEKPYVCKECGKAFRGNSELLRHERIHTGEKPYECFECGKAFRRTSHLIVHQRIHTGEKPHQCNECARTFWDNSELLLHQKIHIGEKPYECSECEKTFSQHSQLIIHQRIHTGEKPYECQECQKTFSRSSHLLRHQSVHCME

SEQ ID NO: 5308 - protein, 185 aa, Homo sapiens
MLKAKILFVGPCESGKTVLANFLTESSDITEYSPTQGVRILEFENPHVTSNNKGTGCEFELWDCGGDAKFESCWPALMKDAHGVVIVFNADIPSHRKEMEMWYSCFVQQPSLQDTQCMLIAHHKPGSGDDKGSLSLSPPLNKLKLVHSNLEDDPEEIRMEFIKYLKSIINSMSESRDREEMSIMT

SEQ ID NO: 5309 - protein, 590 aa, Homo sapiens
MTLTLSVLICLGLSVGPRTCVQAGTLPKPTLWAEPASVIARGKPVTLWCQGPLETEEYRLDKEGLPWARKRQNPLEPGAKAKFHIPSTVYDSAGRYRCYYETPAGWSEPSDPLELVATGFYAEPTLLALPSPVVASGGNVTLQCDTLDGLLTFVLVEEEQKLPRTLYSQKLPKGPSQALFPVGPVTPSCRWRFRCYYYYRKNPQVWSNPSDLLEILVPGVSRKPSLLIPQGSVVARGGSLTLQCRSDVGYDIFVLYKEGEHDLVQGSGQQPQAGLSQANFTLGPVSRSHGGQYRCYGAHNLSPRWSAPSDPLDILIAGLIPDIPALSVQPGPKVASGENVTLLCQSWHQIDTFFLTKEGAAHPPLCLKSKYQSYRHQAEFSMSPVTSAQGGTYRCYSAIRSYPYLLSSPSYPQELVVSGPSGDPSLSPTGSTPTPGPEDQPLTPTGLDPQSGLGRHLGVVTGVSVAFVLLLFLLLFLLLRHRHQSKHRTSAHFYRPAGAAGPEPKDQGLQKRASPVADIQEEILNAAVKDTQPKDGVEMDAPAAASEAPQDVTYAQLHSLTLRREATEPPPSQEREPPAEPSIYAPLAIH

SEQ ID NO: 5310 - protein, 530 aa, Homo sapiens
MSLKWMSVFLLMQLSCYFSSGSCGKVLVWPTEYSHWINMKTILEELVQRGHEVIVLTSSASILVNASKSSAIKLEVYPTSLTKNDLEDFFMKMFDRWTYSISKNTFWSYFSQLQELCWEYSDYNIKLCEDAVLNKKLMRKLQESKFDVLLADAVNPCGELLAELLNIPFLYSLRFSVGYTVEKNGGGFLFPPSYVPVVMSELSDQMIFMERIKNMIYMLYFDFWFQAYDLKKWDQFYSEVLGRPTTLFETMGKAEMWLIRTYWDFEFPRPFLPNVDFVGGLHCKPAKPLPKEMEEFVQSSGENGIVVFSLGSMISNMSEESANMIASALAQIPQKVLWRFDGKKPNTLGSNTRLYKWLPQNDLLGHPKTKAFITHGGTNGIYEAIYHGIPMVGIPLFADQHDNIAHMKAKGAALSVDIRTMSSRDLLNALKSVINDPIYKENIMKLSRIHHDQPVKPLDRAVFWIEFVMRHKGAKHLRVAAHNLTWIQYHSLDVIAFLLACVATMIFMITKCCLFCFRKLAKTGKKKKRD

SEQ ID NO: 5311 - protein, 237 aa, Homo sapiens
MLEEDMEVAIKMVVVGNGAVGKSSMIQRYCKGIFTKDYKKTIGVDFLERQIQVNDEDVRLMLWDTAGQEEFDAITKAYYRGAQACVLVFSTTDRESFEAVSSWREKVVAEVGDIPTVLVQNKIDLLDDSCIKNEEAEALAKRLKLRFYRTSVKEDLNVNEVFKYLAEKYLQKLKQQIAEDPELTHSSSNKIGVFNTSGGSHSGQNSGTLNGGDVINLRPNKQRTKKNRNPFSSCSIP

SEQ ID NO: 5312 - protein, 734 aa, Homo sapiens
MAASPGPAGVGGAGAVYGSGSSGFALDSGLEIKTRSVEQTLLPLVSQITTLINHKDNTKKSDKTLQAIQRVGQAVNLAVGRFVKVGEAIANENWDLKEEINIACIEAKQAGETIAALTDITNLNHLESDGQITIFTDKTGVIKAARLLLSSVTKVLLLADRVVIKQIITSRNKVLATMERLEKVNSFQEFVQIFSQFGNEMVEFAHLSGDRQNDLKDEKKKAKMAAARAVLEKCTMMLLTASKTCLRHPNCESAHKNKEGVFDRMKVALDKVIEIVTDCKPNGETDISSISIFTGIKEFKMNIEALRENLYFQSKENLSVTLEVILERMEDFTDSAYTSHEHRERILELSTQARMELQQLISVWIQAQSKKTKSIAEELELSILKISHSLNELKKELHSTATQLAADLLKYHADHVVLKALKLTGVEGNLEALAEYACKLSEQKEQLVETCRLLRHISGTEPLEITCIHAEETFQVTGQQIISAAETLTLHPSSKIAKENLDVFCEAWESQISDMSTLLREINDVFEGRRGEKYGYLSLPKPMKNNANLKSLKPDKPDSEEQAKIAKLGLKLGLLTSDADCEIEKWEDQENEIVQYGRNMSSMAYSLYLFTRGEGPLKTSQDLIHQLEVFAAEGLKLTSSVQAFSKQLKDDDKLMLLLEINKLIPLCHQLQTVTKTSLQNKVFLKVDKCITKTRSMMALLVQLLSLCYKLLKKLQMENNGWVSVTNKDTMDSKT

SEQ ID NO: 5313 - protein, 357 aa, Homo sapiens
MEVLRPQLIRIDGRNYRKNPVQEQTYQHEEDEEDFYQGSMECADEPCDAYEVEQTPQGFRSTLRAPSLLYKHIVGKRGDTRKKIEMETKTSISIPKPGQDGEIVITGQHRNGVISARTRIDVLLDTFRRKQPFTHFLAFFLNEVEVQEGFLRFQEEVLAKCSMDHGVDSSIFQNPKKLHLTIGMLVLLSEEEIQQTCEMLQQCKEEFINDISGGKPLEVEMAGIEYMNDDPGMVDVLYAKVHMKDGSNRLQELVDRVLERFQASGLIVKEWNSVKLHATVMNTLFRKDPNAEGRYNLYTAEGKYIFKERESFDGRNILKLFENFYFGSLKLNSIHISQRFTVDSFGNYASCGQIDFS

SEQ ID NO: 5314 - protein, 2285 aa, Homo sapiens
MAAQVAPAAASSLGNPPPPPPSELKKAEQQQREEAGGEAAAAAAAERGEMKAAAGQESEGPAVGPPQPLGKELQDGAESNGGGGGGGAGSGGGPGAEPDLKNSNGNAGPRPALNNNLTEPPGGGGGGSSDGVGAPPHSAAAALPPPAYGFGQPYGRSPSAVAAAAAAVFHQQHGGQQSPGLAALQSGGGGGLEPYAGPQQNSHDHGFPNHQYNSYYPNRSAYPPPAPAYALSSPRGGTPGSGAAAAAGSKPPPSSSASASSSSSSFAQQRFGAMGGGGPSAAGGGTPQPTATPTLNQLLTSPSSARGYQGYPGGDYSGGPQDGGAGKGPADMASQCWGAAAAAAAAAAASGGAQQRSHHAPMSPGSSGGGGQPLARTPQPSSPMDQMGKMRPQPYGGTNPYSQQQGPPSGPQQGHGYPGQPYGSQTPQRYPMTMQGRAQSAMGGLSYTQQIPPYGQQGPSGYGQQGQTPYYNQQSPHPQQQQPPYSQQPPSQTPHAQPSYQQQPQSQPPQLQSSQPPYSQQPSQPPHQQSPAPYPSQQSTTQQHPQSQPPYSQPQAQSPYQQQQPQQPAPSTLSQQAAYPQPQSQQSQQTAYSQQRFPPPQELSQDSFGSQASSAPSMTSSKGGQEDMNLSLQSRPSSLPDLSGSIDDLPMGTEGALSPGVSTSGISSSQGEQSNPAQSPFSPHTSPHLPGIRGPSPSPVGSPASVAQSRSGPLSPAAVPGNQMPPRPPSGQSDSIMHPSMNQSSIAQDRGYMQRNPQMPQYSSPQPGSALSPRQPSGGQIHTGMGSYQQNSMGSYGPQGGQYGPQGGYPRQPNYNALPNANYPSAGMAGGINPMGAGGQMHGQPGIPPYGTLPPGRMSHASMGNRPYGPNMANMPPQVGSGMCPPPGGMNRKTQETAVAMHVAANSIQNRPPGYPNMNQGGMMGTGPPYGQGINSMAGMINPQGPPYSMGGTMANNSAGMAASPEMMGLGDVKLTPATKMNNKADGTPKTESKSKKSSSSTTTNEKITKLYELGGEPERKMWVDRYLAFTEEKAMGMTNLPAVGRKPLDLYRLYVSVKEIGGLTQVNKNKKWRELATNLNVGTSSSAASSLKKQYIQCLYAFECKIERGEDPPPDIFAAADSKKSQPKIQPPSPAGSGSMQGPQTPQSTSSSMAEGGDLKPPTPASTPHSQIPPLPGMSRSNSVGIQDAFNDGSDSTFQKRNSMTPNPGYQPSMNTSDMMGRMSYEPNKDPYGSMRKAPGSDPFMSSGQGPNGGMGDPYSRAAGPGLGNVAMGPRQHYPYGGPYDRVRTEPGIGPEGNMSTGAPQPNLMPSNPDSGMYSPSRYPPQQQQQQQQRHDSYGNQFSTQGTPSGSPFPSQQTTMYQQQQQNYKRPMDGTYGPPAKRHEGEMYSVPYSTGQGQPQQQQLPPAQPQPASQQQAAQPSPQQDVYNQYGNAYPATATAATERRPAGGPQNQFPFQFGRDRVSAPPGTNAQQNMPPQMMGGPIQASAEVAQQGTMWQGRNDMTYNYANRQSTGSAPQGPAYHGVNRTDEMLHTDQRANHEGSWPSHGTRQPPYGPSAPVPPMTRPPPSNYQPPPSMQNHIPQVSSPAPLPRPMENRTSPSKSPFLHSGMKMQKAGPPVPASHIAPAPVQPPMIRRDITFPPGSVEATQPVLKQRRRLTMKDIGTPEAWRVMMSLKSGLLAESTWALDTINILLYDDNSIMTFNLSQLPGLLELLVEYFRRCLIEIFGILKEYEVGDPGQRTLLDPGRFSKVSSPAPMEGGEEEEELLGPKLEEEEEEEVVENDEEIAFSGKDKPASENSEEKLISKFDKLPVKIVQKNDPFVVDCSDKLGRVQEFDSGLLHWRIGGGDTTEHIQTHFESKTELLPSRPHAPCPPAPRKHVTTAEGTPGTTDQEGPPPDGPPEKRITATMDDMLSTRSSTLTEDGAKSSEAIKESSKFPFGISPAQSHRNIKILEDEPHSKDETPLCTLLDWQDSLAKRCVCVSNTIRSLSFVPGNDFEMSKHPGLLLILGKLILLHHKHPERKQAPLTYEKEEEQDQGVSCNKVEWWWDCLEMLRENTLVTLANISGQLDLSPYPESICLPVLDGLLHWAVCPSAEAQDPFSTLGPNAVLSPQRLVLETLSKLSIQDNNVDLILATPPFSRLEKLYSTMVRFLSDRKNPVCREMAVVLLANLAQGDSLAARAIAVQKGSIGNLLGFLEDSLAATQFQQSQASLLHMQNPPFEPTSVDMMRRAARALLALAKVDENHSEFTLYESRLLDISVSPLMNSLVSQVICDVLFLIGQS

SEQ ID NO: 5315 - protein, 545 aa, Homo sapiens
MDWGTELWDQFEVLERHTQWGLDLLDRYVKFVKERTEVEQAYAKQLRSLVKKYLPKRPAKDDPESKFSQQQSFVQILQEVNDFAGQRELVAENLSVRVCLELTKYSQEMKQERKMHFQEGRRAQQQLENGFKQLENSKRKFERDCREAEKAAQTAERLDQDINATKADVEKAKQQAHLRSHMAEESKNEYAAQLQRFNRDQAHFYFSQMPQIFDKLQDMDERRATRLGAGYGLLSEAELEVVPIIAKCLEGMKVAANAVDPKNDSHVLIELHKSGFARPGDVEFEDFSQPMNRAPSDSSLGTPSDGRPELRGPGRSRTKRWPFGKKNKTVVTEDFSHLPPEQQRKRLQQQLEERSRELQKEVDQREALKKMKDVYEKTPQMGDPASLEPQIAETLSNIERLKLEVQKYEAWLAEAESRVLSNRGDSLSRHARPPDPPASAPPDSSSNSASQDTKESSEEPPSEESQDTPIYTEFDEDFEEEPTSPIGHCVAIYHFEGSSEGTISMAEGEDLSLMEEDKGDGWTRVRRKEGGEGYVPTSYLRVTLN

SEQ ID NO: 5316 - protein, 508 aa, Homo sapiens
MATDWLGSIVSINCGDSLGVYQGRVSAVDQVSQTISLTRPFHNGVKCLVPEVTFRAGDITELKILEIPGPGDNQHFGDLHQTELGPSGAGCQVGINQNGTGKFVKKPASSSSAPQNIPKRTDVKSQDVAVSPQQQQCSKSYVDRHMESLSQSKSFRRRHNSWSSSSRHPNQATPKKSGLKNGQMKNKDDECFGDDIEEIPDTDFDFEGNLALFDKAAVFEEIDTYERRSGTRSRGIPNERPTRYRHDENILESEPIVYRRIIVPHNVSKEFCTDSGLVVPSISYELHKKLLSVAEKHGLTLERRLEMTGVCASQMALTLLGGPNRLNPKNVHQRPTVALLCGPHVKGAQGISCGRHLANHDVQVILFLPNFVKMLESITNELSLFSKTQGQQVSSLKDLPTSPVDLVINCLDCPENVFLRDQPWYKAAVAWANQNRAPVLSIDPPVHEVEQGIDAKWSLALGLPLPLGEHAGRIYLCDIGIPQQVFQEVGINYHSPFGCKFVIPLHSA

SEQ ID NO: 5317 - protein, 534 aa, Homo sapiens
MFSWVSKDARRKKEPELFQTVAEGLRQLYAQKLLPLEEHYRFHEFHSPALEDADFDNKPMVLLVGQYSTGKTTFIRHLIEQDFPGMRIGPEPTTDSFIAVMHGPTEGVVPGNALVVDPRRPFRKLNAFGNAFLNRFMCAQLPNPVLDSISIIDTPGILSGEKQRISRGYDFAAVLEWFAERVDRIILLFDAHKLDISDEFSEVIKALKNHEDKIRVVLNKADQIETQQLMRVYGALMWSLGKIINTPEVVRVYIGSFWSHPLLIPDNRKLFEAEEQDLFKDIQSLPRNAALRKLNDLIKRARLAKVHAYIISSLKKEMPNVFGKESKKKELVNNLGEIYQKIEREHQISPGDFPSLRKMQELLQTQDFSKFQALKPKLLDTVDDMLANDIARLMVMVRQEESLMPSQVVKGGAFDGTMNGPFGHGYGEGAGEGIDDVEWVVGKDKPTYDEIFYTLSPVNGKITGANAKKEMVKSKLPNTVLGKIWKLADVDKDGLLDDEEFALANHLIKVKLEGHELPADLPPHLVPPSKRRHE

SEQ ID NO: 5318 - protein, 244 aa, Homo sapiens
MDRGQHPPGWAWQWLSSHPATLHQLECSGAISVHCNLYLLGSSDSSAPASRVAETTGPESSVTAAPRARKYKCGLPQPCPEEHLAFRVVSGAANVIGPKICLEDKMLMSSVKDNVGRGLNIALVNGVSGELIEARAFDMWAGDVNDLLKFIRPLHEGTLVFVASYDDPATKMNEETRKLFSELGSRNAKELAFRDSWVFVGAKGVQNKSPFEQHVKNSKHSNKYEGWPEALEMEGCIPRRSTAS

SEQ ID NO: 5319 - protein, 302 aa, Homo sapiens
MLGLCGQRLPAAWVLLLLPFLPLLLLAAPAPHRASYKPVIVVHGLFDSSYSFRHLLEYINETHPGTVVTVLDLFDGRESLRPLWEQVQGFREAVVPIMAKAPQGVHLICYSQGGLVCRALLSVMDDHNVDSFISLSSPQMGQYGDTDYLKWLFPTSMRSNLYRICYSPWGQEFSICNYWHDPHHDDLYLNASSFLALINGERDHPNATVWRKNFLRVGHLVLIGGPDDGVITPWQSSFFGFYDANETVLEMEEQLVYLRDSFGLKTLLARGAIVRCPMAGISHTAWHSNRTLYETCIEPWLS

SEQ ID NO: 5320 - protein, 89 aa, Homo sapiens
MKPWILLLVMFISGVVMLLPVLGSFWNKDPFLDMIRETEQCWVQPPYKYCEKRCTKIMTCVRPNHTCCWTYCGNICLDNEEPLKSMLNP

SEQ ID NO: 5321 - protein, 249 aa, Homo sapiens
MPPLLPLRLCRLWPRNPPSRLLGAAAGQRSRPSTYYELLGVHPGASTEEVKRAFFSKSKELHPDRDPGNPSLHSRFVELSEAYRVLSREQSRRSYDDQLRSGSPPKSPRTTVHDKSAHQTHSSSWTPPNAQYWSQFHSVRPQGPQLRQQQHKQNKQVLGYCLLLMLAGMGLHYIAFRKVKQMHLNFMDEKDRIITAFYNEARARARSVPALFCSLLPVQEPHFGIPIPTTQVPSPPGPTEASFSRSDNG

SEQ ID NO: 5322 - protein, 418 aa, Homo sapiens
MLYLEDYLEMIEQLPMDLRDRFTEMREMDLQVQNAMDQLEQRVSEFFMNAKKNKPEWREEQMASIKKDYYKALEDADEKVQLANQIYDLVDRHLRKLDQELAKFKMELEADNAGITEILERRSLELDTPSQPVNNHHAHSHTPVEKRKYNPTSHHTTTDHIPEKKFKSEALLSTLTSDASKENTLGCRNNNSTASSNNAYNVNSSQPLGSYNIGSLSSGTGAGAITMAAAQAVQATAQMKEGRRTSSLKASYEAFKNNDFQLGKEFSMARETVGYSSSSALMTTLTQNASSSAADSRSGRKSKNNNKSSSQQSSSSSSSSSLSSCSSSSTVVQEISQQTTVVPESDSNSQVDWTYDPNEPRYCICNQVSYGEMVGCDNQDCPIEWFHYGCVGLTEAPKGKWYCPQCTAAMKRRGSRHK

SEQ ID NO: 5323 - protein, 106 aa, Homo sapiens
MSSLSEYAFRMSRLSARLFGEVTRPTNSKSMKVVKLFSELPLAKKKETYDWYPNHHTYAELMQTLRFLGLYRDEHQDFMDEQKRLKKLRGKEKPKKGEGKRAAKRK

SEQ ID NO: 5324 - protein, 333 aa, Homo sapiens
MKGEAGHMLHNEKSKQEGHIWGSMRRTAFILGSGLLSFVAFWNSVTWHLQRFWGASGYFWQAQWERLLTTFEGKEWILFFIGAIQVPCLFFWSFNGLLLVVDTTGKPNFISRYRIQVGKNEPVDPVKLRQSIRTVLFNQCMISFPMVVFLYPFLKWWRDPCRRELPTFHWFLLELAIFTLIEEVLFYYSHRLLHHPTFYKKIHKKHHEWTAPIGVISLYAHPIEHAVSNMLPVIVGPLVMGSHLSSITMWFSLALIITTISHCGYHLPFLPSPEFHDYHHLKFNQCYGVLGVLDHLHGTDTMFKQTKAYERHVLLLGFTPLSESIPDSPKRME

SEQ ID NO: 5325 - protein, 393 aa, Homo sapiens
MEQCACVERELDKVLQKFLTYGQHCERSLEELLHYVGQLRAELASAALQGTPLSATLSLVMSQCCRKIKDTVQKLASDHKDIHSSVSRVGKAIDRNFDSEICGVVSDAVWDAREQQQQILQMAIVEHLYQQGMLSVAEELCQESTLNVDLDFKQPFLELNRILEALHEQDLGPALEWAVSHRQRLLELNSSLEFKLHRLHFIRLLAGGPAKQLEALSYARHFQPFARLHQREIQVMMGSLVYLRLGLEKSPYCHLLDSSHWAEICETFTRDACSLLGLSVESPLSVSFASGCVALPVLMNIKAVIEQRQCTGVWNHKDELPIEIELGMKCWYHSVFACPILRQQTSDSNPPIKLICGHVISRDALNKLINGGKLKCPYCPMEQNPADGKRIIF

SEQ ID NO: 5326 - protein, 710 aa, Homo sapiens
MQGKKPGGSSGGGRSGELQGDEAQRNKKKKKKVSCFSNIKIFLVSECALMLAQGTVGAYLVSVLTTLERRFNLQSADVGVIASSFEIGNLALILFVSYFGARGHRPRLIGCGGIVMALGALLSALPEFLTHQYKYEAGEIRWGAEGRDVCAANGSGGDEGPDPDLICRNRTATNMMYLLLIGAQVLLGIGATPVQPLGVSYIDDHVRRKDSSLYIGILFTMLVFGPACGFILGSFCTKIYVDAVFIDTSNLDITPDDPRWIGAWWGGFLLCGALLFFSSLLMFGFPQSLPPHSEPAMESEQAMLSEREYERPKPSNGVLRHPLEPDSSASCFQQLRVIPKVTKHLLSNPVFTCIILAACMEIAVVAGFAAFLGKYLEQQFNLTTSSANQLLGMTAIPCACLGIFLGGLLVKKLSLSALGAIRMAMLVNLVSTACYVSFLFLGCDTGPVAGVTVPYGNSTAPGSALDPYSPCNNNCECQTDSFTPVCGADGITYLSACFAGCNSTNLTGCACLTTVPAENATVVPGKCPSPGCQEAFLTFLCVMCICSLIGAMAQTPSVIILIRTVSPELKSYALGVLFLLLRLLGFIPPPLIFGAGIDSTCLFWSTFCGEQGACVLYDNVVYRYLYVSIAIALKSFAFILYTTTWQCLRKNYKRYIKNHEGGLSTSEFFASTLTLDNLGRDPVPANQTHRTKFIYNLEDHEWCENMESVL

SEQ ID NO: 5327 - protein, 576 aa, Homo sapiens
MLPHVVLTFRRLGCALASCRLAPARHRGSGLLHTAPVARSDRSAPVFTRALAFGDRIALVDQHGRHTYRELYSRSLRLSQEICRLCGCVGGDLREERVSFLCANDASYVVAQWASWMSGGVAVPLYRKHPAAQLEYVICDSQSSVVLASQEYLELLSPVVRKLGVPLLPLTPAIYTGAVEEPAEVPVPEQGWRNKGAMIIYTSGTTGRPKGVLSTHQNIRAVVTGLVHKWAWTKDDVILHVLPLHHVHGVVNALLCPLWVGATCVMMPEFSPQQVWEKFLSSETPRINVFMAVPTIYTKLMEYYDRHFTQPHAQDFLRAVCEEKIRLMVSGSAALPLPVLEKWKNITGHTLLERYGMTEIGMALSGPLTTAVRLPGSVGTPLPGVQVRIVSENPQREACSYTIHAEGDERGTKVTPGFEEKEGELLVRGPSVFREYWNKPEETKSAFTLDGWFKTGDTVVFKDGQYWIRGRTSVDIIKTGGYKVSALEVEWHLLAHPSITDVAVIGVPDMTWGQRVTAVVTLREGHSLSHRELKEWARNVLAPYAVPSELVLVEEIPRNQMGKIDKKALIRHFHPS

SEQ ID NO: 5328 - protein, 360 aa, Homo sapiens
MGAPLLSPGWGAGAAGRRWWMLLAPLLPALLLVRPAGALVEGLYCGTRDCYEVLGVSRSAGKAEIARAYRQLARRYHPDRYRPQPGDEGPGRTPQSAEEAFLLVATAYETLKDEETRKDYDYMLDHPEEYYSHYYHYYSRRLAPKVDVRVVILVSVCAISVFQFFSWWNSYNKAISYLATVPKYRIQATEIAKQQGLLKKAKEKGKNKKSKEEIRDEEENIIKNIIKSKIDIKGGYQKPQICDLLLFQIILAPFHLCSYIVWYCRWIYNFNIKGKEYGEEERLYIIRKSMKMSKSQFDSLEDHQKETFLKRELWIKENYEVYKQEQEEELKKKLANDPRWKRYRRWMKNEGPGRLTFVDD

SEQ ID NO: 5329 - protein, 477 aa, Homo sapiens
MAAPILRSFSWGRWSGTLNLSVLLPLGLRKAHSGAQGLLAAQKARGLFKDFFPETGTKIELPELFDRGTASFPQTIYCGFDPTADSLHVGHLLALLGLFHLQRAGHNVIALVGGATARLGDPSGRTKEREALETERVRANARALRLGLEALAANHQQLFTDGRSWGSFTVLDNSAWYQKQHLVDFLAAVGGHFRMGTLLSRQSVQLRLKSPEGMSLAEFFYQVLQAYDFYYLFQRYGCRVQLGGSDQLGNIMSGYEFINKLTGEDVFGITVPLITSTTGAKLGKSAGNAVWLNRDKTSPFELYQFFVRQPDDSVERYLKLFTFLPLPEIDHIMQLHVKEPERRGPQKRLAAEVTKLVHGREGLDSAKRCTQALYHSSIDALEVMSDQELKELFKEAPFSEFFLDPGTSVLDTCRKANAIPDGPRGYRMITEGGVSINHQQVTNPESVLIVGQHILKNGLSLLKIGKRNFYIIKWLQL

SEQ ID NO: 5330 - protein, 981 aa, Homo sapiens
MDGFAGSLDDSISAASTSDVQDRLSALESRVQQQEDEITVLKAALADVLRRLAISEDHVASVKKSVSSKGQPSPRAVIPMSCITNGSGANRKPSHTSAVSIAGKETLSSAAKSGTEKKKEKPQGQREKKEESHSNDQSPQIRASPSPQPSSQPLQIHRQTPESKNATPTKSIKRPSPAEKSHNSWENSDDSRNKLSKIPSTPKLIPKVTKTADKHKDVIINQEGEYIKMFMRGRPITMFIPSDVDNYDDIRTELPPEKLKLEWAYGYRGKDCRANVYLLPTGKIVYFIASVVVLFNYEERTQRHYLGHTDCVKCLAIHPDKIRIATGQIAGVDKDGRPLQPHVRVWDSVTLSTLQIIGLGTFERGVGCLDFSKADSGVHLCIIDDSNEHMLTVWDWQKKAKGAEIKTTNEVVLAVEFHPTDANTIITCGKSHIFFWTWSGNSLTRKQGIFGKYEKPKFVQCLAFLGNGDVLTGDSGGVMLIWSKTTVEPTPGKGPKGVYQISKQIKAHDGSVFTLCQMRNGMLLTGGGKDRKIILWDHDLNPEREIEVPDQYGTIRAVAEGKADQFLVGTSRNFILRGTFNDGFQIEVQGHTDELWGLATHPFKDLLLTCAQDRQVCLWNSMEHRLEWTRLVDEPGHCADFHPSGTVVAIGTHSGRWFVLDAETRDLVSIHTDGNEQLSVMRYSIDGTFLAVGSHDNFIYLYVVSENGRKYSRYGRCTGHSSYITHLDWSPDNKYIMSNSGDYEILYWDIPNGCKLIRNRSDCKDIDWTTYTCVLGFQVFGVWPEGSDGTDINALVRSHNRKVIAVADDFCKVHLFQYPCSKAKAPSHKYSAHSSHVTNVSFTHNDSHLISTGGKDMSIIQWKLVEKLSLPQNETVADTTLTKAPVSSTESVIQSNTPTPPPSQPLNETAEEESRISSSPTLLENSLEQTVEPSEDHSEEESEEGSGDLGEPLYEEPCNEISKEQAKATLLEDQQDPSPSS

SEQ ID NO: 5331 - protein, 311 aa, Homo sapiens
MSQRDTLVHLFAGGCGGTVGAILTCPLEVVKTRLQSSSVTLYISEVQLNTMAGASVNRVVSPGPLHCLKVILEKEGPRSLFRGLGPNLVGVAPSRAIYFAAYSNCKEKLNDVFDPDSTQVHMISAAMAGFTAITATNPIWLIKTRLQLDARNRGERRMGAFECVRKVYQTDGLKGFYRGMSASYAGISETVIHFVIYESIKQKLLEYKTASTMENDEESVKEASDFVGMMLAAATSKTCATTIAYPHEVVRTRLREEGTKYRSFFQTLSLLVQEEGYGSLYRGLTTHLVRQIPNTAIMMATYELVVYLLNG

SEQ ID NO: 5332 - protein, 244 aa, Homo sapiens
MLLLGAVLLLLALPGHDQETTTQGPGVLLPLPKGACTGWMAGIPGHPGHNGAPGRDGRDGTPGEKGEKGDPGLIGPKGDIGETGVPGAEGPRGFPGIQGRKGEPGEGAYVYRSAFSVGLETYVTIPNMPIRFTKIFYNQQNHYDGSTGKFHCNIPGLYYFAYHITVYMKDVKVSLFKKDKAMLFTYDQYQENNVDQASGSVLLHLEVGDQVWLQVYGEGERNGLYADNDNDSTFTGFLLYHDTN

SEQ ID NO: 5333 - protein, 252 aa, Homo sapiens
MEDGVAGPQLGAAAEAAEAAEARARPGVTLRPFAPLSGAAEADEGGGDWSFIDCEMEEVDLQDLPSATIACHLDPRVFVDGLCRAKFESLFRTYDKDITFQYFKSFKRVRINFSNPFSAADARLQLHKTEFLGKEMKLYFAQTLHIGSSHLAPPNPDKQFLISPPASPPVGWKQVEDATPVINYDLLYAISKLGPGEKYELHAATDTTPSVVVHVCESDQEKEEEEEMERMRRPKPKIIQTRRPEYTPIHLS

SEQ ID NO: 5334 - protein, 453 aa, Homo sapiens
MSIVTVQLGQCGNQIGFEVFDALLSDSHSSQGLCSMRENEAYQASCKERFFSEEENGVPIARAVLVDMEPKVINQMLSKAAQSGQWKYGQHACFCQKQGSGNNWAYGYSVHGPRHEESIMNIIRKEVEKCDSFSGFFIIMSMAGGTGSGLGAFVTQNLEDQYSNSLKMNQIIWPYGTGEVIVQNYNSILTLSHLYRSSDALLLHENDAIHKICAKLMNIKQISFSDINQVLAHQLGSVFQPTYSAESSFHYRRNPLGDLMEHLVPHPEFKMLSVRNIPHMSENSLAYTTFTWAGLLKHLRQMLISNAKMEEGIDRHVWPPLSGLPPLSKMSLNKDLHFNTSIANLVILRGKDVQSADVEGFKDPALYTSWLKPVNAFNVWKTQRAFSKYEKSAVLVSNSQFLVKPLDMIVGKAWNMFASKAYIHQYTKFGIEEEDFLDSFTSLEQVVASYCNL

SEQ ID NO: 5335 - protein, 252 aa, Homo sapiens
MEVLRPQLIRIDGRNYRKNPVQEQTYQHEEDEEDFYQGSMECADEPCDAYEVEQTPQGFRSTLRAPSLLYKHIVGKRGDTRKKIEMETKTSISIPKPGQDGEIVITGQHRNGVISARTRIDVLLDTFRRKQPFTHFLAFFLNEVEVQEGFLRFQEEVLAKCSMDHGVDSSIFQNPKKLHLTIGMLVLLSEEEIQQTCEMLQQCKEEFIKLQELVDRVLERFQASGLIVKEWNSVKLHATVMNTLFRKDPNVV

SEQ ID NO: 5336 - protein, 72 aa, Homo sapiens
MQRLVLLLAISLLLYQDLPVRSEFELDRICGYGTARCRKKCRSQEYRIGRCPNTYACCLRKWDESLLNRTKP

SEQ ID NO: 5337 - protein, 1103 aa, Homo sapiens
MAGASVKVAVRVRPFNARETSQDAKCVVSMQGNTTSIINPKQSKDAPKSFTFDYSYWSHTSTEDPQFASQQQVYRDIGEEMLLHAFEGYNVCIFAYGQTGAGKSYTMMGRQEPGQQGIVPQLCEDLFSRVSENQSAQLSYSVEVSYMEIYCERVRDLLNPKSRGSLRVREHPILGPYVQDLSKLAVTSYADIADLMDCGNKARTVAATNMNETSSRSHAVFTIVFTQRCHDQLTGLDSEKVSKISLVDLAGSERADSSGARGMRLKEGANINKSLTTLGKVISALADMQSKKRKSDFIPYRDSVLTWLLKENLGGNSRTAMIAALSPADINYEETLSTLRYADRTKQIRCNAIINEDPNARLIRELQEEVARLRELLMAQGLSASALEGLKTEEGSVRGALPAVSSPPAPVSPSSPTTHNGELEPSFSPNTESQIGPEEAMERLQETEKIIAELNETWEEKLRKTEALRMEREALLAEMGVAVREDGGTVGVFSPKKTPHLVNLNEDPLMSECLLYHIKDGVTRVGQVDMDIKLTGQFIREQHCLFRSIPQPDGEVVVTLEPCEGAETYVNGKLVTEPLVLKSGNRIVMGKNHVFRFNHPEQARLERERGVPPPPGPPSEPVDWNFAQKELLEQQGIDIKLEMEKRLQDLENQYRKEKEEADLLLEQQRLYADSDSGDDSDKRSCEESWRLISSLREQLPPTTVQTIVKRCGLPSSGKRRAPRRVYQIPQRRRLQGKDPRWATMADLKMQAVKEICYEVALADFRHGRAEIEALAALKMRELCRTYGKPDGPGDAWRAVARDVWDTVGEEEGGGAGSGGGSEEGARGAEVEDLRAHIDKLTGILQEVKLQNSSKDRELQALRDRMLRMERVIPLAQDHEDENEEGGEVPWAPPEGSEAAEEAAPSDRMPSARPPSPPLSSWERVSRLMEEDPAFRRGRLRWLKQEQLRLQGLQGSGGRGGGLRRPPARFVPPHDCKLRFPFKSNPQHRESWPGMGSGEAPTPLQPPEEVTPHPATPARRPPSPRRSHHPRRNSLDGGGRSRGAGSAQPEPQHFQPKKHNSYPQPPQPYPAQRPPGPRYPPYTTPPRMRRQRSAPDLKESGAAV

SEQ ID NO: 5338 - protein, 715 aa, Homo sapiens
MSQSGAVSCCPGATNGSLGRSDGVAKMSPKDLFEQRKKYSNSNVIMHETSQYHVQHLATFIMDKSEAITSVDDAIRKLVQLSSKEKIWTQEMLLQVNDQSLRLLDIESQEELEDFPLPTVQRSQTVLNQLRYPSVLLLVCQDSEQSKPDVHFFHCDEVEAELVHEDIESALADCRLGKKMRPQTLKGHQEKIRQRQSILPPPQGPAPIPFQHRGGDSPEAKNRVGPQVPLSEPGFRRRESQEEPRAVLAQKIEKETQILNCALDDIEWFVARLQKAAEAFKQLNQRKKGKKKGKKAPAEGVLTLRARPPSEGEFIDCFQKIKLAINLLAKLQKHIQNPSAAELVHFLFGPLDLIVNTCSGPDIARSVSCPLLSRDAVDFLRGHLVPKEMSLWESLGESWMRPRSEWPREPQVPLYVPKFHSGWEPPVDVLQEAPWEVEGLASAPIEEVSPVSRQSIRNSQKHSPTSEPTPPGDALPPVSSPHTHRGYQPTPAMAKYVKILYDFTARNANELSVLKDEVLEVLEDGRQWWKLRSRSGQAGYVPCNILGEARPEDAGAPFEQAGQKYWGPASPTHKLPPSFPGNKDELMQHMDEVNDELIRKISNIRAQPQRHFRVERSQPVSQPLTYESGPDEVRAWLEAKAFSPRIVENLGILTGPQLFSLNKEELKKVCGEEGVRVYSQLTMQKAFLEKQQSGSELEELMNKFHSMNQRRGEDS

SEQ ID NO: 5339 - protein, 417 aa, Homo sapiens
MLLSVPLLLGLLGLAVAEPAVYFKEQFLDGDGWTSRWIESKHKSDFGKFVLSSGKFYGDEEKDKGLQTSQDARFYALSASFEPFSNKGQTLVVQFTVKHEQNIDCGGGYVKLFPNSLDQTDMHGDSEYNIMFGPDICGPGTKKVHVIFNYKGKNVLINKDIRCKDDEFTHLYTLIVRPDNTYEVKIDNSQVESGSLEDDWDFLPPKKIKDPDASKPEDWDERAKIDDPTDSKPEDWDKPEHIPDPDAKKPEDWDEEMDGEWEPPVIQNPEYKGEWKPRQIDNPDYKGTWIHPEIDNPEYSPDPSIYAYDNFGVLGLDLWQVKSGTIFDNFLITNDEAYAEEFGNETWGVTKAAEKQMKDKQDEEQRLKEEEEDKKRKEEEEAEDKEDDEDKDEDEEDEEDKEEDEEEDVPGQAKDEL

SEQ ID NO: 5340 - protein, 616 aa, Homo sapiens
MNSPGGRGKKKGSGGASNPVPPRPPPPCLAPAPPAAGPAPPPESPHKRNLYYFSYPLFVGFALLRLVAFHLGLLFVWLCQRFSRALMAAKRSSGAAPAPASASAPAPVPGGEAERVRVFHKQAFEYISIALRIDEDEKAGQKEQAVEWYKKGIEELEKGIAVIVTGQGEQCERARRLQAKMMTNLVMAKDRLQLLEKMQPVLPFSKSQTDVYNDSTNLACRNGHLQSESGAVPKRKDPLTHTSNSLPRSKTVMKTGSAGLSGHHRAPSYSGLSMVSGVKQGSGPAPTTHKGTPKTNRTNKPSTPTTATRKKKDLKNFRNVDSNLANLIMNEIVDNGTAVKFDDIAGQDLAKQALQEIVILPSLRPELFTGLRAPARGLLLFGPPGNGKTMLAKAVAAESNATFFNISAASLTSKYVGEGEKLVRALFAVARELQPSIIFIDEVDSLLCERREGEHDASRRLKTEFLIEFDGVQSAGDDRVLVMGATNRPQELDEAVLRRFIKRVYVSLPNEETRLLLLKNLLCKQGSPLTQKELAQLARMTDGYSGSDLTALAKDAALGPIRELKPEQVKNMSASEMRNIRLSDFTESLKKIKRSVSPQTLEAYIRWNKDFGDTTV

SEQ ID NO: 5341 - protein, 288 aa, Homo sapiens
MSSSMWYIMQSIQSKYSLSERLIRTIAAIRSFPHDNVEDLIRGGADVNCTHGTLKPLHCACMVSDADCVELLLEKGAEVNALDGYNRTALHYAAEKDEACVEVLLEYGANPNALDGNRDTPLHWAAFKNNAECVRALLESGASVNALDYNNDTPLSWAAMKGNLESVSILLDYGAEVRVINLIGQTPISRLVALLVRGLGTEKEDSCFELLHRAVGHFELRKNGTMPREVARDPQLCEKLTVLCSAPGTLKTLARYAVRRSLGLQYLPDAVKGLPLPASLKEYLLLLE

SEQ ID NO: 5342 - protein, 571 aa, Homo sapiens
MALPKDAIPSLSECQCGICMEILVEPVTLPCNHTLCKPCFQSTVEKASLCCPFCRRRVSSWTRYHTRRNSLVNVELWTIIQKHYPRECKLRASGQESEEVADDYQPVRLLSKPGELRREYEEEISKVAAERRASEEEENKASEEYIQRLLAEEEEEEKRQAEKRRRAMEEQLKSDEELARKLSIDINNFCEGSISASPLNSRKSDPVTPKSEKKSKNKQRNTGDIQKYLTPKSQFGSASHSEAVQEVRKDSVSKDIDSSDRKSPTGQDTEIEDMPTLSPQISLGVGEQGADSSIESPMPWLCACGAEWYHEGNVKTRPSNHGKELCVLSHERPKTRVPYSKETAVMPCGRTESGCAPTSGVTQTNGNNTGETENEESCLLISKEISKRKNQESSFEAVKDPCFSAKRRKVSPESSPDQEETEINFTQKLIDLEHLLFERHKQEEQDRLLALQLQKEVDKEQMVPNRQKGSPDEYHLRATSSPPDKVLNGQRKNPKDGNFKRQTHTKHPTPERGSRDKNRQVSLKMQLKQSVNRRKMPNSTRDHCKVSKSAHSLQPSISQKSVFQMFQRCTK

SEQ ID NO: 5343 - protein, 214 aa, Homo sapiens
MTEPGASPEDPWVKVEYAYSDNSLDPDDEDSDYHQEAYKESYKDRRRRAHTQAEQKRRDAIKRGYDDLQTIVPTCQQQDFSIGSQKLSKAIVLQKTIDYIQFLHKEKKKQEEEVSTLRKDVTALKIMKVNYEQIVKAHQDNPHEGEDQVSDQVKFNVFQGIMDSLFQSFNASISVASFQELSACVFSWIEEHCKPQTLREIVIGVLHQLKNQLY

SEQ ID NO: 5344 - protein, 703 aa, Homo sapiens
MPEPRGSSQLRVNAAFAARYNRYREREELQRLKDRYGDRDSSSDSSSESDSSDERVEFDPQQERDFYKTLSLLKKKDPRIYQKDATFYNRTASSSDSEEDPEALEKQKKVRPMYLKDYERKVILEKAGKYVDEENSDGETSNHRLQETSSQSYVEEQKQLKESFRAFVEDSEDEDGAGEGGSSLLQKRAKTRQEKAQEEADYIEWLKGQKEIRNPDSLKELTHLKEYWNDPELDEGERFLRDYILNKRYEEEEEEEEDEEEMEEEEGVHGPPVQLAVDDSSDEGELFLKKQEDFEQKYNFRFEEPDSASVKTYPRSIASSVRRKDERRKEKREETRERKKREKAKKQEELKQLKNLKRKEILAKLEKLRKVTGNEMLGLEEGDLEDDFDPAQHDQLMQKCFGDEYYGAVEEEKPQFEEEEGLEDDWNWDTWDGPEQEGDWSQQELHCEDPNFNMDADYDPSQPRKKKREAPLTGKKKRKSPFAAAVGQEKPVFEPGDKTFEEYLDEYYRLDYEDIIDDLPCRFKYRTVVPCDFGLSTEEILAADDKELNRWCSLKKTCMYRSEQEELRDKRAYSQKAQNSWKKRQVFKSLCREEAETPAEATGKPQRDEAGPQRQLPALDGSLMGPESPPAQEEEAPVSPHKKPAPQKRRRAKKARLLGPTVMLGGCEFSRQRLQAFGLNPKRLHFRQLGRQRRKQQGPKNSS

SEQ ID NO: 5345 - protein, 440 aa, Homo sapiens
MPIPPPPPPPPGPPPPPTFHQANTEQPKLSRDEQRGRGALLQDICKGTKLKKVTNINDRSAPILEKPKGSSGGYGSGGAALQPKGGLFQGGVLKLRPVGAKDGSENLAGKPALQIPSSRAAAPRPPVSAASGRPQDDTDSSRASLPELPRMQRPSLPDLSRPNTTSSTGMKHSSSAPPPPPPGRRANAPPTPLPMHSSKAPAYNREKPLPPTPGQRLHPGREGPPAPPPVKPPPSPVNIRTGPSGQSLAPPPPPYRQPPGVPNGPSSPTNESAPELPQRHNSLHRKTPGPVRGLAPPPPTSASPSLLSNRPPPPARDPPSRGAAPPPPPPVIRNGARDAPPPPPPYRMHGSEPPSRGKPPPPPSRTPAGPPPPPPPPLRNGHRDSITTVRSFLDDFESKYSFHPVEDFPAPEEYKHFQRIYPSKTNRAARGAPPLPPILR

SEQ ID NO: 5346 - protein, 509 aa, Homo sapiens
MPSGFQQIGSEDGEPPQQRVTGTLVLAVFSAVLGSLQFGYNIGVINAPQKVIEQSYNETWLGRQGPEGPSSIPPGTLTTLWALSVAIFSVGGMISSFLIGIISQWLGRKRAMLVNNVLAVLGGSLMGLANAAASYEMLILGRFLIGAYSGLTSGLVPMYVGEIAPTHLRGALGTLNQLAIVIGILIAQVLGLESLLGTASLWPLLLGLTVLPALLQLVLLPFCPESPRYLYIIQNLEGPARKSLKRLTGWADVSGVLAELKDEKRKLERERPLSLLQLLGSRTHRQPLIIAVVLQLSQQLSGINAVFYYSTSIFETAGVGQPAYATIGAGVVNTVFTLVSVLLVERAGRRTLHLLGLAGMCGCAILMTVALLLLERVPAMSYVSIVAIFGFVAFFEIGPGPIPWFIVAELFSQGPRPAAMAVAGFSNWTSNFIIGMGFQYVAEAMGPYVFLLFAVLLLGFFIFTFLRVPETRGRTFDQISAAFHRTPSLLEQEVKPSTELEYLGPDEND

SEQ ID NO: 5347 - protein, 866 aa, Homo sapiens
MGAARSPPSAVPGPLLGLLLLLLGVLAPGGASLRLLDHRALVCSQPGLNCTVKNSTCLDDSWIHPRNLTPSSPKDLQIQLHFAHTQQGDLFPVAHIEWTLQTDASILYLEGAELSVLQLNTNERLCVRFEFLSKLRHHHRRWRFTFSHFVVDPDQEYEVTVHHLPKPIPDGDPNHQSKNFLVPDCEHARMKVTTPCMSSGSLWDPNITVETLEAHQLRVSFTLWNESTHYQILLTSFPHMENHSCFEHMHHIPAPRPEEFHQRSNVTLTLRNLKGCCRHQVQIQPFFSSCLNDCLRHSATVSCPEMPDTPEPIPDYMPLWVYWFITGISILLVGSVILLIVCMTWRLAGPGSEKYSDDTKYTDGLPAADLIPPPLKPRKVWIIYSADHPLYVDVVLKFAQFLLTACGTEVALDLLEEQAISEAGVMTWVGRQKQEMVESNSKIIVLCSRGTRAKWQALLGRGAPVRLRCDHGKPVGDLFTAAMNMILPDFKRPACFGTYVVCYFSEVSCDGDVPDLFGAAPRYPLMDRFEEVYFRIQDLEMFQPGRMHRVGELSGDNYLRSPGGRQLRAALDRFRDWQVRCPDWFECENLYSADDQDAPSLDEEVFEEPLLPPGTGIVKRAPLVREPGSQACLAIDPLVGEEGGAAVAKLEPHLQPRGQPAPQPLHTLVLAAEEGALVAAVEPGPLADGAAVRLALAGEGEACPLLGSPGAGRNSVLFLPVDPEDSPLGSSTPMASPDLLPEDVREHLEGLMLSLFEQSLSCQAQGGCSRPAMVLTDPHTPYEEEQRQSVQSDQGYISRSSPQPPEGLTEMEEEEEEEQDPGKPALPLSPEDLESLRSLQRQLLFRQLQKNSGWDTMGSESEGPSA

SEQ ID NO: 5348 - protein, 1441 aa, Homo sapiens
MSGLGDSSSDPANPDSHKRKGSPCDTLASSTEKRRREQENKYLEELAELLSANISDIDSLSVKPDKCKILKKTVDQIQLMKRMEQEKSTTDDDVQKSDISSSSQGVIEKESLGPLLLEALDGFFFVVNCEGRIVFVSENVTSYLGYNQEELMNTSVYSILHVGDHAEFVKNLLPKSLVNGVPWPQEATRRNSHTFNCRMLIHPPDEPGTENQEACQRYEVMQCFTVSQPKSIQEDGEDFQSCLICIARRLPRPPAITGVESFMTKQDTTGKIISIDTSSLRAAGRTGWEDLVRKCIYAFFQPQGREPSYARQLFQEVMTRGTASSPSYRFILNDGTMLSAHTKCKLCYPQSPDMQPFIMGIHIIDREHSGLSPQDDTNSGMSIPRVNPSVNPSISPAHGVARSSTLPPSNSNMVSTRINRQQSSDLHSSSHSNSSNSQGSFGCSPGSQIVANVALNQGQASSQSSNPSLNLNNSPMEGTGISLAQFMSPRRQVTSGLATRPRMPNNSFPPNISTLSSPVGMTSSACNNNNRSYSNIPVTSLQGMNEGPNNSVGFSASSPVLRQMSSQNSPSRLNIQPAKAESKDNKEIASILNEMIQSDNSSSDGKPLDSGLLHNNDRLSDGDSKYSQTSHKLVQLLTTTAEQQLRHADIDTSCKDVLSCTGTSNSASANSSGGSCPSSHSSLTERHKILHRLLQEGSPSDITTLSVEPDKKDSASTSVSVTGQVQGNSSIKLELDASKKKESKDHQLLRYLLDKDEKDLRSTPNLSLDDVKVKVEKKEQMDPCNTNPTPMTKPTPEEIKLEAQSQFTADLDQFDQLLPTLEKAAQLPGLCETDRMDGAVTSVTIKSEILPASLQSATARPTSRLNRLPELELEAIDNQFGQPGTGDQIPWTNNTVTAINQSKSEDQCISSQLDELLCPPTTVEGRNDEKALLEQLVSFLSGKDETELAELDRALGIDKLVQGGGLDVLSERFPPQQATPPLIMEERPNLYSQPYSSPSPTANLPSPFQGMVRQKPSLGTMPVQVTPPRGAFSPGMGMQPRQTLNRPPAAPNQLRLQLQQRLQGQQQLIHQNRQAILNQFAATAPVGINMRSGMQQQITPQPPLNAQMLAQRQRELYSQQHRQRQLIQQQRAMLMRQQSFGNNLPPSSGLPVQMGNPRLPQGAPQQFPYPPNYGTNPGTPPASTSPFSQLAANPEASLANRNSMVSRGMTGNIGGQFGTGINPQMQQNVFQYPGAGMVPQGEANFAPSLSPGSSMVPMPIPPPQSSLLQQTPPASGYQSPDMKAWQQGAIGNNNVFSQAVQNQPTPAQPGVYNNMSITVSMAGGNTNVQNMNPMMAQMQMSSLQMPGMNTVCPEQINDPALRHTGLYCNQLSSTDLLKTEADGTQQVQQVQVFADVQCTVNLVGGDPYLNQPGPLGTQKPTSGPQTPQAQQKSLLQQLLTE

SEQ ID NO: 5349 - protein, 2376 aa, Homo sapiens
MNLDSLSLALSQISYLVDNLTKKNYRASQQEIQHIVNRHGPEADRHLLRCLFSHVDFSGDGKSSGKDFHQTQFLIQECALLITKPNFISTLSYAIDNPLHYQKSLKPAPHLFAQLSKVLKLSKVQEVIFGLALLNSSSSDLRGFAAQFIKQKLPDLLRSYIDADVSGNQEGGFQDIAIEVLHLLLSHLLFGQKGAFGVGQEQIDAFLKTLRRDFPQERCPVVLAPLLYPEKRDILMDRILPDSGGVAKTMMESSLADFMQEVGYGFCASIEECRNIIVQFGVREVTAAQVARVLGMMARTHSGLTDGIPLQSISAPGSGIWSDGKDKSDGAQAHTWNVEVLIDVLKELNPSLNFKEVTYELDHPGFQIRDSKGLHNVVYGIQRGLGMEVFPVDLIYRPWKHAEGQLSFIQHSLINPEIFCFADYPCHTVATDILKAPPEDDNREIATWKSLDLIESLLRLAEVGQYEQVKQLFSFPIKHCPDMLVLALLQINTSWHTLRHELISTLMPIFLGNHPNSAIILHYAWHGQGQSPSIRQLIMHAMAEWYMRGEQYDQAKLSRILDVAQDLKALSMLLNGTPFAFVIDLAALASRREYLKLDKWLTDKIREHGEPFIQACMTFLKRRCPSILGGLAPEKDQPKSAQLPPETLATMLACLQACAGSVSQELSETILTMVANCSNVMNKARQPPPGVMPKGRPPSASSLDAISPVQIDPLAGMTSLSIGGSAAPHTQSMQGFPPNLGSAFSTPQSPAKAFPPLSTPNQTTAFSGIGGLSSQLPVGGLGTGSLTGIGTGALGLPAVNNDPFVQRKLGTSGLNQPTFQQSKMKPSDLSQVWPEANQHFSKEIDDEANSYFQRIYNHPPHPTMSVDEVLEMLQRFKDSTIKREREVFNCMLRNLFEEYRFFPQYPDKELHITACLFGGIIEKGLVTYMALGLALRYVLEALRKPFGSKMYYFGIAALDRFKNRLKDYPQYCQHLASISHFMQFPHHLQEYIEYGQQSRDPPVKMQGSITTPGSIALAQAQAQAQVPAKAPLAGQVSTMVTTSTTTTVAKTVTVTRPTGVSFKKDVPPSINTTNIDTLLVATDQTERIVEPPENIQEKIAFIFNNLSQSNMTQKVEELKETVKEEFMPWVSQYLVMKRVSIEPNFHSLYSNFLDTLKNPEFNKMVLNETYRNIKVLLTSDKAAANFSDRSLLKNLGHWLGMITLAKNKPILHTDLDVKSLLLEAYVKGQQELLYVVPFVAKVLESSIRSVVFRPPNPWTMAIMNVLAELHQEHDLKLNLKFEIEVLCKNLALDINELKPGNLLKDKDRLKNLDEQLSAPKKDVKQPEELPPITTTTTSTTPATNTTCTATVPPQPQYSYHDINVYSLAGLAPHITLNPTIPLFQAHPQLKQCVRQAIERAVQELVHPVVDRSIKIAMTTCEQIVRKDFALDSEESRMRIAAHHMMRNLTAGMAMITCREPLLMSISTNLKNSFASALRTASPQQREMMDQAAAQLAQDNCELACCFIQKTAVEKAGPEMDKRLATEFELRKHARQEGRRYCDPVVLTYQAERMPEQIRLKVGGVDPKQLAVYEEFARNVPGFLPTNDLSQPTGFLAQPMKQAWATDDVAQIYDKCITELEQHLHAIPPTLAMNPQAQALRSLLEVVVLSRNSRDAIAALGLLQKAVEGLLDATSGADADLLLRYRECHLLVLKALQDGRAYGSPWCNKQITRCLIECRDEYKYNVEAVELLIRNHLVNMQQYDLHLAQSMENGLNYMAVAFAMQLVKILLVDERSVAHVTEADLFHTIETLMRINAHSRGNAPEGLPQLMEVVRSNYEAMIDRAHGGPNFMMHSGISQASEYDDPPGLREKAEYLLREWVNLYHSAAAGRDSTKAFSAFVGQMHQQGILKTDDLITRFFRLCTEMCVEISYRAQAEQQHNPAANPTMIRAKCYHNLDAFVRLIALLVKHSGEATNTVTKINLLNKVLGIVVGVLLQDHDVRQSEFQQLPYHRIFIMLLLELNAPEHVLETINFQTLTAFCNTFHILRPTKAPGFVYAWLELISHRIFIARMLAHTPQQKGWPMYAQLLIDLFKYLAPFLRNVELTKPMQILYKGTLRVLLVLLHDFPEFLCDYHYGFCDVIPPNCIQLRNLILSAFPRNMRLPDPFTPNLKVDMLSEINIAPRILTNFTGVMPPQFKKDLDSYLKTRSPVTFLSDLRSNLQVSNEPGNRYNLQLINALVLYVGTQAIAHIHNKGSTPSMSTITHSAHMDIFQNLAVDLDTEGRYLFLNAIANQLRYPNSHTHYFSCTMLYLFAEANTEAIQEQITRVLLERLIVNRPHPWGLLITFIELIKNPAFKFWNHEFVHCAPEIEKLFQSVAQCCMGQKQAQQVMEGTGAS

SEQ ID NO: 5350 - protein, 67 aa, Homo sapiens
MRIHYLLFALLFLFLVPVPGHGGIINTLQKYYCRVRGGRCAVLSCLPKEEQIGKCSTRGRKCCRRKK

SEQ ID NO: 5351 - protein, 393 aa, Homo sapiens
MLRRLLERPCTLALLVGSQLAVMMYLSLGGFRSLSALFGRDQGPTFDYSHPRDVYSNLSHLPGAPGGPPAPQGLPYCPERSPLLVGPVSVSFSPVPSLAEIVERNPRVEPGGRYRPAGCEPRSRTAIIVPHRAREHHLRLLLYHLHPFLQRQQLAYGIYVIHQAGNGTFNRAKLLNVGVREALRDEEWDCLFLHDVDLLPENDHNLYVCDPRGPRHVAVAMNKFGYSLPYPQYFGGVSALTPDQYLKMNGFPNEYWGWGGEDDDIATRVRLAGMKISRPPTSVGHYKMVKHRGDKGNEENPHRFDLLVRTQNSWTQDGMNSLTYQLLARELGPLYTNITADIGTDPRGPRAPSGPRYPPGSSQAFRQEMLQRRPPARPGPLSTANHTALRGSH

SEQ ID NO: 5352 - protein, 332 aa, Homo sapiens
MRLLVLLWGCLLLPGYEALEGPEEISGFEGDTVSLQCTYREELRDHRKYWCRKGGILFSRCSGTIYAEEEGQETMKGRVSIRDSRQELSLIVTLWNLTLQDAGEYWCGVEKRGPDESLLISLFVFPGPCCPPSPSPTFQPLATTRLQPKAKAQQTQPPGLTSPGLYPAATTAKQGKTGAEAPPLPGTSQYGHERTSQYTGTSPHPATSPPAGSSRPPMQLDSTSAEDTSPALSSGSSKPRVSIPMVRILAPVLVLLSLLSAAGLIAFCSHLLLWRKEAQQATETQRNEKFCLSRLTAEEKEAPSQAPEGDVISMPPLHTSEEELGFSKFVSA

SEQ ID NO: 5353 - protein, 228 aa, Homo sapiens
MEDSPLPDLRDIELKLGRKVPESLVRSLRGEEPVPRERDRDPCGGSGGGGGGGGGCSSSSSYCSFPPSLSSSSSSSPTSGSPRGSHSSALERLETKLHLLRQEMVNLRATDVRLMRQLLVINESIESIKWMIEEKATITSRGSSLSGSLCSLLESQSTSLRGSYNSLHDGSDGLDGISVGSYLDTLADDVPGHQTPSDLDQFSDSSLIEDSQALHKRPKLDSEYYCFG

SEQ ID NO: 5354 - protein, 499 aa, Homo sapiens
MLLLLLLLPLLWGTKGMEGDRQYGDGYLLQVQELVTVQEGLCVHVPCSFSYPQDGWTDSDPVHGYWFRAGDRPYQDAPVATNNPDREVQAETQGRFQLLGDIWSNDCSLSIRDARKRDKGSYFFRLERGSMKWSYKSQLNYKTKQLSVFVTALTHRPDILILGTLESGHSRNLTCSVPWACKQGTPPMISWIGASVSSPGPTTARSSVLTLTPKPQDHGTSLTCQVTLPGTGVTTTSTVRLDVSYPPWNLTMTVFQGDATASTALGNGSSLSVLEGQSLRLVCAVNSNPPARLSWTRGSLTLCPSRSSNPGLLELPRVHVRDEGEFTCRAQNAQGSQHISLSLSLQNEGTGTSRPVSQVTLAAVGGAGATALAFLSFCIIFIIVRSCRKKSARPAAGVGDTGMEDAKAIRGSASQGPLTESWKDGNPLKKPPPAVAPSSGEEGELHYATLSFHKVKPQDPQGQEATDSEYSEIKIHKRETAETQACLRNHNPSSKEVRG

SEQ ID NO: 5355 - protein, 129 aa, Homo sapiens
MKILVALAVFFLVSTQLFAEEIGANDDLNYWSDWYDSDQIKEELPEPFEHLLQRIARRPKPQQFFGLMGKRDADSSIEKQVALLKALYGHGQISHKRHKTDSFVGLMGKRALNSVAYERSAMQNYERRR

SEQ ID NO: 5356 - protein, 424 aa, Homo sapiens
MRAPGCGRLVLPLLLLAAAALAEGDAKGLKEGETPGNFMEDEQWLSSISQYSGKIKHWNRFRDEVEDDYIKSWEDNQQGDEALDTTKDPCQKVKCSRHKVCIAQGYQRAMCISRKKLEHRIKQPTVKLHGNKDSICKPCHMAQLASVCGSDGHTYSSVCKLEQQACLSSKQLAVRCEGPCPCPTEQAATSTADGKPETCTGQDLADLGDRLRDWFQLLHENSKQNGSASSVAGPASGLDKSLGASCKDSIGWMFSKLDTSADLFLDQTELAAINLDKYEVCIRPFFNSCDTYKDGRVSTAEWCFCFWREKPPCLAELERIQIQEAAKKKPGIFIPSCDEDGYYRKMQCDQSSGDCWCVDQLGLELTGTRTHGSPDCDDIVGFSGDFGSGVGWEDEEEKETEEAGEEAEEEEGEAGEADDGGYIW

SEQ ID NO: 5357 - protein, 1214 aa, Homo sapiens
MKCFFPVLSCLAVLGVVSAQRQVTVQEGPLYRTEGSHITIWCNVSGYQGPSEQNFQWSIYLPSSPEREVQIVSTMDSSFPYAIYTQRVRGGKIFIERVQGNSTLLHITDLQARDAGEYECHTPSTDKQYFGSYSAKMNLVVIPDSLQTTAMPQTLHRVEQDPLELTCEVASETIQHSHLSVAWLRQKVGEKPVEVISLSRDFMLHSSSEYAQRQSLGEVRLDKLGRTTFRLTIFHLQPSDQGEFYCEAAEWIQDPDGSWYAMTRKRSEGAVVNVQPTDKEFTVRLETEKRLHTVGEPVEFRCILEAQNVPDRYFAVSWAFNSSLIATMGPNAVPVLNSEFAHREARGQLKVAKESDSVFVLKIYHLRQEDSGKYNCRVTEREKTVTGEFIDKESKRPKNIPIIVLPLTDNWVVKVPQHHQLLSQGHLESSISVEVASNASVILEGEDLRFSCSVRTAGRPQGRFSVIWQLVDRQNRRSNIMWLDRDGTVQPGSSYWERSSFGGVQMEQVQPNSFSLGIFNSRKEDEGQYECHVTEWVRAVDGEWQIVGERRASTPISITALEMGFAVTAISRTPGVTYSDSFDLQCIIKPHYPAWVPVSVTWRFQPVGTVEFHDLVTFTRDGGVQWGDRSSSFRTRTAIEKAESSNNVRLSISRASDTEAGKYQCVAELWRKNYNNTWTRLAERTSNLLEIRVLQPVTKLQVSKSKRTLTLVENKPIQLNCSVKSQTSQNSHFAVLWYVHKPSDADGKLILKTTHNSAFEYGTYAEEEGLRARLQFERHVSGGLFSLTVQRAEVSDSGSYYCHVEEWLLSPNYAWYKLAEEVSGRTEVTVKQPDSRLRLSQAQGNLSVLETRQVQLECVVLNRTSITSQLMVEWFVWKPNHPERETVARLSRDATFHYGEQAAKNNLKGRLHLESPSPGVYRLFIQNVAVQDSGTYSCHVEEWLPSPSGMWYKRAEDTAGQTALTVMRPDASLQVDTVVPNATVSEKAAFQLDCSIVSRSSQDSRFAVAWYSLRTKAGGKRSSPGLEEQEEEREEEEEEDDDDDDDPTERTALLSVGPDAVFGPEGSPWEGRLRFQRLSPVLYRLTVLQASPQDTGNYSCHVEEWLPSPQKEWYRLTEEESAPIGIRVLDTSPTLQSIICSNDALFYFVFFYPFPIFGILIITILLVRFKSRNSSKNSDGKNGVPLLWIKEPHLNYSPTCLEPPVLSIHPGAID

SEQ ID NO: 5358 - protein, 1177 aa, Homo sapiens
MWRWIRQQLGFDPPHQSDTRTIYVANRFPQNGLYTPQKFIDNRIISSKYTVWNFVPKNLFEQFRRVANFYFLIIFLVQLMIDTPTSPVTSGLPLFFVITVTAIKQGYEDWLRHNSDNEVNGAPVYVVRSGGLVKTRSKNIRVGDIVRIAKDEIFPADLVLLSSDRLDGSCHVTTASLDGETNLKTHVAVPETALLQTVANLDTLVAVIECQQPEADLYRFMGRMIITQQMEEIVRPLGPESLLLRGARLKNTKEIFGVAVYTGMETKMALNYKSKSQKRSAVEKSMNTFLIIYLVILISEAVISTILKYTWQAEEKWDEPWYNQKTEHQRNSSKILRFISDFLAFLVLYNFIIPISLYVTVEMQKFLGSFFIGWDLDLYHEESDQKAQVNTSDLNEELGQVEYVFTDKTGTLTENEMQFRECSINGMKYQEINGRLVPEGPTPDSSEGNLSYLSSLSHLNNLSHLTTSSSFRTSPENETELIKEHDLFFKAVSLCHTVQISNVQTDCTGDGPWQSNLAPSQLEYYASSPDEKALVEAAARIGIVFIGNSEETMEVKTLGKLERYKLLHILEFDSDRRRMSVIVQAPSGEKLLFAKGAESSILPKCIGGEIEKTRIHVDEFALKGLRTLCIAYRKFTSKEYEEIDKRIFEARTALQQREEKLAAVFQFIEKDLILLGATAVEDRLQDKVRETIEALRMAGIKVWVLTGDKHETAVSVSLSCGHFHRTMNILELINQKSDSECAEQLRQLARRITEDHVIQHGLVVDGTSLSLALREHEKLFMEVCRNCSAVLCCRMAPLQKAKVIRLIKISPEKPITLAVGDGANDVSMIQEAHVGIGIMGKEGRQAARNSDYAIARFKFLSKLLFVHGHFYYIRIATLVQYFFYKNVCFITPQFLYQFYCLFSQQTLYDSVYLTLYNICFTSLPILIYSLLEQHVDPHVLQNKPTLYRDISKNRLLSIKTFLYWTILGFSHAFIFFFGSYLLIGKDTSLLGNGQMFGNWTFGTLVFTVMVITVTVKMALETHFWTWINHLVTWGSIIFYFVFSLFYGGILWPFLGSQNMYFVFIQLLSSGSAWFAIILMVVTCLFLDIIKKVFDRHLHPTSTEKAQLTETNAGIKCLDSMCCFPEGEAACASVGRMLERVIGRCSPTHISRSWSASDPFYTNDRSILTLSTMDSSTC

SEQ ID NO: 5359 - protein, 611 aa, Homo sapiens
MLENYRNLVSVEHQLSKPDVVSQLEEAEDFWPVERGIPQDTIPEYPELQLDPKLDPLPAESPLMNIEVVEVLTLNQEVAGPRNAQIQALYAEDGSLSADAPSEQVQQQGKHPGDPEAARQRFRQFRYKDMTGPREALDQLRELCHQWLQPKARSKEQILELLVLEQFLGALPVKLRTWVESQHPENCQEVVALVEGVTWMSEEEVLPAGQPAEGTTCCLEVTAQQEEKQEDAAICPVTVLPEEPVTFQDVAVDFSREEWGLLGPTQRTEYRDVMLETFGHLVSVGWETTLENKELAPNSDIPEEEPAPSLKVQESSRDCALSSTLEDTLQGGVQEVQDTVLKQMESAQEKDLPQKKHFDNRESQANSGALDTNQVSLQKIDNPESQANSGALDTNQVLLHKIPPRKRLRKRDSQVKSMKHNSRVKIHQKSCERQKAKEGNGCRKTFSRSTKQITFIRIHKGSQVCRCSECGKIFRNPRYFSVHKKIHTGERPYVCQDCGKGFVQSSSLTQHQRVHSGERPFECQECGRTFNDRSAISQHLRTHTGAKPYKCQDCGKAFRQSSHLIRHQRTHTGERPYACNKCGKAFTQSSHLIGHQRTHNRTKRKKKQPTS

SEQ ID NO: 5360 - protein, 756 aa, Homo sapiens
MNGAPSPEDGASPSSPPLPPPPPPSWREFCESHARAAALDFARRFRLYLASHPQYAGPGAEAAFSRRFAELFLQHFEAEVARASGSLSPPILAPLSPGAEISPHDLSLESCRVGGPLAVLGPSRSSEDLAGPLPSSVSSSSTTSSKPKLKKRFSLRSVGRSVRGSVRGILQWRGTVDPPSSAGPLETSSGPPVLGGNSNSNSSGGAGTVGRGLVSDGTSPGERWTHRFERLRLSRGGGALKDGAGMVQREELLSFMGAEEAAPDPAGVGRGGGVAGPPSGGGGQPQWQKCRLLLRSEGEGGGGSRLEFFVPPKASRPRLSIPCSSITDVRTTTALEMPDRENTFVVKVEGPSEYIMETVDAQHVKAWVSDIQECLSPGPCPATSPRPMTLPLAPGTSFLTRENTDSLELSCLNHSESLPSQDLLLGPSESNDRLSQGAYGGLSDRPSASISPSSASIAASHFDSMELLPPELPPRIPIEEGPPTGTVHPLSAPYPPLDTPETATGSFLFQGEPEGGEGDQPLSGYPWFHGMLSRLKAAQLVLTGGTGSHGVFLVRQSETRRGEYVLTFNFQGKAKHLRLSLNEEGQCRVQHLWFQSIFDMLEHFRVHPIPLESGGSSDVVLVSYVPSSQRQQEPTTSHDPPQPPEPPSWTDPPQPGAEEASRAPEVAAAAAAAAKERQEKEKAGGGGVPEELVPVVELVPVVELEEAIAPGSEAQGAGSGGDAGVPPMVQLQQSPLGGDGEEGGHPRAINNQYSFV

SEQ ID NO: 5361 - protein, 545 aa, Homo sapiens
MSSCVSSQPSSNRAAPQDELGGRGSSSSESQKPCEALRGLSSLSIHLGMESFIVVTECEPGCAVDLGLARDRPLEADGQEVPLDTSGSQARPHLSGRKLSLQERSQGGLAAGGSLDMNGRCICPSLPYSPVSSPQSSPRLPRRPTVESHHVSITGMQDCVQLNQYTLKDEIGKGSYGVVKLAYNENDNTYYAMKVLSKKKLIRQAGFPRRPPPRGTRPAPGGCIQPRGPIEQVYQEIAILKKLDHPNVVKLVEVLDDPNEDHLYMVFELVNQGPVMEVPTLKPLSEDQARFYFQDLIKGIEYLHYQKIIHRDIKPSNLLVGEDGHIKIADFGVSNEFKGSDALLSNTVGTPAFMAPESLSETRKIFSGKALDVWAMGVTLYCFVFGQCPFMDERIMCLHSKIKSQALEFPDQPDIAEDLKDLITRMLDKNPESRIVVPEIKILVKTMIRKRSFGNPFEGSRREERSLSAPGNLLTKKPTRECESLSELKEARQRRQPPGHRPAPRGGGGSALVRGSPCVESCWAPAPGSPARMHPLRPEEAMEPE

SEQ ID NO: 5362 - protein, 261 aa, Homo sapiens
MAATAREDGASGQERGQRGCEHYDRGCLLKAPCCDKLYTCRLCHDNNEDHQLDRFKVKEVQCINCEKIQHAQQTCEECSTLFGEYYCDICHLFDKDKKQYHCENCGICRIGPKEDFFHCLKCNLCLAMNLQGRHKCIENVSRQNCPICLEDIHTSRVVAHVLPCGHLLHRTCYEEMLKEGYRCPLCMHSALDMTRYWRQLDDEVAQTPMPSEYQNMTVDILCNDCNGRSTVQFHILGMKCKICESYNTAQAGGRRISLDQQ

SEQ ID NO: 5363 - protein, 337 aa, Homo sapiens
MSSSPVKRQRMESALDQLKQFTTVVADTGDFHAIDEYKPQDATTNPSLILAAAQMPAYQELVEEAIAYGRKLGGSQEDQIKNAIDKLFVLFGAEILKKIPGRVSTEVDARLSFDKDAMVARARRLIELYKEAGISKDRILIKLSSTWEGIQAGKELEEQHGIHCNMTLLFSFAQAVACAEAGVTLISPFVGRILDWHVANTDKKSYEPLEDPGVKSVTKIYNYYKKFSYKTIVMGASFRNTGEIKALAGCDFLTISPKLLGELLQDNAKLVPVLSAKAAQASDLEKIHLDEKSFRWLHNEDQMAVEKLSDGIRKFAADAVKLERMLTERMFNAENGK

SEQ ID NO: 5364 - protein, 69 aa, Homo sapiens
MSVLTPLLLRGLTGSARRLPVPRAKIHSLPPEGKLGIMELAVGLTSCFVTFLLPAGWILSHLETYRRPE

SEQ ID NO: 5365 - protein, 195 aa, Homo sapiens
MAPAASRLRAEAGLGALPRRALAQYLLFLRLYPVLTKAATSGILSALGNFLAQMIEKKRKKENSRSLDVGGPLRYAVYGFFFTGPLSHFFYFFMEHWIPPEVPLAGLRRLLLDRLVFAPAFLMLFFLIMNFLEGKDASAFAAKMRGGFWPALRMNWRVWTPLQFININYVPLKFRVLFANLAALFWYAYLASLGK

SEQ ID NO: 5366 - protein, 390 aa, Homo sapiens
MGEAGAGAGASGGPEASPEAEVVKLLPFLAPGARADLQAAAVRHVLALTGCGPGRALLAGQAALLQALMELAPASAPARDAARALVNLAADPGLHETLLAADPGLPARLMGRALDPQWPWAEEAAAALANLSREPAPCAALMAALAAAEPADSGLERLVRALCTPGYNARAPLHYLAPLLSNLSQRPAARAFLLDPDRCVVQRLLPLTQYPDSSVRRGGVVGTLRNCCFEHRHHEWLLGPEVDILPFLLLPLAGPEDFSEEEMERLPVDLQYLPPDKQREPDADIRKMLVEAIMLLTATAPGRQQVRDQGAYLILRELHSWEPEPDVRTACEKLIQVLIGDEPERGMENLLEVQVPEDVEQQLQQLDCREQEQLERELAPEPWVERATPT

SEQ ID NO: 5367 - protein, 425 aa, Homo sapiens
MGPRRLLLVAACFSLCGPLLSARTRARRPESKATNATLDPRSFLLRNPNDKYEPFWEDEEKNESGLTEYRLVSINKSSPLQKQLPAFISEDASGYLTSSWLTLFVPSVYTGVFVVSLPLNIMAIVVFILKMKVKKPAVVYMLHLATADVLFVSVLPFKISYYFSGSDWQFGSELCRFVTAAFYCNMYASILLMTVISIDRFLAVVYPMQSLSWRTLGRASFTCLAIWALAIAGVVPLLLKEQTIQVPGLNITTCHDVLNETLLEGYYAYYFSAFSAVFFFVPLIISTVCYVSIIRCLSSSAVANRSKKSRALFLSAAVFCIFIICFGPTNVLLIAHYSFLSHTSTTEAAYFAYLLCVCVSSISCCIDPLIYYYASSECQRYVYSILCCKESSDPSSYNSSGQLMASKMDTCSSNLNNSIYKKLLT

SEQ ID NO: 5368 - protein, 2040 aa, Homo sapiens
MEHKEVVLLLLLFLKSAAPEQSHVVQDCYHGDGQSYRGTYSTTVTGRTCQAWSSMTPHQHNRTTENYPNAGLIMNYCRNPDAVAAPYCYTRDPGVRWEYCNLTQCSDAEGTAVAPPTVTPVPSLEAPSEQAPTEQRPGVQECYHGNGQSYRGTYSTTVTGRTCQAWSSMTPHSHSRTPEYYPNAGLIMNYCRNPDAVAAPYCYTRDPGVRWEYCNLTQCSDAEGTAVAPPTVTPVPSLEAPSEQAPTEQRPGVQECYHGNGQSYRGTYSTTVTGRTCQAWSSMTPHSHSRTPEYYPNAGLIMNYCRNPDAVAAPYCYTRDPGVRWEYCNLTQCSDAEGTAVAPPTVTPVPSLEAPSEQAPTEQRPGVQECYHGNGQSYRGTYSTTVTGRTCQAWSSMTPHSHSRTPEYYPNAGLIMNYCRNPDAVAAPYCYTRDPGVRWEYCNLTQCSDAEGTAVAPPTVTPVPSLEAPSEQAPTEQRPGVQECYHGNGQSYRGTYSTTVTGRTCQAWSSMTPHSHSRTPEYYPNAGLIMNYCRNPDAVAAPYCYTRDPGVRWEYCNLTQCSDAEGTAVAPPTVTPVPSLEAPSEQAPTEQRPGVQECYHGNGQSYRGTYSTTVTGRTCQAWSSMTPHSHSRTPEYYPNAGLIMNYCRNPDAVAAPYCYTRDPGVRWEYCNLTQCSDAEGTAVAPPTVTPVPSLEAPSEQAPTEQRPGVQECYHGNGQSYRGTYSTTVTGRTCQAWSSMTPHSHSRTPEYYPNAGLIMNYCRNPDAVAAPYCYTRDPGVRWEYCNLTQCSDAEGTAVAPPTVTPVPSLEAPSEQAPTEQRPGVQECYHGNGQSYRGTYSTTVTGRTCQAWSSMTPHSHSRTPEYYPNAGLIMNYCRNPDPVAAPYCYTRDPSVRWEYCNLTQCSDAEGTAVAPPTITPIPSLEAPSEQAPTEQRPGVQECYHGNGQSYQGTYFITVTGRTCQAWSSMTPHSHSRTPAYYPNAGLIKNYCRNPDPVAAPWCYTTDPSVRWEYCNLTRCSDAEWTAFVPPNVILAPSLEAFFEQALTEETPGVQDCYYHYGQSYRGTYSTTVTGRTCQAWSSMTPHQHSRTPENYPNAGLTRNYCRNPDAEIRPWCYTMDPSVRWEYCNLTQCLVTESSVLATLTVVPDPSTEASSEEAPTEQSPGVQDCYHGDGQSYRGSFSTTVTGRTCQSWSSMTPHWHQRTTEYYPNGGLTRNYCRNPDAEISPWCYTMDPNVRWEYCNLTQCPVTESSVLATSTAVSEQAPTEQSPTVQDCYHGDGQSYRGSFSTTVTGRTCQSWSSMTPHWHQRTTEYYPNGGLTRNYCRNPDAEIRPWCYTMDPSVRWEYCNLTQCPVMESTLLTTPTVVPVPSTELPSEEAPTENSTGVQDCYRGDGQSYRGTLSTTITGRTCQSWSSMTPHWHRRIPLYYPNAGLTRNYCRNPDAEIRPWCYTMDPSVRWEYCNLTRCPVTESSVLTTPTVAPVPSTEAPSEQAPPEKSPVVQDCYHGDGRSYRGISSTTVTGRTCQSWSSMIPHWHQRTPENYPNAGLTENYCRNPDSGKQPWCYTTDPCVRWEYCNLTQCSETESGVLETPTVVPVPSMEAHSEAAPTEQTPVVRQCYHGNGQSYRGTFSTTVTGRTCQSWSSMTPHRHQRTPENYPNDGLTMNYCRNPDADTGPWCFTMDPSIRWEYCNLTRCSDTEGTVVAPPTVIQVPSLGPPSEQDCMFGNGKGYRGKKATTVTGTPCQEWAAQEPHRHSTFIPGTNKWAGLEKNYCRNPDGDINGPWCYTMNPRKLFDYCDIPLCASSSFDCGKPQVEPKKCPGSIVGGCVAHPHSWPWQVSLRTRFGKHFCGGTLISPEWVLTAAHCLKKSSRPSSYKVILGAHQEVNLESHVQEIEVSRLFLEPTQADIALLKLSRPAVITDKVMPACLPSPDYMVTARTECYITGWGETQGTFGTGLLKEAQLLVIENEVCNHYKYICAEHLARGTDSCQGDSGGPLVCFEKDKYILQGVTSWGLGCARPNKPGVYARVSRFVTWIEGMMRNN

SEQ ID NO: 5369 - protein, 629 aa, Homo sapiens
MNQVTIQWDAVIALYILFSWCHGGITNINCSGHIWVEPATIFKMGMNISIYCQAAIKNCQPRKLHFYKNGIKERFQITRINKTTARLWYKNFLEPHASMYCTAECPKHFQETLICGKDISSGYPPDIPDEVTCVIYEYSGNMTCTWNAGKLTYIDTKYVVHVKSLETEEEQQYLTSSYINISTDSLQGGKKYLVWVQAANALGMEESKQLQIHLDDIVIPSAAVISRAETINATVPKTIIYWDSQTTIEKVSCEMRYKATTNQTWNVKEFDTNFTYVQQSEFYLEPNIKYVFQVRCQETGKRYWQPWSSLFFHKTPETVPQVTSKAFQHDTWNSGLTVASISTGHLTSDNRGDIGLLLGMIVFAVMLSILSLIGIFNRSFRTGIKRRILLLIPKWLYEDIPNMKNSNVVKMLQENSELMNNNSSEQVLYVDPMITEIKEIFIPEHKPTDYKKENTGPLETRDYPQNSLFDNTTVVYIPDLNTGYKPQISNFLPEGSHLSNNNEITSLTLKPPVDSLDSGNNPRLQKHPNFAFSVSSVNSLSNTIFLGELSLILNQGECSSPDIQNSVEEETTMLLENDSPSETIPEQTLLPDEFVSCLGIVNEELPSINTYFPQNILESHFNRISLLEK

SEQ ID NO: 5370 - protein, 1101 aa, Homo sapiens
MEQPGAAASGAGGGSEEPGGGRSNKRSAGNRAANEEETKNKPKLNIQIKTLADDVRDRITSFRKSTVKKEKPLIQHPIDSQVAMSEFPAAQPLYDERSLNLSEKEVLDLFEKMMEDMNLNEEKKAPLRNKDFTTKREMVVQYISATAKSGGLKNSKHECTLSSQEYVHELRSGISDEKLLNCLESLRVSLTSNPVSWVNNFGHEGLGLLLDELEKLLDKKQQENIDKKNQYKLIQCLKAFMNNKFGLQRILGDERSLLLLARAIDPKQPNMMTEIVKILSAICIVGEENILDKLLGAITTAAERNNRERFSPIVEGLENQEALQLQVACMQFINALVTSPYELDFRIHLRNEFLRSGLKTMLPDLKEKENDELDIQLKVFDENKEDDLTELSHRLNDIRAEMDDMNEVYHLLYNMLKDTAAENYFLSILQHFLLIRNDYYIRPQYYKIIEECVSQIVLHCSGMDPDFKYRQRLDIDLTHLIDSCVNKAKVEESEQKAAEFSKKFDEEFTARQEAQAELQKRDEKIKELEAEIQQLRTQAQVLSSSSGIPGPPAAPPLPGVGPPPPPPAPPLPGGAPLPPPPPPLPGMMGIPPPPPPPLLFGGPPPPPPLGGVPPPPGISLNLPYGMKQKKMYKPEVSMKRINWSKIEPTELSENCFWLRVKEDKFENPDLFAKLALNFATQIKVQKNAEALEEKKTGPTKKKVKELRILDPKTAQNLSIFLGSYRMPYEDIRNVILEVNEDMLSEALIQNLVKHLPEQKILNELAELKNEYDDLCEPEQFGVVMSSVKMLQPRLSSILFKLTFEEHINNIKPSIIAVTLACEELKKSESFNRLLELVLLVGNYMNSGSRNAQSLGFKINFLCKIRDTKSADQKTTLLHFIADICEEKYRDILKFPEELEHVESASKVSAQILKSNLASMEQQIVHLERDIKKFPQAENQHDKFVEKMTSFTKTAREQYEKLSTMHNNMMKLYENLGEYFIFDSKTVSIEEFFGDLNNFRTLFLEAVRENNKRREMEEKTRRAKLAKEKAEQEKLERQKKKKQLIDINKEGDETGVMDNLLEALQSGAAFRDRRKRIPRNPDNRRVPLERSRSRHNGAISSK

SEQ ID NO: 5371 - protein, 362 aa, Homo sapiens
MAVTITLKTLQQQTFKIRMEPDETVKVLKEKIEAEKGRDAFPVAGQKLIYAGKILSDDVPIRDYRIDEKNFVVVMVTKTKAGQGTSAPPEASPTAAPESSTSFPPAPTSGMSHPPPAAREDKSPSEESAPTTSPESVSGSVPSSGSSGREEDAASTLVTGSEYETMLTEIMSMGYERERVVAALRASYNNPHRAVEYLLTGIPGSPEPEHGSVQESQVSEQPATEAGENPLEFLRDQPQFQNMRQVIQQNPALLPALLQQLGQENPQLLQQISRHQEQFIQMLNEPPGELADISDVEGEVGAIGEEAPQMNYIQVTPQEKEAIERLKALGFPESLVIQAYFACEKNENLAANFLLSQNFDDE

SEQ ID NO: 5372 - protein, 130 aa, Homo sapiens
MSGRGKQGGKARAKAKSRSSRAGLQFPVGRVHRLLRKGNYAERVGAGAPVYLAAVLEYLTAEILELAGNAARDNKKTRIIPRHLQLAIRNDEELNKLLGRVTIAQGGVLPNIQAVLLPKKTESHHKAKGK

SEQ ID NO: 5373 - protein, 206 aa, Homo sapiens
MSTGSVSDPEEMELRGLQREYPVPASKRPPLRGVERSYASPSDNSSAEEEDPDGEEERCALGTAGSAEGCKRKRPRVAGGGGAGGSAGGGGKKPLPAKGSAAECKQSQRNAANARERARMRVLSKAFSRLKTSLPWVPPDTKLSKLDTLRLASSYIAHLRQLLQEDRYENGYVHPVNLTWPFVVSGRPDSDTKEVSAANRLCGTTA

SEQ ID NO: 5374 - protein, 280 aa, Homo sapiens
MVARRRKCAARDPEDRIPSPLGYAAIPIKFSEKQQASHYLYVRAHGVRQGTKSTWPQKRTLFVLNVPPYCTEESLSRLLSTCGLVQSVELQEKPDLAESPKESRSKFFHPKPVPGFQVAYVVFQKPSGVSAALALKGPLLVSTESHPVKSGIHKWISDYADSVPDPEALRVEVDTFMEAYDQKIAEEEAKAKEEEGVPDEEGWVKVTRRGRRPVLPRTEAASLRVLERERRKRSRKELLNFYAWQHRESKMEHLAQLRKKFEEDKQRIELLRAQRKFRPY

SEQ ID NO: 5375 - protein, 494 aa, Homo sapiens
MAWPNVFQRGSLLSQFSHHHVVVFLLTFFSYSLLHASRKTFSNVKVSISEQWTPSAFNTSVELPVEIWSSNHLFPSAEKATLFLGTLDTIFLFSYAVGLFISGIVGDRLNLRWVLSFGMCSSALVVFVFGALTEWLRFYNKWLYCCLWIVNGLLQSTGWPCVVAVMGNWFGKAGRGVVFGLWSACASVGNILGACLASSVLQYGYEYAFLVTASVQFAGGIVIFFGLLVSPEEIGLSGIEAEENFEEDSHRPLINGGENEDEYEPNYSIQDDSSVAQVKAISFYQACCLPGVIPYSLAYACLKLVNYSFFFWLPFYLSNNFGWKEAEADKLSIWYDVGGIIGGTLQGFISDVLQKRAPVLALSLLLAVGSLIGYSRSPNDKSINALLMTVTGFFIGGPSNMISSAISADLGRQELIQRSSEALATVTGIVDGSGSIGAAVGQYLVSLIRDKLGWMWVFYFFILMTSCTIVFISPLIVREIFSLVLRRQAHILRE

SEQ ID NO: 5376 - protein, 255 aa, Homo sapiens
MAFRQALQLAACGLAGGSAAVLFSAVAVGKPRAGGDAEPRPAEPPAWAGGARPGPGVWDPNWDRREPLSLINVRKRNVESGEEELASKLDHYKAKATRHIFLIRHSQYHVDGSLEKDRTLTPLGREQAELTGLRLASLGLKFNKIVHSSMTRAIETTDIISRHLPGVCKVSTDLLREGAPIEPDPPVSHWKPEAVQYYEDGARIEAAFRNYIHRADARQEEDSYEIFICHANVIRYIVCSIPPLLSAGDFVLLGS

SEQ ID NO: 5377 - protein, 448 aa, Homo sapiens
MKGFIDDANYSVGLLDEGTNLGNVIDNYVYEHTLTGKNAFFVGDLGKIVKKHSQWQNVVAQIKPFYTVKCNSAPAVLEILAALGTGFACSSKNEMALVQELGVPPENIIYISPCKQVSQIKYAAKVGVNILTCDNEIELKKIARNHPNAKVLLHIATEDNIGGEEGNMKFGTTLKNCRHLLECAKELDVQIIGVKFHVSSACKESQVYVHALSDARCVFDMAGEIGFTMNMLDIGGGFTGTEFQLEEVNHVISPLLDIYFPEGSGVKIISEPGSYYVSSAFTLAVNIIAKKVVENDKFPSGVEKTGSDEPAFMYYMNDGVYGSFASKLSEDLNTIPEVHKKYKEDEPLFTSSLWGPSCDELDQIVESCLLPELNVGDWLIFDNMGADSFHEPSAFNDFQRPAIYYMMSFSDWYEMQDAGITSDSMMKNFFFVPSCIQLSQEDSFSAEA

SEQ ID NO: 5378 - protein, 215 aa, Homo sapiens
MDKVQSGFLILFLFLMECQLHLCLPYADGLHPTGNITGLPGSKRSQPPRNITKEPKVFFHKTQLPGIQGAASRSTAASPTNPMKFLRNKAIIRHRPALVKVILISSVAFSIALICGMAISYMIYRLAQAEERQQLESLYKNLRIPLLGDEEEGSEDEGESTHLLPENENELEKFIHSVIISKRSKNIKKKLKEEQNSVTENKTKNASHNGKMEDL

SEQ ID NO: 5379 - protein, 1064 aa, Homo sapiens
MMKFRFRRQGADPQREKLKQELFAFNKTVEHGFPNQPSALAFDPELRIMAIGTRSGAVKIYGAPGVEFTGLHRDAATVTQMHFLTGQGRLLSLLDDSSLHLWEIVHHNGCAHLEEALSFQLPSRPGFDGASAPLSLTRVTVVLLVAASDIAALGTEGSSVFFLDVTTLTLLEGQTLAPGEVLRSVPDDYRCGKALGPVESLQGHLRDPTKILIGYSRGLLVIWNQASQCVDHIFLGNQQLESLCWGRDSSTVVSSHSDGSYAVWSVDAGSFPTLQPTVATTPYGPFPCKAINKILWRNCESGGHFIIFSGGMPRASYGDRHCVSVLRAETLVTLDFTSRIIDFFTVHSTRPEDEFDDPQALAVLLEEELVVLDLQTPGWPAVPAPYLAPLHSSAITCSAHVASVPAKLWARIVSAGEQQSPQPVSSALSWPITGGRNLAQEPSQRGLLLTGHEDGTVRFWDASGVALRPLYKLSTAGLFQTDCEHADSLAQAAEDDWPPFRKVGCFDPYSDDPRLGVQKVALCKYTAQMVVAGTAGQVLVLELSDVPVEQAVSVAIIDLLQDREGFTWKGHERLSPRTGPLPWPAGFQPRVLVQCLPPAAVTAVTLHTEWSLVAFGTSHGFGLFDYQRKSPVLARCTLHPNDSLAMEGPLSRVKSLKKSLRQSFRRIRKSRVSGKKRAANASSKLQEANAQLAEQACPHDVEMTPVQRRIEPRSADDSLSGVVRCLYFADTFLRDGAHHGPTMWAGTNSGSVFAYALEVPAAAVGGEKRPEQAVEAVLGKEVQLMHRAPVVAIAVLDGRGRPLPEPYEASRDLAQAPDMQGGHAVLIASEEQFKVFTLPKVSAKTKFKLTAHEGCRVRKVALATFASVACEDYAETCLACLTNLGDVHVFSVPGLRPQVHYSCIRKEDISGIASCVFTRHGQGFYLISPSEFERFSLSARNITEPLCSLDINWPRDATQASYRIRESPKLSQANGTPSILLAPQSLDGSPDPAHSMGPDTPEPPEAALSPMSIDSATSADTTLDTTGDVTVEDVKDFLGSSEESEKNLRNLAEDEAHACAILIK

SEQ ID NO: 5380 - protein, 623 aa, Homo sapiens
MEHAVAPCVLYPGTEPGAAGESESEGAASPAQTPCSLGASLCFSSGEESPPQSLASAAEGAATSPPSSGGPRVVERQWEAGSAGAASPEELASPEERACPEEPAAPSPEPRVWLEDPASPEEPGEPAPVPPGFGAVYGEPDLVLEVSGRRLRAHKAVLAARSDYFRARASRDVLRVQGVSLTALRLLLADAYSGRMAGVRPDNVAEVVAGARRLQLPGAAQRATDAVGPQLSLANCYEVLSAAKRQRLNELRDAAYCFMSDHYLEVLREPAVFGRLSGAERDLLLRRRLRAGRAHLLAAALGPAGERAGSRPQSPSGDADARGDAAVYCFHAAAGEWRELTRLPEGAPARGCGLCVLYNYLFVAGGVAPAGPDGRARPSDQVFCYNPATDSWSAVRPLRQARSQLRLLALDGHLYAVGGECLLSVERYDPRADRWAPVAPLPRGAFAVAHEATTCHGEIYVSGGSLFYRLLKYDPRRDEWQECPCSSSRERSADMVALDGFIYRFDLSGSRGEAQAAGPSGVSVSRYHCLAKQWSPCVAPLRLPGGPTGLQPFRCAALDGAIYCVSRAGTWRFQPAREGEAGGDAGQGGGFEALGAPLDVRGVLIPFALSLPEKPPRGEQGAP

SEQ ID NO: 5381 - protein, 196 aa, Homo sapiens
MGSEQSSEAESRPNDLNSSVTPSPAKHRAKMDDIVVVAQGSQASRNVSNDPDVIKLQEIPTFQPLLKGLLSGQTSPTNAKLEKLDSQQVLQLCLRYQDHLHQCAEAVAFDQNALVKRIKEMDLSVETLFSFMQERQKRYAKYAEQIQKVNEMSAILRRIQMGIDQTVPLLDRLNSMLPEGERLEPFSMKPDRELRL

SEQ ID NO: 5382 - protein, 229 aa, Homo sapiens
MWAAGRWGPTFPSSYAGFSADCRPRSRPSSDSCSVPMTGARGQGLEVVRSPSPPLPLSCSNSTRSLLSPLGHQSFQFDEDDGDGEDEEDVDDEEDVDEDAHDSEAKVASLRGMELQGCASTQVESENNQEEQKQVRLPESRLTPWEVWFIGKEKEERDRLQLKALEELNQQLEKRKEMEEREKRKIIAEEKHKEWVQKKNEQVRRGKWIHTLTSLLQNISSYYTSLPRF

SEQ ID NO: 5383 - protein, 775 aa, Homo sapiens
MASRAVVRARRCPQCPQVRAAAAAPAWAALPLSRSLPPCSNSSSFSMPLFLLLLLVLLLLLEDAGAQQGDGCGHTVLGPESGTLTSINYPQTYPNSTVCEWEIRVKMGERVRIKFGDFDIEDSDSCHFNYLRIYNGIGVSRTEIGKYCGLGLQMNHSIESKGNEITLLFMSGIHVSGRGFLASYSVIDKQDLITCLDTASNFLEPEFSKYCPAGCLLPFAEISGTIPHGYRDSSPLCMAGVHAGVVSNTLGGQISVVISKGIPYYESSLANNVTSVVGHLSTSLFTFKTSGCYGTLGMESGVIADPQITASSVLEWTDHTGQENSWKPKKARLKKPGPPWAAFATDEYQWLQIDLNKEKKITGIITTGSTMVEHNYYVSAYRILYSDDGQKWTVYREPGVEQDKIFQGNKDYHQDVRNNFLPPIIARFIRVNPTQWQQKIAMKMELLGCQFIPKGRPPKLTQPPPPRNSNDLKNTTAPPKIAKGRAPKFTQPLQPRSSNEFPAQTEQTTASPDIRNTTVTPNVTKDVALAAVLVPVLVMVLTTLILILVCAWHWRNRKKKTEGTYDLPYWDRAGWWKGMKQFLPAKAVDHEETPVRYSSSEVNHLSPREVTTVLQADSAEYAQPLVGGIVGTLHQRSTFKPEEGKEAGYADLDPYNSPGQEVYHAYAEPLPITGPEYATPIIMDMSGHPTTSVGQPSTSTFKATGNQPPPLVGTYNTLLSRTDSCSSAQAQYDTPKAGKPGLPAPDELVYQVPQSTQEVSGAGRDGECDVFKEIL

SEQ ID NO: 5384 - protein, 514 aa, Homo sapiens
MADYLISGGTSYVPDDGLTAQQLFNCGDGLTYNDFLILPGYIDFTADQVDLTSALTKKITLKTPLVSSPMDTVTEAGMAIAMALTGGIGFIHHNCTPEFQANEVRKVKKYEQGFITDPVVLSPKDRVRDVFEAKARHGFCGIPITDTGRMGSRLVGIISSRDIDFLKEEEHDCFLEEIMTKREDLVVAPAGITLKEANEILQRSKKGKLPIVNEDDELVAIIARTDLKKNRDYPLASKDAKKQLLCGAAIGTHEDDKYRLDLLAQAGVDVVVLDSSQGNSIFQINMIKYIKDKYPNLQVIGGNVVTAAQAKNLIDAGVDALRVGMGSGSICITQEVLACGRPQATAVYKVSEYARRFGVPVIADGGIQNVGHIAKALALGASTVMMGSLLAATTEAPGEYFFSDGIRLKKYRGMGSLDAMDKHLSSQNRYFSEADKIKVAQGVSGAVQDKGSIHKFVPYLIAGIQHSCQDIGAKSLTQVRAMMYSGELKFEKRTSSAQVEGGVHSLHSYEKRLF

SEQ ID NO: 5385 - protein, 726 aa, Homo sapiens
MSPAPDAAPAPASISLFDLSADAPVFQGLSLVSHAPGEALARAPRTSCSGSGERESPERKLLQGPMDISEKLFCSTCDQTFQNHQEQREHYKLDWHRFNLKQRLKDKPLLSALDFEKQSSTGDLSSISGSEDSDSASEEDLQTLDRERATFEKLSRPPGFYPHRVLFQNAQGQFLYAYRCVLGPHQDPPEEAELLLQNLQSRGPRDCVVLMAAAGHFAGAIFQGREVVTHKTFHRYTVRAKRGTAQGLRDARGGPSHSAGANLRRYNEATLYKDVRDLLAGPSWAKALEEAGTILLRAPRSGRSLFFGGKGAPLQRGDPRLWDIPLATRRPTFQELQRVLHKLTTLHVYEEDPREAVRLHSPQTHWKTVREERKKPTEEEIRKICRDEKEALGQNEESPKQGSGSEGEDGFQVELELVELTVGTLDLCESEVLPKRRRRKRNKKEKSRDQEAGAHRTLLQQTQEEEPSTQSSQAVAAPLGPLLDEAKAPGQPELWNALLAACRAGDVGVLKLQLAPSPADPRVLSLLSAPLGSGGFTLLHAAAAAGRGSVVRLLLEAGADPTVQDSRARPPYTVAADKSTRNEFRRFMEKNPDAYDYNKAQVPGPLTPEMEARQATRKREQKAARRQREEQQQRQQEQEEREREEQRRFAALSDREKRALAAERRLAAQLGAPTSPIPDSAIVNTRRCWSCGASLQGLTPFHYLDFSFCSTRCLQDHRRQAGRPSS

SEQ ID NO: 5386 - protein, 198 aa, Homo sapiens
MALPVTALLLPLALLLHAARPSQFRVSPLDRTWNLGETVELKCQVLLSNPTSGCSWLFQPRGAAASPTFLLYLSQNKPKAAEGLDTQRFSGKRLGDTFVLTLSDFRRENEGYYFCSALSNSIMYFSHFVPVFLPAKPTTTPAPRPPTPAPTIASQPLSLRPEACRPAAGGAGNRRRVCKCPRPVVKSGDKPSLSARYV

SEQ ID NO: 5387 - protein, 1001 aa, Homo sapiens
MIFPVARYALRWLRRPEDRAFSRAAMEMALRGVRKVLCVAEKNDAAKGIADLLSNGRMRRREGLSKFNKIYEFDYHLYGQNVTMVMTSVSGHLLAHDFQMQFRKWQSCNPLVLFEAEIEKYCPENFVDIKKTLERETRQCQALVIWTDCDREGENIGFEIIHVCKAVKPNLQVLRARFSEITPHAVRTACENLTEPDQRVSDAVDVRQELDLRIGAAFTRFQTLRLQRIFPEVLAEQLISYGSCQFPTLGFVVERFKAIQAFVPEIFHRIKVTHDHKDGIVEFNWKRHRLFNHTACLVLYQLCVEDPMATVVEVRSKPKSKWRPQALDTVELEKLASRKLRINAKETMRIAEKLYTQGYISYPRTETNIFPRDLNLTVLVEQQTPDPRWGAFAQSILERGGPTPRNGNKSDQAHPPIHPTKYTNNLQGDEQRLYEFIVRHFLACCSQDAQGQETTVEIDIAQERFVAHGLMILARNYLDVYPYDHWSDKILPVYEQGSHFQPSTVEMVDGETSPPKLLTEADLIALMEKHGIGTDATHAEHIETIKARMYVGLTPDKRFLPGHLGMGLVEGYDSMGYEMSKPDLRAELEADLKLICDGKKDKFVVLRQQVQKYKQVFIEAVAKAKKLDEALAQYFGNGTELAQQEDIYPAMPEPIRKCPQCNKDMVLKTKKNGGFYLSCMGFPECRSAVWLPDSVLEASRDSSVCPVCQPHPVYRLKLKFKRGSLPPTMPLEFVCCIGGCDDTLREILDLRFSGGPPRASQPSGRLQANQSLNRMDNSQHPQPADSRQTGSSKALAQTLPPPTAAGESNSVTCNCGQEAVLLTVRKEGPNRGRQFFKCNGGSCNFFLWADSPNPGAGGPPALAYRPLGASLGCPPGPGIHLGGFGNPGDGSGSGTSCLCSQPSVTRTVQKDGPNKGRQFHTCAKPREQQCGFFQWVDENTAPGTSGAPSWTGDRGRTLESEARSKRPRASSSDMGSTAKKPRKCSLCHQPGHTRPFCPQNR

SEQ ID NO: 5388 - protein, 516 aa, Homo sapiens
MEESHFNSNPYFWPSIPTVSGQIENTMFINKMKDQLLPEKGCGLAPPHYPTLLTVPASVSLPSGISMDTESKSDQLTPHSQASVTQNITVVPVPSTGLMTAGVSCSQRWRREGSQSRGPGLVITSPSGSLVTTASSAQTFPISAPMIVSALPPGSQALQVVPDLSKKVASTLTEEGGGGGGGGGSVAPKPPRGRKKKRMLESGLPEMNDPYVLSPEDDDDHQKDGKTYRCRMCSLTFYSKSEMQIHSKSHTETKPHKCPHCSKTFANSSYLAQHIRIHSGAKPYSCNFCEKSFRQLSHLQQHTRIHTGDRPYKCAHPGCEKAFTQLSNLQSHRRQHNKDKPFKCHNCHRAYTDAASLEVHLSTHTVKHAKVYTCTICSRAYTSETYLMKHMRKHNPPDLQQQVQAAAAAAAVAQAQAQAQAQAQAQAQAQAQAQASQASQQQQQQQQQQQQQQQQPPPHFQSPGAAPQGGGGGDSNPNPPPQCSFDLTPYKTAEHHKDICLTVTTSTIQVEHLASS

SEQ ID NO: 5389 - protein, 220 aa, Homo sapiens
MASERLPNRPACLLVASGAAEGVSAQSFLHCFTMASTAFNLQVATPGGKAMEFVDVTESNARWVQDFRLKAYASPAKLESIDGARYHALLIPSCPGALTDLASSGSLARILQHFHSESKPICAVGHGVAALCCATNEDRSWVFDSYSLTGPSVCELVRAPGFARLPLVVEDFVKDSGACFSASEPDAVHVVLDRHLVTGQNASSTVPAVQNLLFLCGSRK

SEQ ID NO: 5390 - protein, 805 aa, Homo sapiens
MAFSPWQILSPVQWAKWTWSAVRGGAAGEDEAGGPEGDPEEEDSQAETKSLSFSSDSEGNFETPEAETPIRSPFKESCDPSLGLAGPGAKSQESQEADEQLVAEVVEKCSSKTCSKPSENEVPQQAIDSHSVKNFREEPEHDFSKISIVRPFSIETKDSTDISAVLGTKAAHGCVTAVSGKALPSSPPDALQDEAMTEGSMGVTLEASAEADLKAGNSCPELVPSRRSKLRKPKPVPLRKKAIGGEFSDTNAAVEGTPLPKASYHFSPEELDENTSPLLGDARFQKSPPDLKETPGTLSSDTNDSGVELGEESRSSPLKLEFDFTEDTGNIEARKALPRKLGRKLGSTLTPKIQKDGISKSAGLEQPTDPVARDGPLSQTSSKPDPSQWESPSFNPFGSHSVLQNSPPLSSEGSYHFDPDNFDESMDPFKPTTTLTSSDFCSPTGNHVNEILESPKKAKSRLITSGCKVKKHETQSLALDACSRDEGAVISQISDISNRDGHATDEEKLASTSCGQKSAGAEVKGEPEEDLEYFECSNVPVSTINHAFSSSEAGIEKETCQKMEEDGSTVLGLLESSAEKAPVSVSCGGESPLDGICLSESDKTAVLTLIREEIITKEIEANEWKKKYEETRQEVLEMRKIVAEYEKTIAQMIEDEQRTSMTSQKSFQQLTMEKEQALADLNSVERSLSDLFRRYENLKGVLEGFKKNEEALKKCAQDYLARVKQEEQRYQALKIHAEEKLDKANEEIAQVRTKAKAESAALHAGLRKEQMKVESLERALQQKNQEIEELTKICDELIAKLGKTD

SEQ ID NO: 5391 - protein, 1058 aa, Homo sapiens
MDLGPLNICEEMTILHGGFLLAEQLFHPKALAELTKSDWERVGRPIVEALREISSAAAHSQPFAWKKKALIIIWAKVLQPHPVTPSDTETRWQEDLFFSVGNMIPTINHTILFELLKSLEASGLFIQLLMALPTTICHAELERFLEHVTVDTSAEDVAFFLDVWWEVMKHKGHPQDPLLSQFSAMAHKYLPALDEFPHPPKRLRSDPDACPTMPLLAMLLRGLTQIQSRILGPGRKCCALANLADMLTVFALTEDDPQEVSATVYLDKLATVISVWNSDTQNPYHQQALAEKVKEAERDVSLTSLAKLPSETIFVGCEFLHHLLREWGEELQAVLRSSQGTSYDSYRLCDSLTSFSQNATLYLNRTSLSKEDRQVVSELAECVRDFLRKTSTVLKNRALEDITASIAMAVIQQKMDRHMEVCYIFASEKKWAFSDEWVACLGSNRALFRQPDLVLRLLETVIDVSTADRAIPESQIRQVIHLILECYADLSLPGKNKVLAGILRSWGRKGLSEKLLAYVEGFQEDLNTTFNQLTQSASEQGLAKAVASVARLVIVHPEVTVKKMCSLAVVNLGTHKFLAQILTAFPALRFVEEQGPNSSATFMVSCLKETVWMKFSTPKEEKQFLELLNCLMSPVKPQGIPVAALLEPDEVLKEFVLPFLRLDVEEVDLSLRIFIQTLEANACREEYWLQTCSPFPLLFSLCQLLDRFSKYWQLPKEKRCLSLDRKDLAIHILELLCEIVSANAETFSPDVWIKSLSWLHRKLEQLDWTVGLRLKSFFEGHFKCEVPATLFEICKLSEDEWTSQAHPGYGAGTGLLAWMECCCVSSGISERMLSLLVVDVGNPEEVRLFSKGFLVALVQVMPWCSPQEWQRLHQLTRRLLEKQLLHVPYSLEYIQFVPLLNLKPFAQELQLSVLFLRTFQFLCSHSCRDWLPLEGWNHVVKLLCGSLTRLLDSVRAIQAAGPWVQGPEQDLTQEALFVYTQVFCHALHIMAMLHPEVCEPLYVLALETLTCYETLSKTNPSVSSLLQRAHEQRFLKSIAEGIGPEERRQTLLQKMSSF

SEQ ID NO: 5392 - protein, 1054 aa, Homo sapiens
MLQKREKVLLLRTFQGRTLRIVREHYLRPCVPCHSPLCPQPAACSHDGKLLSSDVTHYVIPDWKVVQDYLEILEFPELKGIIFMQTACQAVQHQRGRRQYNKLRNLLKDARHDCILFANEFQQCCYLPRERGESMEKWQTRSIYNAAVWYYHHCQDRMPIVMVTEDEEAIQQYGSETEGVFVITFKNYLDNFWPDLKAAHELCDSILQSRRERENESQESHGKEYPEHLPLEVLEAGIKSGRYIQGILNVNKHRAQIEAFVRLQGASSKDSDLVSDILIHGMKARNRSIHGDVVVVELLPKNEWKGRTVALCENDCDDKASGESPSEPMPTGRVVGILQKNWRDYVVTFPSKEEVQSQGKNAQKILVTPWDYRIPKIRISTQQAETLQDFRVVVRIDSWESTSVYPNGHFVRVLGRIGDLEGEIATILVENSISVIPFSEAQMCEMPVNTPESPWKVSPEEEQKRKDLRKSHLVFSIDPKGCEDVDDTLSVRTLNNGNLELGVHIADVTHFVAPNSYIDIEARTRATTYYLADRRYDMLPSVLSADLCSLLGGVDRYAVSIMWELDKASYEIKKVWYGRTIIRSAYKLFYEAAQELLDGNLSVVDDIPEFKDLDEKSRQAKLEELVWAIGKLTDIARHVRAKRDGCGALELEGVEVCVQLDDKKNIHDLIPKQPLEVHETVAECMILANHWVAKKIWESFPHQALLRQHPPPHQEFFSELRECAKAKGFFIDTRSNKTLADSLDNANDPHDPIVNRLLRSMATQAMSNALYFSTGSCAEEEFHHYGLALDKYTHFTSPIRRYSDIVVHRLLMAAISKDKKMEIKGNLFSNKDLEELCRHINNRNQAAQHSQKQSTELFQCMYFKDKDPATEERCISDGVIYSIRTNGVLLFIPRFGIKGAAYLKNKDGLVISCGPDSCSEWKPGSLQRFQNKITSTTTDGESVTFHLFDHVTVRISIQASRCHSDTIRLEIISNKPYKIPNTELIHQSSPLLKSELVKEVTKSVEEAQLAQEVKVNIIQEEYQEYRQTKGRSLYTLLEEIRDLALLDVSNNYGI

SEQ ID NO: 5393 - protein, 131 aa, Homo sapiens
MDPRLPAWALVLLGPALVFALGPAPTPEMREKLCGHHFVRALVRVCGGPRWSTEARRPATGGDRELLQWLERRHLLHGLVADSNLTLGPGLQPLPQTSHHHRHHRAAATNPARYCCLSGCTQQDLLTLCPY

SEQ ID NO: 5394 - protein, 1641 aa, Homo sapiens
MTESSMKKLASTLLDAITDKDPLVQEQVCSALCSLGEARPVETLRACEEYLRQHDKLAHPYRAAVLRAMERVLSSRASELDKDTASTIILLASSEMTKTKDLVWDWQQAASGVLVAVGRQFISKVMEELLRRLHPGTLPHCAVLHTLASLSVANAFGVVPFLPSVLSSLLPVLGVAKQDTVRVAFCSALQRFSEGALEYLANLDRAPDPTVRKDAFATDIFSAYDVLFHQWLQSREAKLRLAVVEALGPMSHLLPSERLEEQLPKLLPGILALYKKHAETFYLSKSLGQILEAAVSVGSRTLETQLDALLAALHSQICVPVESSSPLVMSNQKEVLRCFTVLACSSPDRLLAFLLPRLDTSNERTRVGTLQVVRHVINSAAAQMEDKKPFILSSMRLPLLDTNSKVKRAVVQVISAMAHHGYLEQPGGEAMIEYIVQQCALPPEQEPEKPGPGSKDPKADSVRAISVRTLYLVSTTVDRMSHVLWPYLLQFLTPVRFTGALTPLCRSLVHLAQKRQEAGADAFLIQYDAHASLPSPYAVTGRLLVVSSSPYLGDGRGAAALRLLSVLHPNIHPLLGQHWETTVPLLLGYLDEHTEETLPQEEWEEKLLMFLRDTLAIISDNAWICQLSLELCRQLPCYDEAPQEKNFLYKCIGTTLGAASSKEVVRKHLQELLETARYQEEAEREGLACCFGICAISHLEDTLAQLEDFVRSEVFRKSIGILNIFKDRSENEVEKVKSALILCYGHVAARAPRELVLAKVESDILRNICQHFSTKVLGIKVETKDPALKLCLVQSVCMVSRAICSSTQAGSFHFTRKAELVAQMMEFIRAEPPDSLRTPIRKKAMLTCTYLVSVEPALDEQARADVIHGCLHSIMALLPEPKEEDGGCQKSLYLETLHALEDLLTSLLQRNMTPQGLQIMIEHLSPWIKSPRGHERARALGLSALLLRYFLEHLRVSALVPFHNLGLLIGLFSPRCADLWPATRQEAVDCVYSLLYLQLGYEGFSRDYRDDVAERLLSLKDGLVHPDPAILFHTCHSVGQIIAKRLPPDQLISLLLTMFEALGDPEKNCSRAATVMINCLLQERGGVLQEKVPEIVSVLRSKLQEAQGEHVLPAAQHSVYLLATQHCAAVVSSLLGSPLPLDSHTCMLWRALAVEPRLAAQVLGLLLEKMSRDVPFKESRAFLLGRTPDRVATLLPLSATCALFEVMSTPAAGPAVLELYPQLFVVLLLRVSCTVGVQLPRNLQAQERRGASPALATRNLEPCSSAVDTLRSMLLRSGSEDVVQRMDLEGGWELLRTSAGHEEGATRLARAMAEHAGPRLPLVLKTLACTHSSAYENQRVTTTAFLAELLNSNVANDLMLLDSLLESLAARQKDTCASVRRLVLRGLANLASGCPDKVRTHGPQLLTAMIGGLDDGDNPHSPVALEAMLGLARLVHLVESWDLRSGLLHVAIRIRPFFDSEKMEFRTASIRLFGHLNKVCHGDCEDVFLDQVVGGLAPLLLHLQDPQATVASACRFALRMCGPNLACEELSAAFQKHLQEGRALHFGEFLNTTCKHLMHHFPDLLGRLLTTCLFYFKSSWENVRAAAPLFTGFLVLHSEPRQQPQVDLDQLIAALQILLKDPAPEVRTRAAEALGRLVKLA

SEQ ID NO: 5395 - protein, 126 aa, Homo sapiens
MPEPAKSAPAPKKGSKKAVTKAQKKDGKKRKRSRKESYSVYVYKVLKQVHPDTGISSKAMGIMNSFVNDIFERIAGEASRLAHYNKRSTITSREIQTAVRLLLPGELAKHAVSEGTKAVTKYTSSK

SEQ ID NO: 5396 - protein, 596 aa, Homo sapiens
MSNYSVSLVGPAPWGFRLQGGKDFNMPLTISSLKDGGKAAQANVRIGDVVLSIDGINAQGMTHLEAQNKIKGCTGSLNMTLQRASAAPKPEPVPVQKGEPKEVVKPVPITSPAVSKVTSTNNMAYNKAPRPFGSVSSPKVTSIPSPSSAFTPAHATTSSHASPSPVAAVTPPLFAASGLHANANLSADQSPSALSAGKTAVNVPRQPTVTSVCSETSQELAEGQRRGSQGDSKQQNGPPRKHIVERYTEFYHVPTHSDASKKRLIEDTEDWRPRTGTTQSRSFRILAQITGTEHLKESEADNTKKANNSQEPSPQLASSVASTRSMPESLDSPTSGRPGVTSLTAAAAFKPVGSTGVIKSPSWQRPNQGVPSTGRISNSATYSGSVAPANSALGQTQPSDQDTLVQRAEHIPAGKRTPMCAHCNQVIRGPFLVALGKSWHPEEFNCAHCKNTMAYIGFVEEKGALYCELCYEKFFAPECGRCQRKILGEVISALKQTWHVSCFVCVACGKPIRNNVFHLEDGEPYCETDYYALFGTICHGCEFPIEAGDMFLEALGYTWHDTCFVCSVCCESLEGQTFFSKKDKPLCKKHAHSVNF

SEQ ID NO: 5397 - protein, 244 aa, Homo sapiens
MGSPRSALSCLLLHLLVLCLQAQEGPGRGPALGRELASLFRAGREPQGVSQQVTVQSSPNFTQHVREQSLVTDQLSRRLIRTYQLYSRTSGKHVQVLANKRINAMAEDGDPFAKLIVETDTFGSRVRVRGAETGLYICMNKKGKLIAKSNGKGKDCVFTEIVLENNYTALQNAKYEGWYMAFTRKGRPRKGSKTRQHQREVHFMKRLPRGHHTTEQSLRFEFLNYPPFTRSLRGSQRTWAPEPR

SEQ ID NO: 5398 - protein, 273 aa, Homo sapiens
MAFLAGPRLLDWASSPPHLQFNKFVLTGYRPASSGSGCLRSLFYLHNELGNIYTHGLALLGFLVLVPMTMPWGQLGKDGWLGGTHCVACLAPPAGSVLYHLFMCHQGGSAVYARLLALDMCGVCLVNTLGALPIIHCTLACRPWLRPAALVGYTVLSGVAGWRALTAPSTSARLRAFGWQAAARLLVFGARGVGLGSGAPGSLPCYLRMDALALLGGLVNVARLPERWGPGRFDYWGNSHQIMHLLSVGSILQLHAGVVPDLLWAAHHACPRD

SEQ ID NO: 5399 - protein, 1151 aa, Homo sapiens
MRKFNIRKVLDGLTAGSSSASQQQQQQHPPGNREPEIQETLQSEHFQLCKTVRHGFPYQPSALAFDPVQKILAVGTQTGALRLFGRPGVECYCQHDSGAAVIQLQFLINEGALVSALADDTLHLWNLRQKRPAILHSLKFCRERVTFCHLPFQSKWLYVGTERGNIHIVNVESFTLSGYVIMWNKAIELSSKSHPGPVVHISDNPMDEGKLLIGFESGTVVLWDLKSKKADYRYTYDEAIHSVAWHHEGKQFICSHSDGTLTIWNVRSPAKPVQTITPHGKQLKDGKKPEPCKPILKVEFKTTRSGEPFIILSGGLSYDTVGRRPCLTVMHGKSTAVLEMDYSIVDFLTLCETPYPNDFQEPYAVVVLLEKDLVLIDLAQNGYPIFENPYPLSIHESPVTCCEYFADCPVDLIPALYSVGARQKRQGYSKKEWPINGGNWGLGAQSYPEIIITGHADGSVKFWDASAITLQVLYKLKTSKVFEKSRNKDDRPNTDIVDEDPYAIQIISWCPESRMLCIAGVSAHVIIYRFSKQEVITEVIPMLEVRLLYEINDVETPEGEQPPPLPTPVGGSNPQPIPPQSHPSTSSSSSDGLRDNVPCLKVKNSPLKQSPGYQTELVIQLVWVGGEPPQQITSLAVNSSYGLVVFGNCNGIAMVDYLQKAVLLNLGTIELYGSNDPYRREPRSPRKSRQPSGAGLCDISEGTVVPEDRCKSPTSGSSSPHNSDDEQKMNNFIEKVKTKSRKFSKMVANDIAKMSRKLSLPTDLKPDLDVKDNSFSRSRSSSVTSIDKESREAISALHFCETFTRKTDSSPSPCLWVGTTLGTVLVIALNLPPGGEQRLLQPVIVSPSGTILRLKGAILRMAFLDTTGCLIPPAYEPWREHNVPEEKDEKEKLKKRRPVSVSPSSSQEISENQYAVICSEKQAKVISLPTQNCAYKQNITETSFVLRGDIVALSNSICLACFCANGHIMTFSLPSLRPLLDVYYLPLTNMRIARTFCFTNNGQALYLVSPTEIQRLTYSQETCENLQEMLGELFTPVETPEAPNRGFFKGLFGGGAQSLDREELFGESSSGKASRSLAQHIPGPGGIEGVKGAASGVVGELARARLALDERGQKLGDLEERTAAMLSSAESFSKHAHEIMLKYKDKKWYQF

SEQ ID NO: 5400 - protein, 1094 aa, Homo sapiens
MNVNQSVPPVPPFGQPQPIYPGYHQSSYGGQSGSTAPAIPYGAYNGPVPGYQQTPPQGMSRAPPSSGAPPASTAQAPCGQAAYGQFGQGDVQNGPSSTVQMQRLPGSQPFGSPLAPVGNQPPVLQPYGPPPTSAQVATQLSGMQISGAVAPAPPSSGLGFGPPTSLASASGSFPNSGLYGSYPQGQAPPLSQAQGHPGIQTPQRSAPSQASSFTPPASGGPRLPSMTGPLLPGQSFGGPSVSQPNHVSSPPQALPPGTQMTGPLGPLPPMHSPQQPGYQPQQNGSFGPARGPQSNYGGPYPAAPTFGSQPGPPQPLPPKRLDPDAIPSPIQVIEDDRNNRGTEPFVTGVRGQVPPLVTTNFLVKDQGNASPRYIRCTSYNIPCTSDMAKQAQVPLAAVIKPLARLPPEEASPYVVDHGESGPLRCNRCKAYMCPFMQFIEGGRRFQCCFCSCINDVPPQYFQHLDHTGKRVDAYDRPELSLGSYEFLATVDYCKNNKFPSPPAFIFMIDVSYNAIRTGLVRLLCEELKSLLDFLPREGGAEESAIRVGFVTYNKVLHFYNVKSSLAQPQMMVVSDVADMFVPLLDGFLVNVNESRAVITSLLDQIPEMFADTRETETVFVPVIQAGMEALKAAECAGKLFLFHTSLPIAEAPGKLKNRDDRKLINTDKEKTLFQPQTGAYQTLAKECVAQGCCVDLFLFPNQYVDVATLSVVPQLTGGSVYKYASFQVENDQERFLSDLRRDVQKVVGFDAVMRVRTSTGIRAVDFFGAFYMSNTTDVELAGLDGDKTVTVEFKHDDRLNEESGALLQCALLYTSCAGQRRLRIHNLALNCCTQLADLYRNCETDTLINYMAKFAYRGVLNSPVKAVRDTLITQCAQILACYRKNCASPSSAGQLILPECMKLLPVYLNCVLKSDVLQPGAEVTTDDRAYVRQLVTSMDVTETNVFFYPRLLPLTKSPVESTTEPPAVRASEERLSNGDIYLLENGLNLFLWVGASVQQGVVQSLFSVSSFSQITSGLSVLPVLDNPLSKKVRGLIDSLRAQRSRYMKLTVVKQEDKMEMLFKHFLVEDKSLSGGASYVDFLCHMHKEIRQLLS

SEQ ID NO: 5401 - protein, 491 aa, Homo sapiens
MALLWGLLVLSWSCLQGPCSVFSPVSAMEPLGRQLTSGPNQEQVSPLTLLKLGNQEPGGQTALKSPPGVCSRDPTPEQTHRLARAMMAFTADLFSLVAQTSTCPNLILSPLSVALALSHLALGAQNHTLQRLQQVLHAGSGPCLPHLLSRLCQDLGPGAFRLAARMYLQKGFPIKEDFLEQSEQLFGAKPVSLTGKQEDDLANINQWVKEATEGKIQEFLSGLPEDTVLLLLNAIHFQGFWRNKFDPSLTQRDSFHLDEQFTVPVEMMQARTYPLRWFLLEQPEIQVAHFPFKNNMSFVVLVPTHFEWNVSQVLANLSWDTLHPPLVWERPTKVRLPKLYLKHQMDLVATLSQLGLQELFQAPDLRGISEQSLVVSGVQHQSTLELSEVGVEAAAATSIAMSRMSLSSFSVNRPFLFFIFEDTTGLPLFVGSVRNPNPSAPRELKEQQDSPGNKDFLQSLKGFPRGDKLFGPDLKLVPPMEEDYPQFGSPK

SEQ ID NO: 5402 - protein, 422 aa, Homo sapiens
MAPWPPKGLVPAMLWGLSLFLNLPGPIWLQPSPPPQSSPPPQPHPCHTCRGLVDSFNKGLERTIRDNFGGGNTAWEEENLSKYKDSETRLVEVLEGVCSKSDFECHRLLELSEELVESWWFHKQQEAPDLFQWLCSDSLKLCCPAGTFGPSCLPCPGGTERPCGGYGQCEGEGTRGGSGHCDCQAGYGGEACGQCGLGYFEAERNASHLVCSACFGPCARCSGPEESNCLQCKKGWALHHLKCVDIDECGTEGANCGADQFCVNTEGSYECRDCAKACLGCMGAGPGRCKKCSPGYQQVGSKCLDVDECETEVCPGENKQCENTEGGYRCICAEGYKQMEGICVKEQIPGAFPILTDLTPETTRRWKLGSHPHSTYVKMKMQRDEATFPGLYGKQVAKLGSQSRQSDRGTRLIHSQQASSQR

SEQ ID NO: 5403 - protein, 215 aa, Homo sapiens
MGSPRSALSCLLLHLLVLCLQAQVTVQSSPNFTQHVREQSLVTDQLSRRLIRTYQLYSRTSGKHVQVLANKRINAMAEDGDPFAKLIVETDTFGSRVRVRGAETGLYICMNKKGKLIAKSNGKGKDCVFTEIVLENNYTALQNAKYEGWYMAFTRKGRPRKGSKTRQHQREVHFMKRLPRGHHTTEQSLRFEFLNYPPFTRSLRGSQRTWAPEPR

SEQ ID NO: 5404 - protein, 316 aa, Homo sapiens
MTQGKLSVANKAPGTEGQQQVHGEKKEAPAVPSAPPSYEEATSGEGMKAGAFPPAPTAVPLHPSWAYVDPSSSSSYDNGFPTGDHELFTTFSWDDQKVRRVFVRKVYTILLIQLLVTLAVVALFTFCDPVKDYVQANPGWYWASYAVFFATYLTLACCSGPRRHFPWNLILLTVFTLSMAYLTGMLSSYYNTTSVLLCLGITALVCLSVTVFSFQTKFDFTSCQGVLFVLLMTLFFSGLILAILLPFQYVPWLHAVYAALGAGVFTLFLALDTQLLMGNRRHSLSPEEYIFGALNIYLDIIYIFTFFLQLFGTNRE

SEQ ID NO: 5405 - protein, 211 aa, Homo sapiens
MVFLKFFCMSFFCHLCQGYFDGPLYPEMSNGTLHHYFVPDGDYEENDDPEKCQLLFRVSDHRRCSQGEGSQVGSLLSLTLREEFTVLGRQVEDAGRVLEGISKSISYDLDGEESYGKYLRRESHQIGDAYSNSDKSLTELESKFKQGQEQDSRQESRLNEDFLGMLVHTRSLLKETLDISVGLRDKYELLALTIRSHGTRLGRLKNDYLKV

SEQ ID NO: 5406 - protein, 618 aa, Homo sapiens
MRRDVRILLLGEAQVGKTSLILSLVGEEFPEEVPPRAEEITIPADVTPEKVPTHIVDYSEAEQTDEELREEIHKANVVCVVYDVSEEATIEKIRTKWIPLVNGGTTQGPRVPIILVGNKSDLRSGSSMEAVLPIMSQFPEIETCVECSAKNLRNISELFYYAQKAVLHPTAPLYDPEAKQLRPACAQALTRIFRLSDQDLDQALSDEELNAFQKSCFGHPLAPQALEDVKTVVCRNVAGGVREDRLTLDGFLFLNTLFIQRGRHETTWTILRRFGYSDALELTADYLSPLIHVPPGCSTELNHLGYQFVQRVFEKHDQDRDGALSPVELQSLFSVFPAAPWGPELPRTVRTEAGRLPLHGYLCQWTLVTYLDVRSCLGHLGYLGYPTLCEQDQAHAITVTREKRLDQEKGQTQRSVLLCKVVGARGVGKSAFLQAFLGRGLGHQDTREQPPGYAIDTVQVNGQEKYLILCEVGTDGLLATSLDATCDVACLMFDGSDPKSFAHCASVYKHHYMDGQTPCLFVSSKADLPEGVAVSGPSPAEFCRKHRLPAPVPFSCAGPAEPSTTIFTQLATMAAFPHLVHAELHPSSFWLRGLLGVVGAAVAAVLSFSLYRVLVKSQ

SEQ ID NO: 5407 - protein, 669 aa, Homo sapiens
MSALLSLCFVLPLAAPGHGTQGWEPCTDLRPLDILAEVVPSDGATSGIRIVQVHGARGLQLSVAAPRTMSFPASRIFSQCDLFPEEFSIVVTLRVPNLPPKRNEYLLTVVAEESDLLLLGLRLSPAQLHFLFLREDTAGAWQTRVSFRSPALVDGRWHTLVLAVSAGVFSLTTDCGLPVDIMADVPFPATLSVKGARFFVGSRRRAKGLFMGLVRQLVLLPGSDATPRLCPSRNAPLAVLSIPRVLQALTGKPEDNEVLKYPYETNIRVTLGPQPPCTEVEDAQFWFDASRKGLYLCVGNEWVSVLAAKERLDYVEEHQNLSTNSETLGIEVFRIPQVGLFVATANRKATSAVYKWTEEKFVSYQNIPTHQAQAWRHFTIGKKIFLAVANFEPDEKGQEFSVIYKWSHRKLKFTPYQSIATHSARDWEAFEVDGEHFLAVANHREGDNHNIDSVIYKWNPATRLFEANQTIATSGAYDWEFFSVGPYSFLVVANTFNGTSTKVHSHLYIRLLGSFQLFQSFPTFGAADWEVFQIGERIFLAVANSHSYDVEMQVQNDSYVINSVIYELNVTAQAFVKFQDILTCSALDWEFFSVGEDYFLVVANSFDGRTFSVNSIIYRWQGYEGFVAVHSLPTVGCRDWEAFSTTAGAYLIYSSAKEPLSRVLRLRTR

SEQ ID NO: 5408 - protein, 593 aa, Homo sapiens
MGTARIAPGLALLLCCPVLSSAYALVDADDVMTKEEQIFLLHRAQAQCEKRLKEVLQRPASIMESDKGWTSASTSGKPRKDKASGKLYPESEEDKEAPTGSRYRGRPCLPEWDHILCWPLGAPGEVVAVPCPDYIYDFNHKGHAYRRCDRNGSWELVPGHNRTWANYSECVKFLTNETREREVFDRLGMIYTVGYSVSLASLTVAVLILAYFRRLHCTRNYIHMHLFLSFMLRAVSIFVKDAVLYSGATLDEAERLTEEELRAIAQAPPPPATAAAGYAGCRVAVTFFLYFLATNYYWILVEGLYLHSLIFMAFFSEKKYLWGFTVFGWGLPAVFVAVWVSVRATLANTGCWDLSSGNKKWIIQVPILASIVLNFILFINIVRVLATKLRETNAGRCDTRQQYRKLLKSTLVLMPLFGVHYIVFMATPYTEVSGTLWQVQMHYEMLFNSFQGFFVAIIYCFCNGEVQAEIKKSWSRWTLALDFKRKARSGSSSYSYGPMVSHTSVTNVGPRVGLGLPLSPRLLPTATTNGHPQLPGHAKPGTPALETLETTPPAMAAPKDDGFLNGSCSGLDEEASGPERPPALLQEEWETVM

SEQ ID NO: 5409 - protein, 499 aa, Homo sapiens
MENGQSTAAKLGLPPLTPEQQEALQKAKKYAMEQSIKSVLVKQTIAHQQQQLTNLQMAAQRQRALAIMCRVYVGSIYYELGEDTIRQAFAPFGPIKSIDMSWDSVTMKHKGFAFVEYEVPEAAQLALEQMNSVMLGGRNIKVGRPSNIGQAQPIIDQLAEEARAFNRIYVASVHQDLSDDDIKSVFEAFGKIKSCTLARDPTTGKHKGYGFIEYEKAQSSQDAVSSMNLFDLGGQYLRVGKAVTPPMPLLTPATPGGLPPAAAVAAAAATAKITAQEAVAGAAVLGTLGTPGLVSPALTLAQPLGTLPQAVMAAQAPGVITGVTPARPPIPVTIPSVGVVNPILASPPTLGLLEPKKEKEEEELFPESERPEMLSEQEHMSISGSSARHMVMQKLLRKQESTVMVLRNMVDPKDIDDDLEGEVTEECGKFGAVNRVIIYQEKQGEEEDAEIIVKIFVEFSIASETHKAIQALNGRWFAGRKVVAEVYDQERFDNSDLSA

SEQ ID NO: 5410 - protein, 323 aa, Homo sapiens
MADKQISLPAKLINGGIAGLIGVTCVFPIDLAKTRLQNQQNGQRVYTSMSDCLIKTVRSEGYFGMYRGAAVNLTLVTPEKAIKLAANDFFRHQLSKDGQKLTLLKEMLAGCGAGTCQVIVTTPMEMLKIQLQDAGRIAAQRKILAAQGQLSAQGGAQPSVEAPAAPRPTATQLTRDLLRSRGIAGLYKGLGATLLRDVPFSVVYFPLFANLNQLGRPASEEKSPFYVSFLAGCVAGSAAAVAVNPCDVVKTRLQSLQRGVNEDTYSGILDCARKILRHEGPSAFLKGAYCRALVIAPLFGIAQVVYFLGIAESLLGLLQDPQA

SEQ ID NO: 5411 - protein, 542 aa, Homo sapiens
MATATIALQVNGQQGGGSEPAAAAAVVAAGDKWKPPQGTDSIKMENGQSTAAKLGLPPLTPEQQEALQKAKKYAMEQSIKSVLVKQTIAHQQQQLTNLQMAAQRQRALAIMCRVYVGSIYYELGEDTIRQAFAPFGPIKSIDMSWDSVTMKHKGFAFVEYEVPEAAQLALEQMNSVMLGGRNIKVGRPSNIGQAQPIIDQLAEEARAFNRIYVASVHQDLSDDDIKSVFEAFGKIKSCTLARDPTTGKHKGYGFIEYEKAQSSQDAVSSMNLFDLGGQYLRVGKAVTPPMPLLTPATPGGLPPAAAVAAAAATAKITAQEAVAGAAVLGTLGTPGLVSPALTLAQPLGTLPQAVMAAQAPGVITGVTPARPPIPVTIPSVGVVNPILASPPTLGLLEPKKEKEEEELFPESERPEMLSEQEHMSISGSSARHMVMQKLLRKQESTVMVLRNMVDPKDIDDDLEGEVTEECGKFGAVNRVIIYQEKQGEEEDAEIIVKIFVEFSIASETHKAIQALNGRWFAGRKVVAEVYDQERFDNSDLSA

SEQ ID NO: 5412 - protein, 843 aa, Homo sapiens
MKVISLFILVGFIGEFQSFSSASSPVNCQWDFYAPWSECNGCTKTQTRRRSVAVYGQYGGQPCVGNAFETQSCEPTRGCPTEEGCGERFRCFSGQCISKSLVCNGDSDCDEDSADEDRCEDSERRPSCDIDKPPPNIELTGNGYNELTGQFRNRVINTKSFGGQCRKVFSGDGKDFYRLSGNVLSYTFQVKINNDFNYEFYNSTWSYVKHTSTEHTSSSRKRSFFRSSSSSSRSYTSHTNEIHKGKSYQLLVVENTVEVAQFINNNPEFLQLAEPFWKELSHLPSLYDYSAYRRLIDQYGTHYLQSGSLGGEYRVLFYVDSEKLKQNDFNSVEEKKCKSSGWHFVVKFSSHGCKELENALKAASGTQNNVLRGEPFIRGGGAGFISGLSYLELDNPAGNKRRYSAWAESVTNLPQVIKQKLTPLYELVKEVPCASVKKLYLKWALEEYLDEFDPCHCRPCQNGGLATVEGTHCLCHCKPYTFGAACEQGVLVGNQAGGVDGGWSCWSSWSPCVQGKKTRSRECNNPPPSGGGRSCVGETTESTQCEDEELEHLRLLEPHCFPLSLVPTEFCPSPPALKDGFVQDEGTMFPVGKNVVYTCNEGYSLIGNPVARCGEDLRWLVGEMHCQKIACVLPVLMDGIQSHPQKPFYTVGEKVTVSCSGGMSLEGPSAFLCGSSLKWSPEMKNARCVQKENPLTQAVPKCQRWEKLQNSRCVCKMPYECGPSLDVCAQDERSKRILPLTVCKMHVLHCQGRNYTLTGRDSCTLPASAEKACGACPLWGKCDAESSKCVCREASECEEEGFSICVEVNGKEQTMSECEAGALRCRGQSISVTSIRPCAAETQ

SEQ ID NO: 5413 - protein, 420 aa, Homo sapiens
MGTQALQGFLFLLFLPLLQPRGASAGSLHSPGLSECFQVNGADYRGHQNRTGPRGAGRPCLFWDQTQQHSYSSASDPHGRWGLGAHNFCRNPDGDVQPWCYVAETEEGIYWRYCDIPSCHMPGYLGCFVDSGAPPALSGPSGTSTKLTVQVCLRFCRMKGYQLAGVEAGYACFCGSESDLARGRLAPATDCDQICFGHPGQLCGGDGRLGVYEVSVGSCQGNWTAPQGVIYSPDFPDEYGPDRNCSWALGPPGAALELTFRLFELADPRDRLELRDAASGSLLRAFDGARPPPSGPLRLGTAALLLTFRSDARGHAQGFALTYRGLQDAAEDPEAPEGSAQTPAAPLDGANVSCSPRPGAPPAAIGGAVCWLREKGPRRWGLPGAPGEAGLCGTNSPEGWPCPAPPGTPRLRVLPRATGL

SEQ ID NO: 5414 - protein, 240 aa, Homo sapiens
MATAMYLEHYLDSIENLPCELQRNFQLMRELDQRTEDKKAEIDILAAEYISTVKTLSPDQRVERLQKIQNAYSKCKEYSDDKVQLAMQTYEMVDKHIRRLDADLARFEADLKDKMEGSDFESSGGRGLKKGRGQKEKRGSRGRGRRTSEEDTPKKKKHKGGSEFTDTILSVHPSDVLDMPVDPNEPTYCLCHQVSYGEMIGCDNPDCPIEWFHFACVDLTTKPKGKWFCPRCVQEKRKKK

SEQ ID NO: 5415 - protein, 373 aa, Homo sapiens
MEDLDQSPLVSSSDSPPRPQPAFKYQFVREPEDEEEEEEEEEEDEDEDLEELEVLERKPAAGLSAAPVPTAPAAGAPLMDFGNDFVPPAPRGPLPAAPPVAPERQPSWDPSPVSSTVPAPSPLSAAAVSPSKLPEDDEPPARPPPPPPASVSPQAEPVWTPPAPAPAAPPSTPAAPKRRGSSGSVVVDLLYWRDIKKTGVVFGASLFLLLSLTVFSIVSVTAYIALALLSVTISFRIYKGVIQAIQKSDEGHPFRAYLESEVAISEELVQKYSNSALGHVNCTIKELRRLFLVDDLVDSLKFAVLMWVFTYVGALFNGLTLLILALISLFSVPVIYERHQAQIDHYLGLANKNVKDAMAKIQAKIPGLKRKAE

SEQ ID NO: 5416 - protein, 458 aa, Homo sapiens
MEATGTDEVDKLKTKFISAWNNMKYSWVLKTKTYFSRNSPVLLLGKCYHFKYEDEDKTLPAESGCTIEDHVIAGNVEEFRKDFISRIWLTYREEFPQIEGSALTTDCGWGCTLRTGQMLLAQGLILHFLGRAWTWPDALNIENSDSESWTSHTVKKFTASFEASLSGEREFKTPTISLKETIGKYSDDHEMRNEVYHRKIISWFGDSPLALFGLHQLIEYGKKSGKKAGDWYGPAVVAHILRKAVEEARHPDLQGITIYVAQDCTVYNSDVIDKQSASMTSDNADDKAVIILVPVRLGGERTNTDYLEFVKGILSLEYCVGIIGGKPKQSYYFAGFQDDSLIYMDPHYCQSFVDVSIKDFPLETFHCPSPKKMSFRKMDPSCTIGFYCRNVQDFKRASEEITKMLKFSSKEKYPLFTFVNGHSRDYDFTSTTTNEEDLFSEDEKKQLKRFSTEEFVLL

SEQ ID NO: 5417 - protein, 84 aa, Homo sapiens
MATGTDQVVGLGLVAVSLIIFTYYTAWVILLPFIDSQHVIHKYFLPRAYAVAIPLAAGLLLLLFVGLFISYVMLKTKRVTKKAQ

SEQ ID NO: 5418 - protein, 72 aa, Homo sapiens; identical to SEQ ID NO: 5336

SEQ ID NO: 5419 - protein, 388 aa, Homo sapiens
MKWLLLLGLVALSECIMYKVPLIRKKSLRRTLSERGLLKDFLKKHNLNPARKYFPQWKAPTLVDEQPLENYLDMEYFGTIGIGTPAQDFTVVFDTGSSNLWVPSVYCSSLACTNHNRFNPEDSSTYQSTSETVSITYGTGSMTGILGYDTVQVGGISDTNQIFGLSETEPGSFLYYAPFDGILGLAYPSISSSGATPVFDNIWNQGLVSQDLFSVYLSADDQSGSVVIFGGIDSSYYTGSLNWVPVTVEGYWQITVDSITMNGEAIACAEGCQAIVDTGTSLLTGPTSPIANIQSDIGASENSDGDMVVSCSAISSLPDIVFTINGVQYPVPPSAYILQSEGSCISGFQGMNLPTESGELWILGDVFIRQYFTVFDRANNQVGLAPVA

SEQ ID NO: 5420 - protein, 1349 aa, Homo sapiens
MIIKEYRIPLPMTVEEYRIAQLYMIQKKSRNETYGEGSGVEILENRPYTDGPGGSGQYTHKVYHVGMHIPSWFRSILPKAALRVVEESWNAYPYTRTRFTCPFVEKFSIDIETFYKTDAGENPDVFNLSPVEKNQLTIDFIDIVKDPVPHNEYKTEEDPKLFQSTKTQRGPLSENWIEEYKKQVFPIMCAYKLCKVEFRYWGMQSKIERFIHDTGLRRVMVRAHRQAWCWQDEWYGLSMENIRELEKEAQLMLSRKMAQFNEDGEEATELVKHEAVSDQTSGEPPEPSSSNGEPLVGRGLKKQWSTSSKSSRSSKRGASPSRHSISEWRMQSIARDSDESSDDEFFDAHEDLSDTEEMFPKDITKWSSNDLMDKIESPEPEDTQDGLYRQGAPEFRVASSVEQLNIIEDEVSQPLAAPPSKIHVLLLVLHGGTILDTGAGDPSSKKGDANTIANVFDTVMRVHYPSALGRLAIRLVPCPPVCSDAFALVSNLSPYSHDEGCLSSSQDHIPLAALPLLATSSPQYQEAVATVIQRANLAYGDFIKSQEGMTFNGQVCLIGDCVGGILAFDALCYSNQPVSESQSSSRRGSVVSMQDNDLLSPGILMNAAHCCGGGGGGGGGGGSSGGGGSSGGSSLESSRHLSRSNVDIPRSNGTEDPKRQLPRKRSDSSTYELDTIQQHQAFLSSLHASVLRTEPCSRHSSSSTMLDGTGALGRFDFEITDLFLFGCPLGLVLALRKTVIPALDVFQLRPACQQVYNLFHPADPSASRLEPLLERRFHALPPFSVPRYQRYPLGDGCSTLLADVLQTHNAAFQEHGAPSSPGTAPASRGFRRASEISIASQVSGMAESYTASSIAQKAPDALSHTPSVRRLSLLALPAPSPTTPGPHPPARKASPGLERAPGLPELDIGEVAAKWWGQKRIDYALYCPDALTAFPTVALPHLFHASYWESTDVVSFLLRQVMRHDNSSILELDGKEVSVFTPSKPREKWQRKRTHVKLRNVTANHRINDALANEDGPQVLTGRFMYGPLDMVTLTGEKVDVHIMTQPPSGEWLYLDTLVTNNSGRVSYTIPESHRLGVGVYPIKMVVRGDHTFADSYITVLPKGTEFVVFSIDGSFAASVSIMGSDPKVRAGAVDVVRHWQDLGYLIIYVTGRPDMQKQRVVAWLAQHNFPHGVVSFCDGLVHDPLRHKANFLKLLISELHLRVHAAYGSTKDVAVYSAISLSPMQIYIVGRPTKKLQQQCQFITDGYAAHLAQLKYSHRARPARNTATRMALRKGSFGLPGQGDFLRSRNHLLRTISAQPSGPSHRHERTQSQADGEQRGQRSMSVAAGCWGRAMTGRLEPGAAAGPK

SEQ ID NO: 5421 - protein, 140 aa, Homo sapiens
MPLESSSSMPLSFPSLLPSVPHNTNPSPPLMSYITSQEMKCILHWFANWSGPQRERFLEDLVAKAVPEKLQPLLDSLEQLSVSGADRPPSIFECQLHLWDQWFRGWAEQERNEFVRQLEFSEPDFVAKFYQAVAATAGKD

SEQ ID NO: 5422 - protein, 1403 aa, Homo sapiens
MVSSGCRMRSLWFIIVISFLPNTEGFSRAALPFGLVRRELSCEGYSIDLRCPGSDVIMIESANYGRTDDKICDADPFQMENTDCYLPDAFKIMTQRCNNRTQCIVVTGSDVFPDPCPGTYKYLEVQYECVPYIFVCPGTLKAIVDSPCIYEAEQKAGAWCKDPLQAADKIYFMPWTPYRTDTLIEYASLEDFQNSRQTTTYKLPNRVDGTGFVVYDGAVFFNKERTRNIVKFDLRTRIKSGEAIINYANYHDTSPYRWGGKTDIDLAVDENGLWVIYATEQNNGMIVISQLNPYTLRFEATWETVYDKRAASNAFMICGVLYVVRSVYQDNESETGKNSIDYIYNTRLNRGEYVDVPFPNQYQYIAAVDYNPRDNQLYVWNNNFILRYSLEFGPPDPAQVPTTAVTITSSAELFKTIISTTSTTSQKGPMSTTVAGSQEGSKGTKPPPAVSTTKIPPITNIFPLPERFCEALDSKGIKWPQTQRGMMVERPCPKGTRGTASYLCMISTGTWNPKGPDLSNCTSHWVNQLAQKIRSGENAASLANELAKHTKGPVFAGDVSSSVRLMEQLVDILDAQLQELKPSEKDSAGRSYNKAIVDTVDNLLRPEALESWKHMNSSEQAHTATMLLDTLEEGAFVLADNLLEPTRVSMPTENIVLEVAVLSTEGQIQDFKFPLGIKGAGSSIQLSANTVKQNSRNGLAKLVFIIYRSLGQFLSTENATIKLGADFIGRNSTIAVNSHVISVSINKESSRVYLTDPVLFTLPHIDPDNYFNANCSFWNYSERTMMGYWSTQGCKLVDTNKTRTTCACSHLTNFAILMAHREIAYKDGVHELLLTVITWVGIVISLVCLAICIFTFCFFRGLQSDRNTIHKNLCINLFIAEFIFLIGIDKTKYAIACPIFAGLLHFFFLAAFAWMCLEGVQLYLMLVEVFESEYSRKKYYYVAGYLFPATVVGVSAAIDYKSYGTEKACWLHVDNYFIWSFIGPVTFIILLNIIFLVITLCKMVKHSNTLKPDSSRLENIKSWVLGAFALLCLLGLTWSFGLLFINEETIVMAYLFTIFNAFQGVFIFIFHCALQKKVRKEYGKCFRHSYCCGGLPTESPHSSVKASTTRTSARYSSGTQSRIRRMWNDTVRKQSESSFISGDINSTSTLNQGHSLNNARDTSAMDTLPLNGNFNNSYSLHKGDYNDSVQVVDCGLSLNDTAFEKMIISELVHNNLRGSSKTHNLELTLPVKPVIGGSSSEDDAIVADASSLMHSDNPGLELHHKELEAPLIPQRTHSLLYQPQKKVKSEGTDSYVSQLTAEAEDHLQSPNRDSLYTSMPNLRDSPYPESSPDMEEDLSPSRRSENEDIYYKSMPNLGAGHQLQMCYQISRGNSDGYIIPINKEGCIPEGDVREGQMQLVTSL

SEQ ID NO: 5423 - protein, 406 aa, Homo sapiens
MGPSTPLLILFLLSWSGPLQGQQHHLVEYMERRLAALEERLAQCQDQSSRHAAELRDFKNKMLPLLEVAEKEREALRTEADTISGRVDRLEREVDYLETQNPALPCVEFDEKVTGGPGTKGKGRRNEKYDMVTDCGYTISQVRSMKILKRFGGPAGLWTKDPLGQTEKIYVLDGTQNDTAFVFPRLRDFTLAMAARKASRVRVPFPWVGTGQLVYGGFLYFARRPPGRPGGGGEMENTLQLIKFHLANRTVVDSSVFPAEGLIPPYGLTADTYIDLAADEEGLWAVYATREDDRHLCLAKLDPQTLDTEQQWDTPCPRENAEAAFVICGTLYVVYNTRPASRARIQCSFDASGTLTPERAALPYFPRRYGAHASLRYNPRERQLYAWDDGYQIVYKLEMRKKEEEV

SEQ ID NO: 5424 - protein, 520 aa, Homo sapiens
MVTSSFPISVAVFALITLQVGTQDSFIAAVYEHAVILPNKTETPVSQEDALNLMNENIDILETAIKQAAEQGARIIVTPEDALYGWKFTRETVFPYLEDIPDPQVNWIPCQDPHRFGHTPVQARLSCLAKDNSIYVLANLGDKKPCNSRDSTCPPNGYFQYNTNVVYNTEGKLVARYHKYHLYSEPQFNVPEKPELVTFNTAFGRFGIFTCFDIFFYDPGVTLVKDFHVDTILFPTAWMNVLPLLTAIEFHSAWAMGMGVNLLVANTHHVSLNMTGSGIYAPNGPKVYHYDMKTELGKLLLSEVDSHPLSSLAYPTAVNWNAYATTIKPFPVQKNTFRGFISRDGFNFTELFENAGNLTVCQKELCCHLSYRMLQKEENEVYVLGAFTGLHGRRRREYWQVCTLLKCKTTNLTTCGRPVETASTRFEMFSLSGTFGTEYVFPEVLLTEIHLSPGKFEVLKDGRLVNKNGSSGPILTVSLFGRWYTKDSLYSSCGTSNSAITYLLIFILLMIIALQNIVML

SEQ ID NO: 5425 - protein, 996 aa, Homo sapiens
MPYNYLLDAKSRRAHNIDLKGTVVIFDEAHNVEKMCEESASFDLTPHDLASGLDVIDQVLEEQTKAAQQGEPHPEFSADSPSPGLNMELEDIAKLKMILLRLEGAIDAVELPGDDSGVTKPGSYIFELFAEAQITFQTKGCILDSLDQIIQHLAGRAGVFTNTAGLQKLADIIQIVFSVDPSEGSPGSPAGLGALQSYKVHIHPDAGHRRTAQRSDAWSTTAARKRGKVLSYWCFSPGHSMHELVRQGVRSLILTSGTLAPVSSFALEMQIPFPVCLENPHIIDKHQIWVGVVPRGPDGAQLSSAFDRRFSEECLSSLGKALGNIARVVPYGLLIFFPSYPVMEKSLEFWRARDLARKMEALKPLFVEPRSKGSFSETISAYYARVAAPGSTGATFLAVCRGKASEGLDFSDTNGRGVIVTGLPYPPRMDPRVVLKMQFLDEMKGQGGAGGQFLSGQEWYRQQASRAVNQAIGRVIRHRQDYGAVFLCDHRFAFADARAQLPSWVRPHVRVYDNFGHVIRDVAQFFRVAERTMPAPAPRATAPSVRGEDAVSEAKSPGPFFSTRKAKSLDLHVPSLKQRSSGSPAAGDPESSLCVEYEQEPVPARQRPRGLLAALEHSEQRAGSPGEEQAHSCSTLSLLSEKRPAEEPRGGRKKIRLVSHPEEPVAGAQTDRAKLFMVAVKQELSQANFATFTQALQDYKGSDDFAALAACLGPLFAEDPKKHNLLQGFYQFVRPHHKQQFEEVCIQLTGRGCGYRPEHSIPRRQRAQPVLDPTGRTAPDPKLTVSTAAAQQLDPQEHLNQGRPHLSPRPPPTGDPGSQPQWGSGVPRAGKQGQHAVSAYLADARRALGSAGCSQLLAALTAYKQDDDLDKVLAVLAALTTAKPEDFPLLHRFSMFVRPHHKQRFSQTCTDLTGRPYPGMEPPGPQEERLAVPPVLTHRAPQPGPSRSEKTGKTQSKISSFLRQRPAGTVGAGGEDAGPSQSSGPPHGPAASEWGL

SEQ ID NO: 5426 - protein, 836 aa, Homo sapiens
MIAELVSSALGLALYLNTLSADFCYDDSRAIKTNQDLLPETPWTHIFYNDFWGTLLTHSGSHKSYRPLCTLSFRLNHAIGGLNPWSYHLVNVLLHAAVTGLFTSFSKILLGDGYWTFMAGLMFASHPIHTEAVAGIVGRADVGASLFFLLSLLCYIKHCSTRGYSARTWGWFLGSGLCAGCSMLWKEQGVTVLAVSAVYDVFVFHRLKIKQILPTIYKRKNLSLFLSISLLIFWGSSLLGARLYWMGNKPPSFSNSDNPAADSDSLLTRTLTFFYLPTKNLWLLLCPDTLSFDWSMDAVPLLKTVCDWRNLHTVAFYTGLLLLAYYGLKSPSVDRECNGKTVTNGKQNANGHSCLSDVEYQNSETKSSFASKVENGIKNDVSQRTQLPSTENIVVLSLSLLIIPFVPATNLFFYVGFVIAERVLYIPSMGFCLLITVGARALYVKVQKRFLKSLIFYATATLIVFYGLKTAIRNGDWQNEEMLYRSGIKVNPAKAWGNLGNVLKSQSKISEAESAYRNALYYRSNMADMLYNLGLLLQENSRFAEALHYYKLAIGSRPTLASAYLNTGIILMNQGRTEEARRTFLKCSEIPDENLKDPHAHKSSVTSCLYNLGKLYHEQGHYEEALSVYKEAIQKMPRQFAPQSLYNMMGEAYMRLSKLPEAEHWYMESLRSKTDHIPAHLTYGKLLALTGRKSEAEKLFLKAIELDPTKGNCYMHYGQFLLEEARLIEAAEMAKKAAELDSTEFDVVFNAAHMLRQASLNEAAEKYYDLAARLRPNYPAALMNLGAILHLNGRLQKAEANYLRALQLKPDDVITQSNLRKLWNIMEKQGLKTSKT

SEQ ID NO: 5427 - protein, 217 aa, Homo sapiens
MSCAGAAAAPRLWRLRPGARRSLSAYGRRTSVRFRSSGMTLDNISRAAVDRIIRVDHAGEYGANRIYAGQMAVLGRTSVGPVIQKMWDQEKDHLKKFNELMVTFRVRPTVLMPLWNVLGFALGAGTALLGKEGAMACTVAVEESIAHHYNNQIRTLMEEDPEKYEELLQLIKKFRDEELEHHDIGLDHDAELAPAYAVLKSIIQAGCRVAIYLSERL

SEQ ID NO: 5428 - protein, 584 aa, Homo sapiens
MKMMLVRRFRVLILMVFLVACALHIALDLLPRLERRGARPSGEPGCSCAQPAAEVAAPGWAQVRGRPGEPPAASSAAGDAGWPNKHTLRILQDFSSDPSSNLSSHSLEKLPPAAEPAERALRGRDPGALRPHDPAHRPLLRDPGPRRSESPPGPGGDASLLARLFEHPLYRVAVPPLTEEDVLFNVNSDTRLSPKAAENPDWPHAGAEGAEFLSPGEAAVDSYPNWLKFHIGINRYELYSRHNPAIEALLHDLSSQRITSVAMKSGGTQLKLIMTFQNYGQALFKPMKQTREQETPPDFFYFSDYERHNAEIAAFHLDRILDFRRVPPVAGRMVNMTKEIRDVTRDKKLWRTFFISPANNICFYGECSYYCSTEHALCGKPDQIEGSLAAFLPDLSLAKRKTWRNPWRRSYHKRKKAEWEVDPDYCEEVKQTPPYDSSHRILDVMDMTIFDFLMGNMDRHHYETFEKFGNETFIIHLDNGRGFGKYSHDELSILVPLQQCCRIRKSTYLRLQLLAKEEYKLSLLMAESLRGDQVAPVLYQPHLEALDRRLRVVLKAVRDCVERNGLHSVVDDDLDTEHRAASAR

SEQ ID NO: 5429 - protein, 403 aa, Homo sapiens
MSGSDGGLEEEPELSITLTLRMLMHGKEVGSIIGKKGETVKRIREQSSARITISEGSCPERITTITGSTAAVFHAVSMIAFKLDEDLCAAPANGGNVSRPPVTLRLVIPASQCGSLIGKAGTKIKEIRETTGAQVQVAGDLLPNSTERAVTVSGVPDAIILCVRQICAVILESPPKGATIPYHPSLSLGTVLLSANQGFSVQGQYGAVTPAEVTKLQQLSSHAVPFATPSVVPGLDPGTQTSSQEFLVPNDLIGCVIGRQGSKISEIRQMSGAHIKIGNQAEGAGERHVTITGSPVSIALAQYLITACLETAKSTSGGTPSSAPADLPAPFSPPLTALPTAPPGLLGTPYAISLSNFIGLKPMPFLALPPASPGPPPGLAAYTAKMAAANGSKKAERQKFSPY

SEQ ID NO: 5430 - protein, 249 aa, Homo sapiens
MVDRLANSEANTRRISIVENCFGAAGQPLTIPGRVLIGEGVLTKLCRKKPKARQFFLFNDILVYGNIVIQKKKYNKQHIIPLENVTIDSIKDEGDLRNGWLIKTPTKSFAVYAATATEKSEWMNHINKCVTDLLSKSGKTPSNEHAAVWVPDSEATVCMRCQKAKFTPVNRRHHCRKCGFVVCGPCSEKRFLLPSQSSKPVRICDFCYDLLSAGDMATCQPARSDSYSQSLKSPLNDMSDDDDDDDSSD

SEQ ID NO: 5431 - protein, 365 aa, Homo sapiens
MEGQSVEELLAKAEQDEAEKLQRITVHKELELQFDLGNLLASDRNPPTGLRCAGPTPEAELQALARDNTQLLINQLWQLPTERVEEAIVARLPEPTTRLPREKPLPRPRPLTRWQQFARLKGIRPKKKTNLVWDEVSGQWRRRWGYQRARDDTKEWLIEVPGNADPLEDQFAKRIQAKKERVAKNELNRLRNLARAHKMQLPSAAGLHPTGHQSKEELGRAMQVAKVSTASVGRFQERLPKEKVPRGSGKKRKFQPLFGDFAAEKKNQLELLRVMNSKKPQLDVTRATNKQMREEDQEEAAKRRKMSQKGKRKGGRQGPGGKRKGGPPSQGGKRKGGLGGKMNSGPPGLGGKRKGGQRPGGKRRK

SEQ ID NO: 5432 - protein, 115 aa, Homo sapiens
MRYVASYLLAALGGNSSPSAKDIKKILDSVGIEADDDRLNKVISELNGKNIEDVIAQGIGKLASVPAGGAVAVSAAPGSAAPAAGSAPAAAEEKKDEKKEESEESDDDMGFGLFD

SEQ ID NO: 5433 - protein, 455 aa, Homo sapiens
MTTMAAATLLRATPHFSGLAAGRTFLLQGLLRLLKAPALPLLCRGLAVEAKKTYVRDKPHVNVGTIGHVDHGKTTLTAAITKILAEGGGAKFKKYEEIDNAPEERARGITINAAHVEYSTAARHYAHTDCPGHADYVKNMITGTAPLDGCILVVAANDGPMPQTREHLLLARQIGVEHVVVYVNKADAVQDSEMVELVELEIRELLTEFGYKGEETPVIVGSALCALEGRDPELGLKSVQKLLDAVDTYIPVPARDLEKPFLLPVEAVYSVPGRGTVVTGTLERGILKKGDECELLGHSKNIRTVVTGIEMFHKSLERAEAGDNLGALVRGLKREDLRRGLVMVKPGSIKPHQKVEAQVYILSKEEGGRHKPFVSHFMPVMFSLTWDMACRIILPPEKELAMPGEDLKFNLILRQPMILEKGQRFTLRDGNRTIGTGLVTNTLAMTEEEKNIKWG

SEQ ID NO: 5434 - protein, 464 aa, Homo sapiens
MLATRRLLGWSLPARVSVRFSGDTTAPKKTSFGSLKDEDRIFTNLYGRHDWRLKGSLSRGDWYKTKEILLKGPDWILGEIKTSGLRGRGGAGFPTGLKWSFMNKPSDGRPKYLVVNADEGEPGTCKDREILRHDPHKLLEGCLVGGRAMGARAAYIYIRGEFYNEASNLQVAIREAYEAGLIGKNACGSGYDFDVFVVRGAGAYICGEETALIESIEGKQGKPRLKPPFPADVGVFGCPTTVANVETVAVSPTICRRGGTWFAGFGRERNSGTKLFNISGHVNHPCTVEEEMSVPLKELIEKHAGGVTGGWDNLLAVIPGGSSTPLIPKSVCETVLMDFDALVQAQTGLGTAAVIVMDRSTDIVKAIARLIEFYKHESCGQCTPCREGVDWMNKVMARFVRGDARPAEIDSLWEISKQIEGHTICALGDGAAWPVQGLIRHFRPELEERMQRFAQQHQARQAAS

SEQ ID NO: 5435 - protein, 324 aa, Homo sapiens
MSRPSSTGPSANKPCSKQPPPQPQHTPSPAAPPAAATISAAGPGSSAVPAAAAVISGPGGGGGAGPVSPQHHELTSLFECPVCFDYVLPPILQCQAGHLVCNQCRQKLSCCPTCRGALTPSIRNLAMEKVASAVLFPCKYATTGCSLTLHHTEKPEHEDICEYRPYSCPCPGASCKWQGSLEAVMSHLMHAHKSITTLQGEDIVFLATDINLPGAVDWVMMQSCFGHHFMLVLEKQEKYEGHQQFFAIVLLIGTRKQAENFAYRLELNGNRRRLTWEATPRSIHDGVAAAIMNSDCLVFDTAIAHLFADNGNLGINVTISTCCP

SEQ ID NO: 5436 - protein, 228 aa, Homo sapiens
MPGAGDGGKAPARWLGTGLLGLFLLPVTLSLEVSVGKATDIYAVNGTEILLPCTFSSCFGFEDLHFRWTYNSSDAFKILIEGTVKNEKSDPKVTLKDDDRITLVGSTKEKMNNISIVLRDLEFSDTGKYTCHVKNPKENNLQHHATIFLQVVDRLEEVDNTVTLIILAVVGGVIGLLILILLIKKLIIFILKKTREKKKECLVSSSGNDNTENGLPGSKAEEKPPSKV

SEQ ID NO: 5437 - protein, 329 aa, Homo sapiens
MEMSGLSFSEMEGCRNLLGLLDNDEIMALCDTVTNRLVQPQDRQDAVHAILAYSQSAEELLRRRKVHREVIFKYLATQGIVIPPATEKHNLIQHAKDYWQKQPQLKLKETPEPVTKTEDIHLFQQQVKEDKKAEKVDFRRLGEEFCHWFFGLLNSQNPFLGPPQDEWGPQHFWHDVKLRFYYNTSEQNVMDYHGAEIVSLRLLSLVKEEFLFLSPNLDSHGLKCASSPHGLVMVGVAGTVHRGNTCLGIFEQIFGLIRCPFVENTWKIKFINLKIMGESSLAPGTLPKPSVKFEQSDLEAFYNVITVCGTNEVRHNVKQASDSGTGDQV

SEQ ID NO: 5438 - protein, 89 aa, Homo sapiens
MQACMVPGLALCLLLGPLAGAKPVQEEGDPYAELPAMPYWPFSTSDFWNYVQHFQALGAYPQIEDMARTFFAHFPLGSTLGFHVPYQED

SEQ ID NO: 5439 - protein, 170 aa, Homo sapiens
MSVAGGEIRGDTGGEDTAAPGRFSFSPEPTLEDIRRLHAEFAAERDWEQFHQPRNLLLALVGEVGELAELFQWKTDGEPGPQGWSPRERAALQEELSDVLIYLVALAARCRVDLPLAVLSKMDINRRRYPAHLARSSSRKYTELPHGAISEDQAVGPADIPCDSTGQTST

SEQ ID NO: 5440 - protein, 469 aa, Homo sapiens
MVLEGNPEVGSPRTSDLQHRGNKGSCVLSSPGEDAQPGEEPIKYGELIVLGCCEEGGEETEAQRGEVTGPRAHSCYNGCLASGDKGRRRSRLALSRRSHANGVKPDVMHHISTPLVSKALSNRGQHSISYTLSRSHSVIVEYTHDSDTDMFQIGRSTENMIDFVVTDTSPGGGAAEGPSAQSTISRYACRILCDRRPPYTARIYAAGFDASSNIFLGERAAKWRTPDGLMDGLTTNGVLVMHPAGGFSEDSAPGVWREISVCGNVYTLRDSRSAQQRGKLVENESNVLQDGSLIDLCGATLLWRTPAGLLRAPTLKQLEAQRQEANAARPQCPVGLSTLAFPSPARGRTAPDKQQPWVYVRCGHVHGYHGWGCRRERGPQERECPLCRLVGPYVPLWLGQEAGLCLDPGPPSHAFAPCGHVCSEKTARYWAQTPLPHGTHAFHAACPFCGAWLTGEHGCVRLIFQGPLD

SEQ ID NO: 5441 - protein, 600 aa, Homo sapiens
MAASAQVSVTFEDVAVTFTQEEWGQLDAAQRTLYQEVMLETCGLLMSLGCPLFKPELIYQLDHRQELWMATKDLSQSSYPGDNTKPKTTEPTFSHLALPEEVLLQEQLTQGASKNSQLGQSKDQDGPSEMQEVHLKIGIGPQRGKLLEKMSSERDGLGSDDGVCTKITQKQVSTEGDLYECDSHGPVTDALIREEKNSYKCEECGKVFKKNALLVQHERIHTQVKPYECTECGKTFSKSTHLLQHLIIHTGEKPYKCMECGKAFNRRSHLTRHQRIHSGEKPYKCSECGKAFTHRSTFVLHHRSHTGEKPFVCKECGKAFRDRPGFIRHYIIHTGEKPYECIECGKAFNRRSYLTWHQQIHTGVKPFECNECGKAFCESADLIQHYIIHTGEKPYKCMECGKAFNRRSHLKQHQRIHTGEKPYECSECGKAFTHCSTFVLHKRTHTGEKPYECKECGKAFSDRADLIRHFSIHTGEKPYECVECGKAFNRSSHLTRHQQIHTGEKPYECIQCGKAFCRSANLIRHSIIHTGEKPYECSECGKAFNRGSSLTHHQRIHTGRNPTIVTDVGRPFMTAQTSVNIQELLLGKEFLNITTEENLW

SEQ ID NO: 5442 - protein, 787 aa, Homo sapiens
MGWRPRRARGTPLLLLLLLLLLWPVPGAGVLQGHIPGQPVTPHWVLDGQPWRTVSLEEPVSKPDMGLVALEAEGQELLLELEKNHRLLAPGYIETHYGPDGQPVVLAPNHTDHCHYQGRVRGFPDSWVVLCTCSGMSGLITLSRNASYYLRPWPPRGSKDFSTHEIFRMEQLLTWKGTCGHRDPGNKAGMTSLPGGPQSRGRREARRTRKYLELYIVADHTLFLTRHRNLNHTKQRLLEVANYVDQLLRTLDIQVALTGLEVWTERDRSRVTQDANATLWAFLQWRRGLWAQRPHDSAQLLTGRAFQGATVGLAPVEGMCRAESSGGVSTDHSELPIGAAATMAHEIGHSLGLSHDPDGCCVEAAAESGGCVMAAATGHPFPRVFSACSRRQLRAFFRKGGGACLSNAPDPGLPVPPALCGNGFVEAGEECDCGPGQECRDLCCFAHNCSLRPGAQCAHGDCCVRCLLKPAGALCRQAMGDCDLPEFCTGTSSHCPPDVYLLDGSPCARGSGYCWDGACPTLEQQCQQLWGPGSHPAPEACFQVVNSAGDAHGNCGQDSEGHFLPCAGRDALCGKLQCQGGKPSLLAPHMVPVDSTVHLDGQEVTCRGALALPSAQLDLLGLGLVEPGTQCGPRMVCNSNHNCHCAPGWAPPFCDKPGFGGSMDSGPVQAENHDTFLLAMLLSVLLPLLPGAGLAWCCYRLPGAHLQRCSWGCRRDPACSGPKDGPHRDHPLGGVHPMELGPTATGQPWPLDPENSHEPSSHPEKPLPAVSPDPQADQVQMPRSCLW

SEQ ID NO: 5443 - protein, 2286 aa, Homo sapiens
MSLRSGGRRRADPGADGEASRDDGATSSVSALKRLERSQWTDKMDLRFGFERLKEPGEKTGWLINMHPTEILDEDKRLGSAVDYYFIQDDGSRFKVALPYKPYFYIATRKGCEREVSSFLSKKFQGKIAKVETVPKEDLDLPNHLVGLKRNYIRLSFHTVEDLVKVRKEISPAVKKNREQDHASDAYTALLSSVLQRGGVITDEEETSKKIADQLDNIVDMREYDVPYHIRLSIDLKIHVAHWYNVRYRGNAFPVEITRRDDLVERPDPVVLAFDIETTKLPLKFPDAETDQIMMISYMIDGQGYLITNREIVSEDIEDFEFTPKPEYEGPFCVFNEPDEAHLIQRWFEHVQETKPTIMVTYNGDFFDWPFVEARAAVHGLSMQQEIGFQKDSQGEYKAPQCIHMDCLRWVKRDSYLPVGSHNLKAAAKAKLGYDPVELDPEDMCRMATEQPQTLATYSVSDAVATYYLYMKYVHPFIFALCTIIPMEPDEVLRKGSGTLCEALLMVQAFHANIIFPNKQEQEFNKLTDDGHVLDSETYVGGHVEALESGVFRSDIPCRFRMNPAAFDFLLQRVEKTLRHALEEEEKVPVEQVTNFEEVCDEIKSKLASLKDVPSRIECPLIYHLDVGAMYPNIILTNRLQPSAMVDEATCAACDFNKPGANCQRKMAWQWRGEFMPASRSEYHRIQHQLESEKFPPLFPEGPARAFHELSREEQAKYEKRRLADYCRKAYKKIHITKVEERLTTICQRENSFYVDTVRAFRDRRYEFKGLHKVWKKKLSAAVEVGDAAEVKRCKNMEVLYDSLQLAHKCILNSFYGYVMRKGARWYSMEMAGIVCFTGANIITQARELIEQIGRPLELDTDGIWCVLPNSFPENFVFKTTNVKKPKVTISYPGAMLNIMVKEGFTNDQYQELAEPSSLTYVTRSENSIFFEVDGPYLAMILPASKEEGKKLKKRYAVFNEDGSLAELKGFEVKRRGELQLIKIFQSSVFEAFLKGSTLEEVYGSVAKVADYWLDVLYSKAANMPDSELFELISENRSMSRKLEDYGEQKSTSISTAKRLAEFLGDQMVKDAGLSCRYIISRKPEGSPVTERAIPLAIFQAEPTVRKHFLRKWLKSSSLQDFDIRAILDWDYYIERLGSAIQKIITIPAALQQVKNPVPRVKHPDWLHKKLLEKNDVYKQKKISELFTLEGRRQVTMAEASEDSPRPSAPDMEDFGLVKLPHPAAPVTVKRKRVLWESQEESQDLTPTVPWQEILGQPPALGTSQEEWLVWLRFHKKKWQLQARQRLARRKRQRLESAEGVLRPGAIRDGPATGLGSFLRRTARSILDLPWQIVQISETSQAGLFRLWALVGSDLHCIRLSIPRVFYVNQRVAKAEEGASYRKVNRVLPRSNMVYNLYEYSVPEDMYQEHINEINAELSAPDIEGVYETQVPLLFRALVHLGCVCVVNKQLVRHLSGWEAETFALEHLEMRSLAQFSYLEPGSIRHIYLYHHAQAHKALFGIFIPSQRRASVFVLDTVRSNQMPSLGALYSAEHGLLLEKVGPELLPPPKHTFEVRAETDLKTICRAIQRFLLAYKEERRGPTLIAVQSSWELKRLASEIPVLEEFPLVPICVADKINYGVLDWQRHGARRMIRHYLNLDTCLSQAFEMSRYFHIPIGNLPEDISTFGSDLFFARHLQRHNHLLWLSPTARPDLGGKEADDNCLVMEFDDQATVEINSSGCYSTVCVELDLQNLAVNTILQSHHVNDMEGADSMGISFDVIQQASLEDMITGGQAASAPASYDETALCSNTFRILKSMVVGWVKEITQYHNIYADNQVMHFYRWLRSPSSLLHDPALHRTLHNMMKKLFLQLIAEFKRLGSSVIYANFNRIILCTKKRRVEDAIAYVEYITSSIHSKETFHSLTISFSRCWEFLLWMDPSNYGGIKGKVSSRIHCGLQDSQKAGGAEDEQENEDDEEERDGEEEEEAEESNVEDLLENNWNILQFLPQAASCQNYFLMIVSAYIVAVYHCMKDGLRRSAPGSTPVRRRGASQLSQEAEGAVGALPGMITFSQDYVANELTQSFFTITQKIQKKVTGSRNSTELSEMFPVLPGSHLLLNNPALEFIKYVCKVLSLDTNITNQVNKLNRDLLRLVDVGEFSEEAQFRDPCRSYVLPEVICRSCNFCRDLDLCKDSSFSEDGAVLPQWLCSNCQAPYDSSAIEMTLVEVLQKKLMAFTLQDLVCLKCRGVKETSMPVYCSCAGDFALTIHTQVFMEQIGIFRNIAQHYGMSYLLETLEWLLQKNPQLGH

SEQ ID NO: 5444 - protein, 403 aa, Homo sapiens
MLEAMAEPSPEDPPPTLKPETQPPEKRRRTIEDFNKFCSFVLAYAGYIPPSKEESDWPASGSSSPLRGESAADSDGWDSAPSDLRTIQTFVKKAKSSKRRAAQAGPTQPGPPRSTFSRLQAPDSATLLEKMKLKDSLFDLDGPKVASPLSPTSLTHTSRPPAALTPVPLSQGDLSHPPRKKDRKNRKLGPGAGAGFGVLRRPRPTPGDGEKRSRIKKSKKRKLKKAERGDRLPPPGPPQAPPSDTDSEEEEEEEEEEEEEEMATVVGGEAPVPVLPTPPEAPRPPATVHPEGVPPADSESKEVGSTETSQDGDASSSEGEMRVMDEDIMVESGDDSWDLITCYCRKPFAGRPMIECSLCGTWIHLSCAKIKKTNVPDFFYCQKCKELRPEARRLGGPPKSGEP

SEQ ID NO: 5445 - protein, 113 aa, Homo sapiens
MRQRLLPSVTSLLLVALLFPGSSQARHVNHSATEALGELRERAPGQGTNGFQLLRHAVKRDLLPPRTPPYQEPASDLKVVDCRRSEGFCQEYCNYMETQVGYCSKKKDACCLH

SEQ ID NO: 5446 - protein, 1955 aa, Homo sapiens
MFRQFYLWTCLASGIILGSLFEICLGQYDDDCKLARGGPPATIVAIDEESRNGTILVDNMLIKGTAGGPDPTIELSLKDNVDYWVLMDPVKQMLFLNSTGRVLDRDPPMNIHSIVVQVQCINKKVGTIIYHEVRIVVRDRNDNSPTFKHESYYATVNELTPVGTTIFTGFSGDNGATDIDDGPNGQIEYVIQYNPDDPTSNDTFEIPLMLTGNIVLRKRLNYEDKTRYFVIIQANDRAQNLNERRTTTTTLTVDVLDGDDLGPMFLPCVLVPNTRDCRPLTYQAAIPELRTPEELNPIIVTPPIQAIDQDRNIQPPSDRPGILYSILVGTPEDYPRFFHMHPRTAELSLLEPVNRDFHQKFDLVIKAEQDNGHPLPAFAGLHIEILDENNQSPYFTMPSYQGYILESAPVGATISDSLNLTSPLRIVALDKDIEDTKDPELHLFLNDYTSVFTVTQTGITRYLTLLQPVDREEQQTYTFSITAFDGVQESEPVIVNIQVMDANDNTPTFPEISYDVYVYTDMRPGDSVIQLTAVDADEGSNGEITYEILVGAQGDFIINKTTGLITIAPGVEMIVGRTYALTVQAADNAPPAERRNSICTVYIEVLPPNNQSPPRFPQLMYSLEISEAMRVGAVLLNLQATDREGDSITYAIENGDPQRVFNLSETTGILTLGKALDRESTDRYILIITASDGRPDGTSTATVNIVVTDVNDNAPVFDPYLPRNLSVVEEEANAFVGQVKATDPDAGINGQVHYSLGNFNNLFRITSNGSIYTAVKLNREVRDYYELVVVATDGAVHPRHSTLTLAIKVLDIDDNSPVFTNSTYTVLVEENLPAGTTILQIEAKDVDLGANVSYRIRSPEVKHFFALHPFTGELSLLRSLDYEAFPDQEASITFLVEAFDIYGTMPPGIATVTVIVKDMNDYPPVFSKRIYKGMVAPDAVKGTPITTVYAEDADPPGLPASRVRYRVDDVQFPYPASIFEVEEDSGRVITRVNLNEEPTTIFKLVVVAFDDGEPVMSSSATVKILVLHPGEIPRFTQEEYRPPPVSELATKGTMVGVISAAAINQSIVYSIVSGNEEDTFGINNITGVIYVNGPLDYETRTSYVLRVQADSLEVVLANLRVPSKSNTAKVYIEIQDENNHPPVFQKKFYIGGVSEDARMFTSVLRVKATDKDTGNYSVMAYRLIIPPIKEGKEGFVVETYTGLIKTAMLFHNMRRSYFKFQVIATDDYGKGLSGKADVLVSVVNQLDMQVIVSNVPPTLVEKKIEDLTEILDRYVQEQIPGAKVVVESIGARRHGDAFSLEDYTKCDLTVYAIDPQTNRAIDRNELFKFLDGKLLDINKDFQPYYGEGGRILEIRTPEAVTSIKKRGESLGYTEGALLALAFIIILCCIPAILVVLVSYRQFKVRQAECTKTARIQAALPAAKPAVPAPAPVAAPPPPPPPPPGAHLYEELGDSSILFLLYHFQQSRGNNSVSEDRKHQQVVMPFSSNTIEAHKSAHVDGSLKSNKLKSARKFTFLSDEDDLSAHNPLYKENISQVSTNSDISQRTDFVDPFSPKIQAKSKSLRGPREKIQRLWSQSVSLPRRLMRKVPNRPEIIDLQQWQGTRQKAENENTGICTNKRGSSNPLLTTEEANLTEKEEIRQGETLMIEGTEQLKSLSSDSSFCFPRPHFSFSTLPTVSRTVELKSEPNVISSPAECSLELSPSRPCVLHSSLSRRETPICMLPIETERNIFENFAHPPNISPSACPLPPPPPISPPSPPPAPAPLAPPPDISPFSLFCPPPSPPSIPLPLPPPTFFPLSVSTSGPPTPPLLPPFPTPLPPPPPSIPCPPPPSASFLSTECVCITGVKCTTNLMPAEKIKSSMTQLSTTTVCKTDPQREPKGILRHVKNLAELEKSVANMYSQIEKNYLRTNVSELQTMCPSEVTNMEITSEQNKGSLNNIVEGTEKQSHSQSTSL

SEQ ID NO: 5447 - protein, 447 aa, Homo sapiens
MEGGWPARQSALLCLTVSLLLQGRGDAFTINCSGFDQHGVDPAVFQAVFDRKAFRPFTNYSIPTRVNISFTLSAILGVDAQLQLLTSFLWMDLVWDNPFINWNPKECVGINKLTVLAENLWLPDIFIVESMDVDQTPSGLTAYISSEGRIKYDKPMRVTSICNLDIFYFPFDQQNCTFTFSSFLYTVDSMLLGMDKEVWEITDTSRKVIQTQGEWELLGINKATPKMSMGNNLYDQIMFYVAIRRRPSLYIINLLVPSSFLVAIDALSFYLPAESENRAPFKITLLLGYNVFLLMMNDLLPASGTPLISVYFALCLSLMVVSLLETVFITYLLHVATTQPPPMPRWLHSLLLHCTSPGRCCPTAPQKGNKGLGLTLTHLPGPKEPGELAGKKLGPRETEPDGGSGWTKTQLMELWVQFSHAMDTLLFRLYLLFMASSILTVIVLWNT

SEQ ID NO: 5448 - protein, 201 aa, Homo sapiens
MGNHLTEMAPTASSFLPHFQALHVVVIGLDSAGKTSLLYRLKFKEFVQSVPTKGFNTEKIRVPLGGSRGITFQVWDVGGQEKLRPLWRSYTRRTDGLVFVVDAAEAERLEEAKVELHRISRASDNQGVPVLVLANKQDQPGALSAAEVEKRLAVRELAAATLTHVQGCSAVDGLGLQQGLERLYEMILKRKKAARGGKKRR

SEQ ID NO: 5449 - protein, 344 aa, Homo sapiens
MATPYVPVPMPIGNSASSFTTNRNQRSSSFGSVSTSSNSSKGQLEDSNMGNFKQTSVPDQMDNTSSVCSSPLIRTKFTGTASSIEYSTRPRDTEEQNPETVNWEDRPSTPTILGYEVMEERAKFTVYKILVKKTPEESWVVFRRYTDFSRLNDKLKEMFPGFRLALPPKRWFKDNYNADFLEDRQLGLQAFLQNLVAHKDIANCLAVREFLCLDDPPGPFDSLEESRAFCETLEETNYRLQKELLEKQKEMESLKKLLSEKQLHIDTLENRIRTLSLEPEESLDVSETEGEQILKVESSALEVDQDVLDEESRADNKPCLSFSEPENAVSEIEVAEVAYDAEED

SEQ ID NO: 5450 - protein, 520 aa, Homo sapiens
MPGSLPLNAEACWPKDVGIVALEIYFPSQYVDQAELEKYDGVDAGKYTIGLGQAKMGFCTDREDINSLCMTVVQNLMERNNLSYDCIGRLEVGTETIIDKSKSVKTNLMQLFEESGNTDIEGIDTTNACYGGTAAVFNAVNWIESSSWDGRYALVVAGDIAVYATGNARPTGGVGAVALLIGPNAPLIFERGLRGTHMQHAYDFYKPDMLSEYPIVDGKLSIQCYLSALDRCYSVYCKKIHAQWQKEGNDKDFTLNDFGFMIFHSPYCKLVQKSLARMLLNDFLNDQNRDKNSIYSGLEAFGDVKLEDTYFDRDVEKAFMKASSELFSQKTKASLLVSNQNGNMYTSSVYGSLASVLAQYSPQQLAGKRIGVFSYGSGLAATLYSLKVTQDATPGSALDKITASLCDLKSRLDSRTGVAPDVFAENMKLREDTHHLVNYIPQGSIDSLFEGTWYLVRVDEKHRRTYARRPTPNDDTLDEGVGLVHSNIATEHIPSPAKKVPRLPATAAEPEAAVISNGEH

SEQ ID NO: 5451 - protein, 553 aa, Homo sapiens
MAAVSLRLGDLVWGKLGRYPPWPGKIVNPPKDLKKPRGKKCFFVKFFGTEDHAWIKVEQLKPYHAHKEEMIKINKGKRFQQAVDAVEEFLRRAKGKDQTSSHNSSDDKNRRNSSEERSRPNSGDEKRKLSLSEGKVKKNMGEGKKRVSSGSSERGSKSPLKRAQEQSPRKRGRPPKDEKDLTIPESSTVKGMMAGPMAAFKWQPTASEPVKDADPHFHHFLLSQTEKPAVCYQAITKKLKICEEETGSTSIQAADSTAVNGSITPTDKKIGFLGLGLMGSGIVSNLLKMGHTVTVWNRTAEKCDLFIQEGARLGRTPAEVVSTCDITFACVSDPKAAKDLVLGPSGVLQGIRPGKCYVDMSTVDADTVTELAQVIVSRGGRFLEAPVSGNQQLSNDGMLVILAAGDRGLYEDCSSCFQAMGKTSFFLGEVGNAAKMMLIVNMVQGSFMATIAEGLTLAQVTGQSQQTLLDILNQGQLASIFLDQKCQNILQGNFKPDFYLKYIQKDLRLAIALGDAVNHPTPMAAAANEVYKRAKALDQSDNDMSAVYRAYIH

SEQ ID NO: 5452 - protein, 267 aa, Homo sapiens
MVKISFQPAVAGIKGDKADKASASAPAPASATEILLTPAREEQPPQHRSKRGGSVGGVCYLSMGMVVLLMGLVFASVYIYRYFFLAQLARDNFFRCGVLYEDSLSSQVRTQMELEEDVKIYLDENYERINVPVPQFGGGDPADIIHDFQRGLTAYHDISLDKCYVIELNTTIVLPPRNFWELLMNVKRGTYLPQTYIIQEEMVVTEHVSDKEALGSFIYHLCNGKDTYRLRRRATRRRINKRGAKNCNAIRHFENTFVVETLICGVV

SEQ ID NO: 5453 - protein, 856 aa, Homo sapiens
MASADKNGGSVSSVSSSRLQSRKPPNLSITIPPPEKETQAPGEQDSMLPEGFQNRRLKKSQPRTWAAHTTACPPSFLPKRKNPAYLKSVSLQEPRSRWQESSEKRPGFRRQASLSQSIRKGAAQWFGVSGDWEGQRQQWQRRSLHHCSMRYGRLKASCQRDLELPSQEAPSFQGTESPKPCKMPKIVDPLARGRAFRHPEEMDRPHAPHPPLTPGVLSLTSFTSVRSGYSHLPRRKRMSVAHMSLQAAAALLKGRSVLDATGQRCRVVKRSFAFPSFLEEDVVDGADTFDSSFFSKEEMSSMPDDVFESPPLSASYFRGIPHSASPVSPDGVQIPLKEYGRAPVPGPRRGKRIASKVKHFAFDRKKRHYGLGVVGNWLNRSYRRSISSTVQRQLESFDSHRPYFTYWLTFVHVIITLLVICTYGIAPVGFAQHVTTQLVLRNKGVYESVKYIQQENFWVGPSSIDLIHLGAKFSPCIRKDGQIEQLVLRERDLERDSGCCVQNDHSGCIQTQRKDCSETLATFVKWQDDTGPPMDKSDLGQKRTSGAVCHQDPRTCEEPASSGAHIWPDDITKWPICTEQARSNHTGFLHMDCEIKGRPCCIGTKGSCEITTREYCEFMHGYFHEEATLCSQVHCLDKVCGLLPFLNPEVPDQFYRLWLSLFLHAGVVHCLVSVVFQMTILRDLEKLAGWHRIAIIFILSGITGNLASAIFLPYRAEVGPAGSQFGLLACLFVELFQSWPLLERPWKAFLNLSAIVLFLFICGLLPWIDNIAHIFGFLSGLLLAFAFLPYITFGTSDKYRKRALILVSLLAFAGLFAALVLWLYIYPINWPWIEHLTCFPFTSRFCEKYELDQVLH

SEQ ID NO: 5454 - protein, 478 aa, Homo sapiens
MGRKKKKQLKPWCWYCNRDFDDEKILIQHQKAKHFKCHICHKKLYTGPGLAIHCMQVHKETIDAVPNAIPGRTDIELEIYGMEGIPEKDMDERRRLLEQKTQESQKKKQQDDSDEYDDDDSAASTSFQPQPVQPQQGYIPPMAQPGLPPVPGAPGMPPGIPPLMPGVPPLMPGMPPVMPGMPPGMMPMGGMMPPGPGIPPLMPGMPPGMPPPVPRPGIPPMTQAQAVSAPGILNRPPAPTATVPAPQPPVTKPLFPSAGQMGTPVTSSSTASSNSESLSASSKALFPSTAQAQAAVQGPVGTDFKPLNSTPATTTEPPKPTFPAYTQSTASTTSTTNSTAAKPAASITSKPATLTTTSATSKLIHPDEDISLEERRAQLPKYQRNLPRPGQAPIGNPPVGPIGGMMPPQPGIPQQQGMRPPMPPHGQYGGHHQGMPGYLPGAMPPYGQGPPMVPPYQGGPPRPPMGMRPPVMSQGGRY

SEQ ID NO: 5455 - protein, 469 aa, Homo sapiens
MHSFPPLLLLLFWGVVSHSFPATLETQEQDVDLVQKYLEKYYNLKNDGRQVEKRRNSGPVVEKLKQMQEFFGLKVTGKPDAETLKVMKQPRCGVPDVAQFVLTEGNPRWEQTHLTYRIENYTPDLPRADVDHAIEKAFQLWSNVTPLTFTKVSEGQADIMISFVRGDHRDNSPFDGPGGNLAHAFQPGPGIGGDAHFDEDERWTNNFREYNLHRVAAHELGHSLGLSHSTDIGALMYPSYTFSGDVQLAQDDIDGIQAIYGRSQNPVQPIGPQTPKACDSKLTFDAITTIRGEVMFFKDRFYMRTNPFYPEVELNFISVFWPQLPNGLEAAYEFADRDEVRFFKGNKYWAVQGQNVLHGYPKDIYSSFGFPRTVKHIDAALSEENTGKTYFFVANKYWRYDEYKRSMDPGYPKMIAHDFPGIGHKVDAVFMKDGFFYFFHGTRQYKFDPKTKRILTLQKANSWFNCRKN

SEQ ID NO: 5456 - protein, 417 aa, Homo sapiens
MSGRSRGRKSSRAKNRGKGRAKARVRPAPDDAPRDPDPSQYQSLGEDTQAAQVQAGAGWGGLEAAASAQLLRLGEEAACRLPLDCGLALRARAAGDHGQAAARPGPGKAASLSERLAADTVFVGTAGTVGRPKNAPRVGNRRGPAGKKAPETCSTAGRGPQVIAGGRQKKGAAGENTSVSAGEEKKEERDAGSGPPATEGSMDTLENVQLKLENMNAQADRAYLRLSRKFGQLRLQHLERRNHLIQNIPGFWGQAFQNHPQLASFLNSQEKEVLSYLNSLEVEELGLARLGYKIKFYFDRNPYFQNKVLIKEYGCGPSGQVVSRSTPIQWLPGHDLQSLSQGNPENNRSFFGWFSNHSSIESDKIVEIINEELWPNPLQFYLLSEGARVEKGKEKEGRQGPGKQPMETTQPGVSQSN

SEQ ID NO: 5457 - protein, 759 aa, Homo sapiens
MEAVIEKECSALGGLFQTIISDMKGSYPVWEDFINKAGKLQSQLRTTVVAAAAFLDAFQKVADMATNTRGGTREIGSALTRMCMRHRSIEAKLRQFSSALIDCLINPLQEQMEEWKKVANQLDKDHAKEYKKARQEIKKKSSDTLKLQKKAKKVDTLGRGDIQPQLDSALQDVNDKYLLLEETEKQAVRKALIEERGRFCTFISMLRPVIEEEISMLGEITHLQTISEDLKSLTMDPHKLPSSSEQVILDLKGSDYSWSYQTPPSSPSTTMSRKSSVCSSLNSVNSSDSRSSGSHSHSPSSHYRYRSSNLAQQAPVRLSSVSSHDSGFISQDAFQSKSPSPMPPEAPNQLSNGFSHYSLSSESHVGPTGAGLFPHCLPASRLLPRVTSVHLPDYAHYYTIGPGMFPSSQIPSWKDWAKPGPYDQPLVNTLQRRKEKREPDPNGGGPTTASGPPAAAEEAQRPRSMTVSAATRPGEEMEACEELALALSRGLQLDTQRSSRDSLQCSSGYSTQTTTPCCSEDTIPSQVSDYDYFSVSGDQEADQQEFDKSSTIPRNSDISQSYRRMFQAKRPASTAGLPTTLGPAMVTPGVATIRRTPSTKPSVRRGTIGAGPIPIKTPVIPVKTPTVPDLPGVLPAPPDGPEERGEHSPESPSVGEGPQGVTSMPSSMWSGQASVNPPLPGPKPSIPEEHRQAIPESEAEDQEREPPSATVSPGQIPESDPADLSPRDTPQGEDMLNAIRRGVKLKKTTTNDRSAPRFS

SEQ ID NO: 5458 - protein, 1370 aa, Homo sapiens
MDPSDFPSPFDPLTLPEKPLAGDLPVDMEFGEDLLESQTAPTRGWAPPGPSPSSGALDLLDTPAGLEKDPGVLDGATELLGLGGLLYKAPSPPEVDHGPEGTLAWDAGDQTLEPGPGGQTPEVVPPDPGAGANSCSPEGLLEPLAPDSPITLQSPHIEEEETTSIATARRGSPGQEEELPQGQPQSPNAPPSPSVGETLGDGINSSQTKPGGSSPPAHPSLPGDGLTAKASEKPPERKRSERVRRAEPPKPEVVDSTESIPVSDEDSDAMVDDPNDEDFVPFRPRRSPRMSLRSSVSQRAGRSAVGTKMTCAHCRTPLQKGQTAYQRKGLPQLFCSSSCLTTFSKKPSGKKTCTFCKKEIWNTKDSVVAQTGSGGSFHEFCTSVCLSLYEAQQQRPIPQSGDPADATRCSICQKTGEVLHEVSNGSVVHRLCSDSCFSKFRANKGLKTNCCDQCGAYIYTKTGSPGPELLFHEGQQKRFCNTTCLGAYKKKNTRVYPCVWCKTLCKNFEMLSHVDRNGKTSLFCSLCCTTSYKVKQAGLTGPPRPCSFCRRSLSDPCYYNKVDRTVYQFCSPSCWTKFQRTSPEGGIHLSCHYCHSLFSGKPEVLDWQDQVFQFCCRDCCEDFKRLRGVVSQCEHCRQEKLLHEKLRFSGVEKSFCSEGCVLLYKQDFTKKLGLCCITCTYCSQTCQRGVTEQLDGSTWDFCSEDCKSKYLLWYCKAARCHACKRQGKLLETIHWRGQIRHFCNQQCLLRFYSQQNQPNLDTQSGPESLLNSQSPESKPQTPSQTKVENSNTVRTPEENGNLGKIPVKTRSAPTAPTPPPPPPPATPRKNKAAMCKPLMQNRGVSCKVEMKSKGSQTEEWKPQVIVLPIPVPIFVPVPMHLYCQKVPVPFSMPIPVPVPMFLPTTLESTDKIVETIEELKVKIPSNPLEADILAMAEMIAEAEELDKASSDLCDLVSNQSAEGLLEDCDLFGPARDDVLAMAVKMANVLDEPGQDLEADFPKNPLDINPSVDFLFDCGLVGPEDVSTEQDLPRTMRKGQKRLVLSESCSRDSMSSQPSCTGLNYSYGVNAWKCWVQSKYANGETSKGDELRFGPKPMRIKEDILACSAAELNYGLAQFVREITRPNGERYEPDSIYYLCLGIQQYLLENNRMVNIFTDLYYLTFVQELNKSLSTWQPTLLPNNTVFSRVEEEHLWECKQLGVYSPFVLLNTLMFFNTKFFGLQTAEEHMQLSFTNVVRQSRKCTTPRGTTKVVSIRYYAPVRQRKGRDTGPGKRKREDEAPILEQRENRMNPLRCPVKFYEFYLSKCPESLRTRNDVFYLQPERSCIAESPLWYSVIPMDRSMLESMLNRILAVREIYEELGRPGEEDLD

SEQ ID NO: 5459 - protein, 172 aa, Homo sapiens
MASDEGKLFVGGLSFDTNEQSLEQVFSKYGQISEVVVVKDRETQRSRGFGFVTFENIDDAKDAMMAMNGKSVDGRQIRVDQAGKSSDNRSRGYRGGSAGGRGFFRGGRGRGRGFSRGGGDRGYGGNRFESRSGGYGGSRDYYSSRSQSGGYSDRSSGGSYRDSYDSYATHNE

SEQ ID NO: 5460 - protein, 591 aa, Homo sapiens
MFGIQESIQRSGSSMKEEPLGSGMNAVRTWMQGAGVLDANTAAQSGVGLARAHFEKQPPSNLRKSNFFHFVLALYDRQGQPVEIERTAFVGFVEKEKEANSEKTNNGIHYRLQLLYSNGIRTEQDFYVRLIDSMTKQAIVYEGQDKNPEMCRVLLTHEIMCSRCCDKKSCGNRNETPSDPVIIDRFFLKFFLKCNQNCLKNAGNPRDMRRFQVVVSTTVNVDGHVLAVSDNMFVHNNSKHGRRARRLDPSEGTPSYLEHATPCIKAISPSEGWTTGGATVIIIGDNFFDGLQVIFGTMLVWSELITPHAIRVQTPPRHIPGVVEVTLSYKSKQFCKGTPGRFIYTALNEPTIDYGFQRLQKVIPRHPGDPERLPKEVILKRAADLVEALYGMPHNNQEIILKRAADIAEALYSVPRNHNQLPALANTSVHAGMMGVNSFSGQLAVNVSEASQATNQGFTRNSSSVSPHGYVPSTTPQQTNYNSVTTSMNGYGSAAMSNLGGSPTFLNGSAANSPYAIVPSSPTMASSTSLPSNCSSSSGIFSFSPANMVSAVKQKSAFAPVVRPQTSPPPTCTSTNGNSLQAISGMIVPPM

SEQ ID NO: 5461 - protein, 279 aa, Homo sapiens
MTERFDCHHCNESLFGKKYILREESPYCVVCFETLFANTCEECGKPIGCDCKDLSYKDRHWHEACFHCSQCRNSLVDKPFAAKEDQLLCTDCYSNEYSSKCQECKKTIMPGTRKMEYKGSSWHETCFICHRCQQPIGTKSFIPKDNQNFCVPCYEKQHAMQCVQCKKPITTGGVTYREQPWHKECFVCTACRKQLSGQRFTARDDFAYCLNCFCDLYAKKCAGCTNPISGLGGTKYISFEERQWHNDCFNCKKCSLSLVGRGFLTERDDILCPDCGKDI

SEQ ID NO: 5462 - protein, 1045 aa, Homo sapiens
MGEIEQRPTPGSRLGAPENSGISTLERGQKPPPTPSGKLVSIKIQMLDDTQEAFEVPQRAPGKVLLDAVCNHLNLVEGDYFGLEFPDHKKITVWLDLLKPIVKQIRRPKHVVVKFVVKFFPPDHTQLQEELTRYLFALQVKQDLAQGRLTCNDTSAALLISHIVQSEIGDFDEALDREHLAKNKYIPQQDALEDKIVEFHHNHIGQTPAESDFQLLEIARRLEMYGIRLHPAKDREGTKINLAVANTGILVFQGFTKINAFNWAKVRKLSFKRKRFLIKLRPDANSAYQDTLEFLMASRDFCKSFWKICVEHHAFFRLFEEPKPKPKPVLFSRGSSFRFSGRTQKQVLDYVKEGGHKKVQFERKHSKIHSIRSLASQPTELNSEVLEQSQQSTSLTFGEGAESPGGQSCRRGKEPKVSAGEPGSHPSPAPRRSPAGNKQADGAASAPTEEEEEVVKDRTQQSKPQPPQPSTGSLTGSPHLSELSVNSQGGVAPANVTLSPNLSPDTKQASPLISPLLNDQACPRTDDEDEGRRKRFPTDKAYFIAKEVSTTERTYLKDLEVITSWFQSTVSKEDAMPEALKSLIFPNFEPLHKFHTNFLKEIEQRLALWEGRSNAQIRDYQRIGDVMLKNIQGMKHLAAHLWKHSEALEALENGIKSSRRLENFCRDFELQKVCYLPLNTFLLRPLHRLMHYKQVLERLCKHHPPSHADFRDCRAALAEITEMVAQLHGTMIKMENFQKLHELKKDLIGIDNLVVPGREFIRLGSLSKLSGKGLQQRMFFLFNDVLLYTSRGLTASNQFKVHGQLPLYGMTIEESEDEWGVPHCLTLRGQRQSIIVAASSRSEMEKWVEDIQMAIDLAEKSSSPAPEFLASSPPDNKSPDEATAADQESEDDLSASRTSLERQAPHRGNTMVHVCWHRNTSVSMVDFSIAVENQLSGNLLRKFKNSNGWQKLWVVFTNFCLFFYKSHQDNHPLASLPLLGYSLTIPSESENIQKDYVFKLHFKSHVYYFRAESEYTFERWMEVIRSATSSASRPHVLSHKESLVY

SEQ ID NO: 5463 - protein, 362 aa, Homo sapiens
MKLHCCLFTLVASIIVPAAFVLEDVDFDQMVSLEANRSSYNASFPSSFELSASSHSDDDVIIAKEGTSVSIECLLTASHYEDVHWHNSKGQQLDGRSRGGKWLVSDNFLNITNVAFDDRGLYTCFVTSPIRASYSVTLRVIFTSGDMSVYYMIVCLIAFTITLILNVTRLCMMSSHLRKTEKAINEFFRTEGAEKLQKAFEIAKRIPIITSAKTLELAKVTQFKTMEFARYIEELARSVPLPPLILNCRAFVEEMFEAVRVDDPDDLGERIKERPALNAQGGIYVINPEMGRSNSPGGDSDDGSLNEQGQEIAVQVSVHLQSETKSIDTESQGSSHFSPPDDIGSAESNCNYKDGAYENCQL

SEQ ID NO: 5464 - protein, 361 aa, Homo sapiens
MYGKGKSNSSAVPSDSQAREKLALYVYEYLLHVGAQKSAQTFLSEIRWEKNITLGEPPGFLHSWWCVFWDLYCAAPERRETCEHSSEAKAFHDYSAAAAPSPVLGNIPPGDGMPVGPVPPGFFQPFMSPRYPGGPRPPLRIPNQALGGVPGSQPLLPSGMDPTRQQGHPNMGGPMQRMTPPRGMVPLGPQNYGGAMRPPLNALGGPGMPGMNMGPGGGRPWPNPTNANSIPYSSASPGNYVGPPGGGGPPGTPIMPSPADSTNSGDNMYTLMNAVPPGPNRPNFPMGPGSDGPMGGLGGMESHHMNGSLGSGDMDSISKNSPNNMSLSNQPGTPRDDGEMGGNFLNPFQSESYSPSMTMSV

SEQ ID NO: 5465 - protein, 392 aa, Homo sapiens
MAAAALGQIWARKLLSVPWLLCGPRRYASSSFKAADLQLEMTQKPHKKPGPGEPLVFGKTFTDHMLMVEWNDKGWGQPRIQPFQNLTLHPASSSLHYSLQLFEGMKAFKGKDQQVRLFRPWLNMDRMLRSAMRLCLPSFDKLELLECIRRLIEVDKDWVPDAAGTSLYVRPVLIGNEPSLGVSQPTRALLFVILCPVGAYFPGGSVTPVSLLADPAFIRAWVGGVGNYKLGGNYGPTVLVQQEALKRGCEQVLWLYGPDHQLTEVGTMNIFVYWTHEDGVLELVTPPLNGVILPGVVRQSLLDMAQTWGEFRVVERTITMKQLLRALEEGRVREVFGSGTACQVCPVHRILYKDRNLHIPTMENGPELILRFQKELKEIQYGIRAHEWMFPV

SEQ ID NO: 5466 - protein, 127 aa, Homo sapiens
MYIDSYNSRGFMINGNRVLGPCALLPHSVVQWNVGSHQDITEDSFSLFWLLEPRIEIVVVGTGDRTERLQSQVLQAMRQRGIAVEVQDTPNACATFNFLCHEGRVTGAALIPPPGGTSLTSLGQAAQ

SEQ ID NO: 5467 - protein, 275 aa, Homo sapiens
MAEPASVAAESLAGSRARAARTVLGQVVLPGEELLLPEQEDAEGPGGAVERPLSLNARACSRVRVVCGPGLRRCGDRLLVTKCGRLRHKEPGSGSGGGVYWVDSQQKRYVPVKGDHVIGIVTAKSGDIFKVDVGGSEPASLSYLSFEGATKRNRPNVQVGDLIYGQFVVANKDMEPEMVCIDSCGRANGMGVIGQDGLLFKVTLGLIRKLLAPDCEIIQEVGKLYPLEIVFGMNGRIWVKAKTIQQTLILANILEACEHMTSDQRKQIFSRLAES

SEQ ID NO: 5468 - protein, 334 aa, Homo sapiens
MRLTPRALCSAAQAAWRENFPLCGRDVARWFPGHMAKGLKKMQSSLKLVDCIIEVHDARIPLSGRNPLFQETLGLKPHLLVLNKMDLADLTEQQKIMQHLEGEGLKNVIFTNCVKDENVKQIIPMVTELIGRSHRYHRKENLEYCIMVIGVPNVGKSSLINSLRRQHLRKGKATRVGGEPGITRAVMSKIQVSERPLMFLLDTPGVLAPRIESVETGLKLALCGTVLDHLVGEETMADYLLYTLNKHQRFGYVQHYGLGSACDNVERVLKSVAVKLGKTQKVKVLTGTGNVNIIQPNYPAAARDFLQTFRRGLLGSVMLDLDVLRGHPPAETLP

SEQ ID NO: 5469 - protein, 897 aa, Homo sapiens
MNISGSSCGSPNSADTSSDFKDLWTKLKECHDREVQGLQVKVTKLKQERILDAQRLEEFFTKNQQLREQQKVLHETIKVLEDRLRAGLCDRCAVTEEHMRKKQQEFENIRQQNLKLITELMNERNTLQEENKKLSEQLQQKIENDQQHQAAELECEEDVIPDSPITAFSFSGVNRLRRKENPHVRYIEQTHTKLEHSVCANEMRKVSKSSTHPQHNPNENEILVADTYDQSQSPMAKAHGTSSYTPDKSSFNLATVVAETLGLGVQEESETQGPMSPLGDELYHCLEGNHKKQPFEESTRNTEDSLRFSDSTSKTPPQEELPTRVSSPVFGATSSIKSGLDLNTSLSPSLLQPGKKKHLKTLPFSNTCISRLEKTRSKSEDSALFTHHSLGSEVNKIIIQSSNKQILINKNISESLGEQNRTEYGKDSNTDKHLEPLKSLGGRTSKRKKTEEESEHEVSCPQASFDKENAFPFPMDNQFSMNGDCVMDKPLDLSDRFSAIQRQEKSQGSETSKNKFRQVTLYEALKTIPKGFSSSRKASDGNCTLPKDSPGEPCSQECIILQPLNKCSPDNKPSLQIKEENAVFKIPLRPRESLETENVLDDIKSAGSHEPIKIQTRSDHGGCELASVLQLNPCRTGKIKSLQNNQDVSFENIQWSIDPGADLSQYKMDVTVIDTKDGSQSKLGGETVDMDCTLVSETVLLKMKKQEQKGEKSSNEERKMNDSLEDMFDRTTHEEYESCLADSFSQAADEEEELSTATKKLHTHGDKQDKVKQKAFVEPYFKGDERETSLQNFPHIEVVRKKEERRKLLGHTCKECEIYYADMPAEEREKKLASCSRHRFRYIPPNTPENFWEVGFPSTQTCMERGYIKEDLDPCPRPKRRQPYNAIFSPKGKEQKT

SEQ ID NO: 5470 - protein, 222 aa, Homo sapiens
MAASVRQARSLLGVAATLAPGSRGYRARPPPRRRPGPRWPDPEDLLTPRWQLGPRYAAKQFARYGAASGVVPGSLWPSPEQLRELEAEEREWYPSLATMQESLRVKQLAEEQKRREREQHIAECMAKMPQMIVNWQQQQRENWEKAQADKERRARLQAEAQELLGYQVDPRSARFQELLQDLEKKERKRLKEEKQKRKKEARAAALAAAVAQDPAASGAPSS

SEQ ID NO: 5471 - protein, 697 aa, Homo sapiens
MCKSLRYCFSHCLYLAMTRLEEVNREVNMHSSVRYLGYLARINLLVAICLGLYVRWEKTANSLILVIFILGLFVLGIASILYYYFSMEAASLSLSNLWFGFLLGLLCFLDNSSFKNDVKEESTKYLLLTSIVLRILCSLVERISGYVRHRPTLLTTVEFLELVGFAIASTTMLVEKSLSVILLVVALAMLIIDLRMKSFLAIPNLVIFAVLLFFSSLETPKNPIAFACFFICLITDPFLDIYFSGLSVTERWKPFLYRGRICRRLSVVFAGMIELTFFILSAFKLRDTHLWYFVIPGFSIFGIFWMICHIIFLLTLWGFHTKLNDCHKVYFTHRTDYNSLDRIMASKGMRHFCLISEQLVFFSLLATAILGAVSWQPTNGIFLSMFLIVLPLESMAHGLFHELGNCLGGTSVGYAIVIPTNFCSPDGQPTLLPPEHVQELNLRSTGMLNAIQRFFAYHMIETYGCDYSTSGLSFDTLHSKLKAFLELRTVDGPRHDTYILYYSGHTHGTGEWALAGGDTLRLDTLIEWWREKNGSFCSRLIIVLDSENSTPWVKEVRKINDQYIAVQGAELIKTVDIEEADPPQLGDFTKDWVEYNCNSSNNICWTEKGRTVKAVYGVSKRWSDYTLHLPTGSDVAKHWMLHFPRITYPLVHLANWLCGLNLFWICKTCFRCLKRLKMSWFLPTVLDTGQGFKLVKS

SEQ ID NO: 5472 - protein, 421 aa, Homo sapiens
MSATLILEPPGRCCWNEPVRIAVRGLAPEQRVTLRASLRDEKGALFRAHARYCADARGELDLERAPALGGSFAGLEPMGLLWALEPEKPFWRFLKRDVQIPFVVELEVLDGHDPEPGRLLCQAQHERHFLPPGVRRQSVRAGRVRATLFLPPGPGPFPGIIDIFGIGGGLLEYRASLLAGHGFATLALAYYNFEDLPNNMDNISLEYFEEAVCYMLQHPQVKGPGIGLLGISLGADICLSMASFLKNVSATVSINGSGISGNTAINYKHSSIPPLGYDLRRIKVAFSGLVDIVDIRNALVGGYKNPSMIPIEKAQGPILLIVGQDDHNWRSELYAQTVSERLQAHGKEKPQIICYPGTGHYIEPPYFPLCPASLHRLLNKHVIWGGEPRAHSKAQEDAWKQILAFFCKHLGGTQKTAVPKL

SEQ ID NO: 5473 - protein, 1906 aa, Homo sapiens
MQSFRERCGFHGKQQNYQQTSQETSRLENYRQPSQAGLSCDRQRLLAKDYYNPQPYPSYEGGAGTPSGTAAAVAADKYHRGSKALPTQQGLQGRPAFPGYGVQDSSPYPGRYAGEESLQAWGAPQPPPPQPQPLPAGVAKYDENLMKKTAVPPSRQYAEQGAQVPFRTHSLHVQQPPPPQQPLAYPKLQRQKLQNDIASPLPFPQGTHFPQHSQSFPTSSTYSSSVQGGGQGAHSYKSCTAPTAQPHDRPLTASSSLAPGQRVQNLHAYQSGRLSYDQQQQQQQQQQQQQQALQSRHHAQETLHYQNLAKYQHYGQQGQGYCQPDAAVRTPEQYYQTFSPSSSHSPARSVGRSPSYSSTPSPLMPNLENFPYSQQPLSTGAFPAGITDHSHFMPLLNPSPTDATSSVDTQAGNCKPLQKDKLPENLLSDLSLQSLTALTSQVENISNTVQQLLLSKAAVPQKKGVKNLVSRTPEQHKSQHCSPEGSGYSAEPAGTPLSEPPSSTPQSTHAEPQEADYLSGSEDPLERSFLYCNQARGSPARVNSNSKAKPESVSTCSVTSPDDMSTKSDDSFQSLHGSLPLDSFSKFVAGERDCPRLLLSALAQEDLASEILGLQEAIGEKADKAWAEAPSLVKDSSKPPFSLENHSACLDSVAKSAWPRPGEPEALPDSLQLDKGGNAKDFSPGLFEDPSVAFATPDPKKTTGPLSFGTKPTLGVPAPDPTTAAFDCFPDTTAASSADSANPFAWPEENLGDACPRWGLHPGELTKGLEQGGKASDGISKGDTHEASACLGFQEEDPPGEKVASLPGDFKQEEVGGVKEEAGGLLQCPEVAKADRWLEDSRHCCSTADFGDLPLLPPTSRKEDLEAEEEYSSLCELLGSPEQRPGMQDPLSPKAPLICTKEEVEEVLDSKAGWGSPCHLSGESVILLGPTVGTESKVQSWFESSLSHMKPGEEGPDGERAPGDSTTSDASLAQKPNKPAVPEAPIAKKEPVPRGKSLRSRRVHRGLPEAEDSPCRAPVLPKDLLLPESCTGPPQGQMEGAGAPGRGASEGLPRMCTRSLTALSEPRTPGPPGLTTTPAPPDKLGGKQRAAFKSGKRVGKPSPKAASSPSNPAALPVASDSSPMGSKTKETDSPSTPGKDQRSMILRSRTKTQEIFHSKRRRPSEGRLPNCRATKKLLDNSHLPATFKVSSSPQKEGRVSQRARVPKPGAGSKLSDRPLHALKRKSAFMAPVPTKKRNLVLRSRSSSSSNASGNGGDGKEERPEGSPTLFKRMSSPKKAKPTKGNGEPATKLPPPETPDACLKLASRAAFQGAMKTKVLPPRKGRGLKLEAIVQKITSPSLKKFACKAPGASPGNPLSPSLSDKDRGLKGAGGSPVGVEEGLVNVGTGQKLPTSGADPLCRNPTNRSLKGKLMNSKKLSSTDCFKTEAFTSPEALQPGGTALAPKKRSRKGRAGAHGLSKGPLEKRPYLGPALLLTPRDRASGTQGASEDNSGGGGKKPKMEELGLASQPPEGRPCQPQTRAQKQPGHTNYSSYSKRKRLTRGRAKNTTSSPCKGRAKRRRQQQVLPLDPAEPEIRLKYISSCKRLRSDSRTPAFSPFVRVEKRDAFTTICTVVNSPGDAPKPHRKPSSSASSSSSSSSFSLDAAGASLATLPGGSILQPRPSLPLSSTMHLGPVVSKALSTSCLVCCLCQNPANFKDLGDLCGPYYPEHCLPKKKPKLKEKVRPEGTCEEASLPLERTLKGPECAAAATAGKPPRPDGPADPAKQGPLRTSARGLSRRLQSCYCCDGREDGGEEAAPADKGRKHECSKEAPAEPGGEAQEHWVHEACAVWTGGVYLVAGKLFGLQEAMKVAVDMMCSSCQEAGATIGCCHKGCLHTYHYPCASDAGCIFIEENFSLKCPKHKRLP

SEQ ID NO: 5474 - protein, 184 aa, Homo sapiens
MATALALRSLYRARPSLRCPPVELPWAPRRGHRLSPADDELYQRTRISLLQREAAQAMYIDSYNSRGFMINGNRVLGPCALLPHSVVQWNVGSHQDITEDSFSLFWLLEPRIEIVVVGTGDRTERLQSQVLQAMRQRGIAVEVQDTPNACATFNFLCHEGRVTGAALIPPPGGTSLTSLGQAAQ

SEQ ID NO: 5475 - protein, 504 aa, Homo sapiens
MTWLVLLGTLLCMLRVGLGTPDSEGFPPRALHNCPYKCICAADLLSCTGLGLQDVPAELPAATADLDLSHNALQRLRPGWLAPLFQLRALHLDHNELDALGRGVFVNASGLRLLDLSSNTLRALGRHDLDGLGALEKLLLFNNRLVHLDEHAFHGLRALSHLYLGCNELASFSFDHLHGLSATHLLTLDLSSNRLGHISVPELAALPAFLKNGLYLHNNPLPCDCRLYHLLQRWHQRGLSAVRDFAREYVCLAFKVPASRVRFFQHSRVFENCSSAPALGLERPEEHLYALVGRSLRLYCNTSVPAMRIAWVSPQQELLRAPGSRDGSIAVLADGSLAIGNVQEQHAGLFVCLATGPRLHHNQTHEYNVSVHFPRPEPEAFNTGFTTLLGCAVGLVLVLLYLFAPPCRCCRRACRCRRWPQTPSPLQELSAQSSVLSTTPPDAPSRKASVHKHVVFLEPGRRGLNGRVQLAVAEEFDLYNPGGLQLKAGSESASSIGSEGPMTT

SEQ ID NO: 5476 - protein, 791 aa, Homo sapiens
MAGTSAPGSKRRSEPPAPRPGPPPGTGHPPSKRARGFSAAAAPDPDDPFGAHGDFTADDLEELDTLASQALSQCPAAARDVSSDHKVHRLLDGMSKNPSGKNRETVPIKDNFELEVLQAQYKELKEKMKVMEEEVLIKNGEIKILRDSLHQTESVLEEQRRSHFLLEQEKTQALSDKEKEFSKKLQSLQSELQFKDAEMNELRTKLQTSERANKLAAPSVSHVSPRKNPSVVIKPEACSPQFGKTSFPTKESFSANMSLPHPCQTESGYKPLVGREDSKPHSLRGDSIKQEEAQKSFVDSWRQRSNTQGSILINLLLKQPLIPGSSLSLCHLLSSSSESPAGTPLQPPGFGSTLAGMSGLRTTGSYDGSFSLSALREAQNLAFTGLNLVARNECSRDGDPAEGGRRAFPLCQLPGAVHFLPLVQFFIGLHCQALQDLAAAKRSGAPGDSPTHSSCVSSGVETNPEDSVCILEGFSVTALSILQHLVCHSGAVVSLLLSGVGADSAAGEGNRSLVHRLSDGDMTSALRGVADDQGQHPLLKMLLHLLAFSSAATGHLQASVLTQCLKVLVKLAENTSCDFLPRFQCVFQVLPKCLSPETPLPSVLLAVELLSLLADHDQLAPQLCSHSEGCLLLLLYMYITSRPDRVALETQWLQLEQEVVWLLAKLGVQSPLPPVTGSNCQCNVEVVRALTVMLHRQWLTVRRAGGPPRTDQQRRTVRCLRDTVLLLHGLSQKDKLFMMHCVEVLHQFDQVMPGVSMLIRGLPDVTDCEEAALDDLCAAETDVEDPEVECG

SEQ ID NO: 5477 - protein, 505 aa, Homo sapiens
MEGGPAVCCQDPRAELVERVAAIDVTHLEEADGGPEPTRNGVDPPPRARAASVIPGSTSRLLPARPSLSARKLSLQERPAGSYLEAQAGPYATGPASHISPRAWRRPTIESHHVAISDAEDCVQLNQYKLQSEIGKGAYGVVRLAYNESEDRHYAMKVLSKKKLLKQYGFPRRPPPRGSQAAQGGPAKQLLPLERVYQEIAILKKLDHVNVVKLIEVLDDPAEDNLYLVFDLLRKGPVMEVPCDKPFSEEQARLYLRDVILGLEYLHCQKIVHRDIKPSNLLLGDDGHVKIADFGVSNQFEGNDAQLSSTAGTPAFMAPEAISDSGQSFSGKALDVWATGVTLYCFVYGKCPFIDDFILALHRKIKNEPVVFPEEPEISEELKDLILKMLDKNPETRIGVPDIKLHPWVTKNGEEPLPSEEEHCSVVEVTEEEVKNSVRLIPSWTTVILVKSMLRKRSFGNPFEPQARREERSMSAPGNLLVKEGFGEGGKSPELPGVQEDEAAS

SEQ ID NO: 5478 - protein, 189 aa, Homo sapiens
MLLGQLSTLLCLLSGALPTGSGRPEPQSPRPQSWAAANQTWALGPGALPPLVPASALGSWKAFLGLQKARQLGMGRLQRGQDEVAAVTLPLNPQEVIQGMCKAVPFVQVFSRPGCSAIRLRNHLCFGHCSSLYIPGSDPTPLVLCNSCMPARKRWAPVVLWCLTGSSASRRRVKISTMLIEGCHCSPKA

SEQ ID NO: 5479 - protein, 514 aa, Homo sapiens
MDLANHGLILLQQLNAQREFGFLCDCTVAIGDVYFKAHKSVLASFSNYFKMLFVHQTSECVRLKPTDIQPDIFSYLLHLMYTGKMAPQLIDPVRLEQGIKFLHAYPLIQEASLASQGAFSHPDQVFPLASSLYGIQIADHQLRQATKIASAPEKLGRDPRPQTSRISQEQVPEASQLSQLTSNLAQVNRTNMTPSDPLQTSLSPELVSTPVPPPPPGEETNLEASSSDEQPASLTIAHVKPSIMKRNGSFPKYYACHLCGRRFTLRSSLREHLQIHTGVPFTSSQQGESRVPLTLCSNAADLGKDAMEVPEAGMISDSELQHISDSPIIDGQQQSETPPPSDIADIDNLEQADQEREVKRRKYECTICGRKFIQKSHWREHMYIHTGKPFKCSTCDKSFCRANQAARHVCLNQSIDTYTMVDKQTLELCTFEEGSQMDNMLVQTNKPYKCNLCDKTFSTPNEVVKHSCQNQNSDVFALDEGRSILLGSGDSEVTEPDHPVLASIKKEQETVLLD

SEQ ID NO: 5480 - protein, 1894 aa, Homo sapiens
MKAMPWNWTCLLSHLLMVGMGSSTLLTRQPAPLSQKQRSFVTFRGEPAEGFNHLVVDERTGHIYLGAVNRIYKLSSDLKVLVTHETGPDEDNPKCYPPRIVQTCNEPLTTTNNVNKMLLIDYKENRLIACGSLYQGICKLLRLEDLFKLGEPYHKKEHYLSGVNESGSVFGVIVSYSNLDDKLFIATAVDGKPEYFPTISSRKLTKNSEADGMFAYVFHDEFVASMIKIPSDTFTIIPDFDIYYVYGFSSGNFVYFLTLQPEMVSPPGSTTKEQVYTSKLVRLCKEDTAFNSYVEVPIGCERSGVEYRLLQAAYLSKAGAVLGRTLGVHPDDDLLFTVFSKGQKRKMKSLDESALCIFILKQINDRIKERLQSCYRGEGTLDLAWLKVKDIPCSSALLTIDDNFCGLDMNAPLGVSDMVRGIPVFTEDRDRMTSVIAYVYKNHSLAFVGTKSGKLKKIRVDGPRGNALQYETVQVVDPGPVLRDMAFSKDHEQLYIMSERQLTRVPVESCGQYQSCGECLGSGDPHCGWCVLHNTCTRKERCERSKEPRRFASEMKQCVRLTVHPNNISVSQYNVLLVLETYNVPELSAGVNCTFEDLSEMDGLVVGNQIQCYSPAAKEVPRIITENGDHHVVQLQLKSKETGMTFASTSFVFYNCSVHNSCLSCVESPYRCHWCKYRHVCTHDPKTCSFQEGRVKLPEDCPQLLRVDKILVPVEVIKPITLKAKNLPQPQSGQRGYECILNIQGSEQRVPALRFNSSSVQCQNTSYSYEGMEINNLPVELTVVWNGHFNIDNPAQNKVHLYKCGAMRESCGLCLKADPDFACGWCQGPGQCTLRQHCPAQESQWLELSGAKSKCTNPRITEIIPVTGPREGGTKVTIRGENLGLEFRDIASHVKVAGVECSPLVDGYIPAEQIVCEMGEAKPSQHAGFVEICVAVCRPEFMARSSQLYYFMTLTLSDLKPSRGPMSGGTQVTITGTNLNAGSNVVVMFGKQPCLFHRRSPSYIVCNTTSSDEVLEMKVSVQVDRAKIHQDLVFQYVEDPTIVRIEPEWSIVSGNTPIAVWGTHLDLIQNPQIRAKHGGKEHINICEVLNATEMTCQAPALALGPDHQSDLTERPEEFGFILDNVQSLLILNKTNFTYYPNPVFEAFGPSGILELKPGTPIILKGKNLIPPVAGGNVKLNYTVLVGEKPCTVTVSDVQLLCESPNLIGRHKVMARVGGMEYSPGMVYIAPDSPLSLPAIVSIAVAGGLLIIFIVAVLIAYKRKSRESDLTLKRLQMQMDNLESRVALECKEAFAELQTDIHELTSDLDGAGIPFLDYRTYTMRVLFPGIEDHPVLRDLEVPGYRQERVEKGLKLFAQLINNKVFLLSFIRTLESQRSFSMRDRGNVASLIMTVLQSKLEYATDVLKQLLADLIDKNLESKNHPKLLLRRTESVAEKMLTNWFTFLLYKFLKECAGEPLFSLFCAIKQQMEKGPIDAITGEARYSLSEDKLIRQQIDYKTLVLSCVSPDNANSPEVPVKILNCDTITQVKEKILDAIFKNVPCSHRPKAADMDLEWRQGSGARMILQDEDITTKIENDWKRLNTLAHYQVPDGSVVALVSKQVTAYNAVNNSTVSRTSASKYENMIRYTGSPDSLRSRTPMITPDLESGVKMWHLVKNHEHGDQKEGDRGSKMVSEIYLTRLLATKGTLQKFVDDLFETIFSTAHRGSALPLAIKYMFDFLDEQADKHGIHDPHVRHTWKSNCLPLRFWVNMIKNPQFVFDIHKNSITDACLSVVAQTFMDSCSTSEHRLGKDSPSNKLLYAKDIPSYKNWVERYYSDIGKMPAISDQDMNAYLAEQSRMHMNEFNTMSALSEIFSYVGKYSEEILGPLDHDDQCGKQKLAYKLEQVITLMSLDS

SEQ ID NO: 5481 - protein, 76 aa, Homo sapiens
MVCIPCIVIPVLLWIYKKFLEPYIYPLVSPFVSRIWPKKAIQESNDTNKGKVNFKGADMNGLPTKGPTEICDKKKD

SEQ ID NO: 5482 - protein, 558 aa, Homo sapiens
MSNDGRSRNRDRRYDEVPSDLPYQDTTIRTHPTLHDSERAVSADPLPPPPLPLQPPFGPDFYSSDTEEPAIAPDLKPVRRFVPDSWKNFFRGKKKDPEWDKPVSDIRYISDGVECSPPASPARPNHRSPLNSCKDPYGGSEGTFSSRKEADAVFPRDPYGSLDRHTQTVRTYSEKVEEYNLRYSYMKSWAGLLRILGVVELLLGAGVFACVTAYIHKDSEWYNLFGYSQPYGMGGVGGLGSMYGGYYYTGPKTPFVLVVAGLAWITTIIILVLGMSMYYRTILLDSNWWPLTEFGINVALFILYMAAAIVYVNDTNRGGLCYYPLFNTPVNAVFCRVEGGQIAAMIFLFVTMIVYLISALVCLKLWRHEAARRHREYMEQQEINEPSLSSKRKMCEMATSGDRQRDSEVNFKELRTAKMKPELLSGHIPPGHIPKPIVMPDYVAKYPVIQTDDERERYKAVFQDQFSEYKELSAEVQAVLRKFDELDAVMSRLPHHSESRQEHERISRIHEEFKKKKNDPTFLEKKERCDYLKNKLSHIKQRIQEYDKVMNWDVQGYS

SEQ ID NO: 5483 - protein, 166 aa, Homo sapiens
MAASGVEKSSKKKTEKKLAAREEAKLLAGFMGVMNNMRKQKTLCDVILMVQERKIPAHRVVLAAASHFFNLMFTTNMLESKSFEVELKDAEPDIIEQLVEFAYTARISVNSNNVQSLLDAANQYQIEPVKKMCVDFLKEQVDASNCLGEAEKVDQSLPECGMLFTV

SEQ ID NO: 5484 - protein, 668 aa, Homo sapiens
MWLFFGITGLLTAALSGHPSPAPPDQLNTSSAESELWEPGERLPVRLTNGSSSCSGTVEVRLEASWEPACGALWDSRAAEAVCRALGCGGAEAASQLAPPTPELPPPPAAGNTSVAANATLAGAPALLCSGAEWRLCEVVEHACRSDGRRARVTCAENRALRLVDGGGACAGRVEMLEHGEWGSVCDDTWDLEDAHVVCRQLGCGWAVQALPGLHFTPGRGPIHRDQVNCSGAEAYLWDCPGLPGQHYCGHKEDAGAVCSEHQSWRLTGGADRCEGQVEVHFRGVWNTVCDSEWYPSEAKVLCQSLGCGTAVERPKGLPHSLSGRMYYSCNGEELTLSNCSWRFNNSNLCSQSLAARVLCSASRSLHNLSTPEVPASVQTVTIESSVTVKIENKESRELMLLIPSIVLGILLLGSLIFIAFILLRIKGKYALPVMVNHQHLPTTIPAGSNSYQPVPITIPKEVFMLPIQVQAPPPEDSDSGSDSDYEHYDFSAQPPVALTTFYNSQRHRVTDEEVQQSRFQMPPLEEGLEELHASHIPTANPGHCITDPPSLGPQYHPRSNSESSTSSGEDYCNSPKSKLPPWNPQVFSSERSSFLEQPPNLELAGTQPAFSAGPPADDSSSTSSGEWYQNFQPPPQPPSEEQFGCPGSPSPQPDSTDNDDYDDISAA

SEQ ID NO: 5485 - protein, 519 aa, Homo sapiens
MARAGPAWLLLAIWVVLPSWLSSAKVSSLIERISDPKDLKKLLRTRNNVLVLYSKSEVAAENHLRLLSTVAQAVKGQGTICWVDCGDAESRKLCKKMKVDLSPKDKKVELFHYQDGAFHTEYNRAVTFKSIVAFLKDPKGPPLWEEDPGAKDVVHLDSEKDFRRLLKKEEKPLLIMFYAPWCSMCKRMMPHFQKAATQLRGHAVLAGMNVYSSEFENIKEEYSVRGFPTICYFEKGRFLFQYDNYGSTAEDIVEWLKNPQPPQPQVPETPWADEGGSVYHLTDEDFDQFVKEHSSVLVMFHAPWCGHCKKMKPEFEKAAEALHGEADSSGVLAAVDATVNKALAERFHISEFPTLKYFKNGEKYAVPVLRTKKKFLEWMQNPEAPPPPEPTWEEQQTSVLHLVGDNFRETLKKKKHTLVMFYAPWCPHCKKVIPHFTATADAFKDDRKIACAAVDCVKDKNQDLCQQEAVKGYPTFHYYHYGKFAEKYDSDRTELGFTNYIRALREGDHERLGKKKEEL

SEQ ID NO: 5486 - protein, 1130 aa, Homo sapiens
MLEICLKLVGCKSKKGLSSSSSCYLEEALQRPVASDFEPQGLSEAARWNSKENLLAGPSENDPNLFVALYDFVASGDNTLSITKGEKLRVLGYNHNGEWCEAQTKNGQGWVPSNYITPVNSLEKHSWYHGPVSRNAAEYLLSSGINGSFLVRESESSPGQRSISLRYEGRVYHYRINTASDGKLYVSSESRFNTLAELVHHHSTVADGLITTLHYPAPKRNKPTVYGVSPNYDKWEMERTDITMKHKLGGGQYGEVYEGVWKKYSLTVAVKTLKEDTMEVEEFLKEAAVMKEIKHPNLVQLLGVCTREPPFYIITEFMTYGNLLDYLRECNRQEVNAVVLLYMATQISSAMEYLEKKNFIHRDLAARNCLVGENHLVKVADFGLSRLMTGDTYTAHAGAKFPIKWTAPESLAYNKFSIKSDVWAFGVLLWEIATYGMSPYPGIDLSQVYELLEKDYRMERPEGCPEKVYELMRACWQWNPSDRPSFAEIHQAFETMFQESSISDEVEKELGKQGVRGAVSTLLQAPELPTKTRTSRRAAEHRDTTDVPEMPHSKGQGESDPLDHEPAVSPLLPRKERGPPEGGLNEDERLLPKDKKTNLFSALIKKKKKTAPTPPKRSSSFREMDGQPERRGAGEEEGRDISNGALAFTPLDTADPAKSPKPSNGAGVPNGALRESGGSGFRSPHLWKKSSTLTSSRLATGEEEGGGSSSKRFLRSCSASCVPHGAKDTEWRSVTLPRDLQSTGRQFDSSTFGGHKSEKPALPRKRAGENRSDQVTRGTVTPPPRLVKKNEEAADEVFKDIMESSPGSSPPNLTPKPLRRQVTVAPASGLPHKEEAGKGSALGTPAAAEPVTPTSKAGSGAPGGTSKGPAEESRVRRHKHSSESPGRDKGKLSRLKPAPPPPPAASAGKAGGKPSQSPSQEAAGEAVLGAKTKATSLVDAVNSDAAKPSQPGEGLKKPVLPATPKPQSAKPSGTPISPAPVPSTLPSASSALAGDQPSSTAFIPLISTRVSLRKTRQPPERIASGAITKGVVLDSTEALCLAISRNSEQMASHSAVLEAGKNLYTFCVSYVDSIQQMRNKFAFREAINKLENNLRELQICPATAGSGPAATQDFSKLLSSVKEISDIVQR

SEQ ID NO: 5487 - protein, 735 aa, Homo sapiens
MEGAGGANDKKKISSERRKEKSRDAARSRRSKESEVFYELAHQLPLPHNVSSHLDKASVMRLTISYLRVRKLLDAGDLDIEDDMKAQMNCFYLKALDGFVMVLTDDGDMIYISDNVNKYMGLTQFELTGHSVFDFTHPCDHEEMREMLTHRNGLVKKGKEQNTQRSFFLRMKCTLTSRGRTMNIKSATWKVLHCTGHIHVYDTNSNQPQCGYKKPPMTCLVLICEPIPHPSNIEIPLDSKTFLSRHSLDMKFSYCDERITELMGYEPEELLGRSIYEYYHALDSDHLTKTHHDMFTKGQVTTGQYRMLAKRGGYVWVETQATVIYNTKNSQPQCIVCVNYVVSGIIQHDLIFSLQQTECVLKPVESSDMKMTQLFTKVESEDTSSLFDKLKKEPDALTLLAPAAGDTIISLDFGSNDTETDDQQLEEVPLYNDVMLPSPNEKLQNINLAMSPLPTAETPKPLRSSADPALNQEVALKLEPNPESLELSFTMPQIQDQTPSPSDGSTRQSSPEPNSPSEYCFYVDSDMVNEFKLELVEKLFAEDTEAKNPFSTQDTDLDLEMLAPYIPMDDDFQLRSFDQLSPLESSSASPESASPQSTVTVFQQTQIQEPTANATTTTATTDELKTVTKDRMEDIKILIASPSPTHIHKETTSATSSPYRDTQSRTASPNRAGKGVIEQTEKSHPRSPNVLSVALSQRTTVPEEELNPKILALQNAQRKRKMEHDGSLFQAVGII

SEQ ID NO: 5488 - protein, 467 aa, Homo sapiens
MLLLLLLPLLWGRERVEGQKSNRKDYSLTMQSSVTVQEGMCVHVRCSFSYPVDSQTDSDPVHGYWFRAGNDISWKAPVATNNPAWAVQEETRDRFHLLGDPQTKNCTLSIRDARMSDAGRYFFRMEKGNIKWNYKYDQLSVNVTALTHRPNILIPGTLESGCFQNLTCSVPWACEQGTPPMISWMGTSVSPLHPSTTRSSVLTLIPQPQHHGTSLTCQVTLPGAGVTTNRTIQLNVSYPPQNLTVTVFQGEGTASTALGNSSSLSVLEGQSLRLVCAVDSNPPARLSWTWRSLTLYPSQPSNPLVLELQVHLGDEGEFTCRAQNSLGSQHVSLNLSLQQEYTGKMRPVSGVLLGAVGGAGATALVFLSFCVIFIVVRSCRKKSARPAADVGDIGMKDANTIRGSASQGNLTESWADDNPRHHGLAAHSSGEEREIQYAPLSFHKGEPQDLSGQEATNNEYSEIKIPK

SEQ ID NO: 5489 - protein, 634 aa, Homo sapiens
MATSNNPRKFSEKIALHNQKQAEETAAFEEVMKDLSLTRAARLQLQKSQYLQLGPSRGQYYGGSLPNVNQIGSGTMDLPFQTPFQSSGLDTSRTTRHHGLVDRVYRERGRLGSPHRRPLSVDKHGRQADSCPYGTMYLSPPADTSWRRTNSDSALHQSTMTPTQPESFSSGSQDVHQKRVLLLTVPGMEETTSEADKNLSKQAWDTKKTGSRPKSCEVPGINIFPSADQENTTALIPATHNTGGSLPDLTNIHFPSPLPTPLDPEEPTFPALSSSSSTGNLAANLTHLGIGGAGQGMSTPGSSPQHRPAGVSPLSLSTEARRQQASPTLSPLSPITQAVAMDALSLEQQLPYAFFTQAGSQQPPPQPQPPPPPPPASQQPPPPPPPQAPVRLPPGGPLLPSASLTRGPQPPPLAVTVPSSLPQSPPENPGQPSMGIDIASAPALQQYRTSAGSPANQSPTSPVSNQGFSPGSSPQHTSTLGSVFGDAYYEQQMAARQANALSHQLEQFNMMENAISSSSLYSPGSTLNYSQAAMMGLTGSHGSLPDSQQLGYASHSGIPNIILTVTGESPPSLSKELTSSLAGVGDVSFDSDSQFPLDELKIDPLTLDGLHMLNDPDMVLADPATEDTFRMDRL

SEQ ID NO: 5490 - protein, 357 aa, Homo sapiens
MEFDCEGLRRLLGKYKFRDLTVEELRNVNVFFPHFKYSMDTYGNTYNIPIRFWILDSHPFAPPICFLKPTANMGILVGKHVDAQGRIYLPYLQNWSHPKSVIVGLIKEMIAKFQEELPMYSLSSSDEARQVDLLAYIAKITEGVSDTNSKSWANHENKTVNKITVVGGGELGIACTLAISAKGIADRLVLLDLSEGTKGATMDLEIFNLPNVEISKDLSASAHSKVVIFTVNSLGSSQSYLDVVQSNVDMFRALVPALGHYSQHSVLLVASQPVEIMTYVTWKLSTFPANRVIGIGCNLDSQRLQYIITNVLKAQTSGKEVWVIGEQGEDKVLTWSGQEEVVSHTSQVQLSNRDIMI

SEQ ID NO: 5491 - protein, 369 aa, Homo sapiens
MPPMLWLLLHFAAPALGFYFSISCPSGKQCQQALLSGNDILLYCNSSGAHWYYLFTQGKKGRLTSLTNISNMEIMPEGSLLIKDPLPSQTGLYHCWNKNGRQVVQYEIDFQDVTTLHITHKDLGQRPLQNETLHLGSKQLIFTWWEPWQDCNRCEEPGECKRLGYRYIEEPLEEAMPCWLYLGEVLVWSSRLRPELQVEACHVQCTNNTQLRVDYVIFDNFRLDEKTEFVWLDCPLGSMYRPVNWRANDTPLTWESQLSGQDFTTFLDPSTGGRQLQVFQPAVYKCFVQQELVAQFKPAASLETLEAQWRENDAQWREARKALRGRADSVLKGLKLVLLVVTVLALLGALLKCIHPSPGRRSTQVLVVK

SEQ ID NO: 5492 - protein, 745 aa, Homo sapiens
MKETDREAVATAVQRVAGMLQRPDQLDKVEQYRRREARKKASVEARLKAAIQSQLDGVRTGLSQLHNALNDVKDIQQSLADVSKDWRQSINTIESLKDVKDAVVQHSQLAAAVENLKNIFSVPEIVRETQDLIEQGALLQAHRKLMDLECSRDGLMYEQYRMDSGNTRDMTLIHGYFGSTQGLSDELAKQLWMVLQRSLVTVRRDPTLLVSVVRIIEREEKIDRRILDRKKQTGFVPPGRPKNWKEKMFTILERTVTTRIEGTQADTRESDKMWLVRHLEIIRKYVLDDLIVAKNLMVQCFPPHYEIFKNLLNMYHQALSTRMQDLASEDLEANEIVSLLTWVLNTYTSTEMMRNVELAPEVDVGTLEPLLSPHVVSELLDTYMSTLTSNIIAWLRKALETDKKDWVKETEPEADQDGYYQTTLPAIVFQMFEQNLQVAAQISEDLKTKVLVLCLQQMNSFLSRYKDEAQLYKEEHLRNRQHPHCYVQYMIAIINNCQTFKESIVSLKRKYLKNEVEEGVSPSQPSMDGILDAIAKEGCSGLLEEVFLDLEQHLNELMTKKWLLGSNAVDIICVTVEDYFNDFAKIKKPYKKRMTAEAHRRVVVEYLRAVMQKRISFRSPEERKEGAEKMVREAEQLRFLFRKLASGFGEDVDGYCDTIVAVAEVIKLTDPSLLYLEVSTLVSKYPDIRDDHIGALLAVRGDASRDMKQTIMETLEQGPAQASPSYVPLFKDIVVPSLNVAKLLK

SEQ ID NO: 5493 - protein, 1233 aa, Homo sapiens
MGFLKLIEIENFKSYKGRQIIGPFQRFTAIIGPNGSGKSNLMDAISFVLGEKTSNLRVKTLRDLIHGAPVGKPAANRAFVSMVYSEEGAEDRTFARVIVGGSSEYKINNKVVQLHEYSEELEKLGILIKARNFLVFQGAVESIAMKNPKERTALFEEISRSGELAQEYDKRKKEMVKAEEDTQFNYHRKKNIAAERKEAKQEKEEADRYQRLKDEVVRAQVQLQLFKLYHNEVEIEKLNKELASKNKEIEKDKKRMDKVEDELKEKKKELGKMMREQQQIEKEIKEKDSELNQKRPQYIKAKENTSHKIKKLEAAKKSLQNAQKHYKKRKGDMDELEKEMLSVEKARQEFEERMEEESQSQGRDLTLEENQVKKYHRLKEEASKRAATLAQELEKFNRDQKADQDRLDLEERKKVETEAKIKQKLREIEENQKRIEKLEEYITTSKQSLEEQKKLEGELTEEVEMAKRRIDEINKELNQVMEQLGDARIDRQESSRQQRKAEIMESIKRLYPGSVYGRLIDLCQPTQKKYQIAVTKVLGKNMDAIIVDSEKTGRDCIQYIKEQRGEPETFLPLDYLEVKPTDEKLRELKGAKLVIDVIRYEPPHIKKALQYACGNALVCDNVEDARRIAFGGHQRHKTVALDGTLFQKSGVISGGASDLKAKARRWDEKAVDKLKEKKERLTEELKEQMKAKRKEAELRQVQSQAHGLQMRLKYSQSDLEQTKTRHLALNLQEKSKLESELANFGPRINDIKRIIQSREREMKDLKEKMNQVEDEVFEEFCREIGVRNIREFEEEKVKRQNEIAKKRLEFENQKTRLGIQLDFEKNQLKEDQDKVHMWEQTVKKDENEIEKLKKEEQRHMKIIDETMAQLQDLKNQHLAKKSEVNDKNHEMEEIRKKLGGANKEMTHLQKEVTAIETKLEQKRSDRHNLLQACKMQDIKLPLSKGTMDDISQEEGSSQGEDSVSGSQRISSIYAREALIEIDYGDLCEDLKDAQAEEEIKQEMNTLQQKLNEQQSVLQRIAAPNMKAMEKLESVRDKFQETSDEFEAARKRAKKAKQAFEQIKKERFDRFNACFESVATNIDEIYKALSRNSSAQAFLGPENPEEPYLDGINYNCVAPGKRFRPMDNLSGGEKTVAALALLFAIHSYKPAPFFVLDEIDAALDNTNIGKVANYIKEQSTCNFQAIVISLKEEFYTKAESLIGVYPEQGDCVISKVLTFDLTKYPDANPNPNEQ

SEQ ID NO: 5494 - protein, 353 aa, Homo sapiens
MSTLLLNLDFGEPPPKKALEGNAKHRNFVKKRRLLERRGFLSKKNQPPSKAPKLHSEPSKKGETPTVDGTWKTPSFPKKKTAASSNGSGQPLDKKAAVSWLTPAPSKKADSVAAKVDLLGEFQSALPKINSHPTRSQKKSSQKKSSKKNHPQKNAPQNSTQAHSENKCSGASQKLPRKMVAIDCEMVGTGPKGHVSSLARCSIVNYNGDVLYDEYILPPCHIVDYRTRWSGIRKQHMVNATPFKIARGQILKILTGKIVVGHAIHNDFKALQYFHPKSLTRDTSHIPPLNRKADCPENATMSLKHLTKKLLNRDIQVGKSGHSSVEDAQATMELYKLVEVEWEEHLARNPPTD

SEQ ID NO: 5495 - protein, 1091 aa, Homo sapiens
MAKRKEENFSSPKNAKRPRQEELEDFDKDGDEDECKGTTLTAAEVGIIESIHLKNFMCHSMLGPFKFGSNVNFVVGNNGSGKSAVLTALIVGLGGRAVATNRGSSLKGFVKDGQNSADISITLRNRGDDAFKASVYGNSILIQQHISIDGSRSYKLKSATGSVVSTRKEELIAILDHFNIQVDNPVSVLTQEMSKQFLQSKNEGDKYKFFMKATQLEQMKEDYSYIMETKERTKEQIHQGEERLTELKRQCVEKEERFQSIAGLSTMKTNLESLKHEMAWAVVNEIEKQLNAIRDNIKIGEDRAARLDRKMEEQQVRLNEAEQKYKDIQDKLEKISEETNARAPECMALKADVVAKKRAYNEAEVLYNRSLNEYKALKKDDEQLCKRIEELKKSTDQSLEPERLERQKKISWLKERVKAFQNQENSVNQEIEQFQQAIEKDKEEHGKIKREELDVKHALSYNQRQLKELKDSKTDRLKRFGPNVPALLEAIDDAYRQGHFTYKPVGPLGACIHLRDPELALAIESCLKGLLQAYCCHNHADERVLQALMKRFYLPGTSRPPIIVSEFRNEIYDVRHRAAYHPDFPTVLTALEIDNAVVANSLIDMRGIETVLLIKNNSVARAVMQSQKPPKNCREAFTADGDQVFAGRYYSSENTRPKFLSRDVDSEISDLENEVENKTAQILNLQQHLSALEKDIKHNEELLKRCQLHYKELKMKIRKNISEIRELENIEEHQSVDIATLEDEAQENKSKMKMVEEHMEQQKENMEHLKSLKIEAENKYDAIKFKINQLSELADPLKDELNLADSEVDNQKRGKRHYEEKQKEHLDTLNKKKRELDMKEKELEEKMSQARQICPERIEVEKSASILDKEINRLRQKIQAEHASHGDREEIMRQYQEARETYLDLDSKVRTLKKFIKLLGEIMEHRFKTYQQFRRCLTLRCKLYFDNLLSQRAYCGKMNFDHKNETLSISVQPGEGNKAAFNDMRALSGGERSFSTVCFILSLWSIAESPFRCLDEFDVYMDMVNRRIAMDLILKMADSQRFRQFILLTPQSMSSLPSSKLIRILRMSDPERGQTTLPFRPVTQEEDDDQR

SEQ ID NO: 5496 - protein, 496 aa, Homo sapiens
MKLGKKPMYKPVDPYSRMQSTYNYNMRGGAYPPRYFYPFPVPPLLYQVELSVGGQQFNGKGKTRQAAKHDAAAKALRILQNEPLPERLEVNGRESEEENLNKSEISQVFEIALKRNLPVNFEVARESGPPHMKNFVTKVSVGEFVGEGEGKSKKISKKNAAIAVLEELKKLPPLPAVERVKPRIKKKTKPIVKPQTSPEYGQGINPISRLAQIQQAKKEKEPEYTLLTERGLPRRREFVMQVKVGNHTAEGTGTNKKVAKRNAAENMLEILGFKVPQAQPTKPALKSEEKTPIKKPGDGRKVTFFEPGSGDENGTSNKEDEFRMPYLSHQQLPAGILPMVPEVAQAVGVSQGHHTKDFTRAAPNPAKATVTAMIARELLYGGTSPTAETILKNNISSGHVPHGPLTRPSEQLDYLSRVQGFQVEYKDFPKNNKNEFVSLINCSSQPPLISHGIGKDVESCHDMAALNILKLLSELDQQSTEMPRTGNGPMSVCGRC

SEQ ID NO: 5497 - protein, 598 aa, Homo sapiens
MAGARAAAAAASAGSSASSGNQPPQELGLGELLEEFSRTQYRAKDGSGTGGSKVERIEKRCLELFGRDYCFSVIPNTNGDICGHYPRHIVFLEYESSEKEKDTFESTVQVSKLQDLIHRSKMARCRGRFVCPVILFKGKHICRSATLAGWGELYGRSGYNYFFSGGADDAWADVEDVTEEDCALRSGDTHLFDKVRGYDIKLLRYLSVKYICDLMVENKKVKFGMNVTSSEKVDKAQRYADFTLLSIPYPGCEFFKEYKDRDYMAEGLIFNWKQDYVDAPLSIPDFLTHSLNIDWSQYQCWDLVQQTQNYLKLLLSLVNSDDDSGLLVHCISGWDRTPLFISLLRLSLWADGLIHTSLKPTEILYLTVAYDWFLFGHMLVDRLSKGEEIFFFCFNFLKHITSEEFSALKTQRRKSLPARDGGFTLEDICMLRRKDRGSTTSLGSDFSLVMESSPGATGSFTYEAVELVPAGAPTQAAWRKSHSSSPQSVLWNRPQPSEDRLPSQQGLAEARSSSSSSSNHSDNFFRMGSSPLEVPKPRLAALSDRETRLQEVRSAFLAAYSSTVGLRAVAPSPSGAIGGLLEQFARGVGLRSISSNAL

SEQ ID NO: 5498 - protein, 331 aa, Homo sapiens
MASALWTVLPSRMSLRSLKWSLLLLSLLSFFVMWYLSLPHYNVIERVNWMYFYEYEPIYRQDFHFTLREHSNCSHQNPFLVILVTSHPSDVKARQAIRVTWGEKKSWWGYEVLTFFLLGQEAEKEDKMLALSLEDEHLLYGDIIRQDFLDTYNNLTLKTIMAFRWVTEFCPNAKYVMKTDTDVFINTGNLVKYLLNLNHSEKFFTGYPLIDNYSYRGFYQKTHISYQEYPFKVFPPYCSGLGYIMSRDLVPRIYEMMGHVKPIKFEDVYVGICLNLLKVNIHIPEDTNLFFLYRIHLDVCQLRRVIAAHGFSSKEIITFWQVMLRNTTCHY

SEQ ID NO: 5499 - protein, 1121 aa, Homo sapiens
MGAGGRRMRGAPARLLLPLLPWLLLLLAPEARGAPGCPLSIRSCKCSGERPKGLSGGVPGPARRRVVCSGGDLPEPPEPGLLPNGTVTLLLSNNKITGLRNGSFLGLSLLEKLDLRNNIISTVQPGAFLGLGELKRLDLSNNRIGCLTSETFQGLPRLLRLNISGNIFSSLQPGVFDELPALKVVDLGTEFLTCDCHLRWLLPWAQNRSLQLSEHTLCAYPSALHAQALGSLQEAQLCCEGALELHTHHLIPSLRQVVFQGDRLPFQCSASYLGNDTRIRWYHNRAPVEGDEQAGILLAESLIHDCTFITSELTLSHIGVWASGEWECTVSMAQGNASKKVEIVVLETSASYCPAERVANNRGDFRWPRTLAGITAYQSCLQYPFTSVPLGGGAPGTRASRRCDRAGRWEPGDYSHCLYTNDITRVLYTFVLMPINASNALTLAHQLRVYTAEAASFSDMMDVVYVAQMIQKFLGYVDQIKELVEVMVDMASNLMLVDEHLLWLAQREDKACSRIVGALERIGGAALSPHAQHISVELSAFPREVGGAGAGLHPVVYPCTALLLLCLFATIITYILNHSSIRVSRKGWHMLLNLCFHIAMTSAVFAGGITLTNYQMVCQAVGITLHYSSLSTLLWMGVKARVLHKELTWRAPPPQEGDPALPTPSPMLRFYLIAGGIPLIICGITAAVNIHNYRDHSPYCWLVWRPSLGAFYIPVALILLITWIYFLCAGLRLRGPLAQNPKAGNSRASLEAGEELRGSTRLRGSGPLLSDSGSLLATGSARVGTPGPPEDGDSLYSPGVQLGALVTTHFLYLAMWACGALAVSQRWLPRVVCSCLYGVAASALGLFVFTHHCARRRDVRASWRACCPPASPAAPHAPPRALPAAAEDGSPVFGEGPPSLKSSPSGSSGHPLALGPCKLTNLQLAQSQVCEAGAAAGGEGEPEPAGTRGNLAHRHPNNVHHGRRAHKSRAKGHRAGEACGKNRLKALRGGAAGALELLSSESGSLHNSPTDSYLGSSRNSPGAGLQLEGEPMLTPSEGSDTSAAPLSEAGRAGQRRSASRDSLKGGGALEKESHRRSYPLNAASLNGAPKGGKYDDVTLMGAEVASGGCMKTGLWKSETTV

SEQ ID NO: 5500 - protein, 521 aa, Homo sapiens
MGEVEAPGRLWLESPPGGAPPIFLPSDGQALVLGRGPLTQVTDRKCSRTQVELVADPETRTVAVKQLGVNPSTTGTQELKPGLEGSLGVGDTLYLVNGLHPLTLRWEETRTPESQPDTPPGTPLVSQDEKRDAELPKKRMRKSNPGWENLEKLLVFTAAGVKPQGKVAGFDLDGTLITTRSGKVFPTGPSDWRILYPEIPRKLRELEAEGYKLVIFTNQMSIGRGKLPAEEFKAKVEAVVEKLGVPFQVLVATHAGLYRKPVTGMWDHLQEQANDGTPISIGDSIFVGDAAGRPANWAPGRKKKDFSCADRLFALNLGLPFATPEEFFLKWPAAGFELPAFDPRTVSRSGPLCLPESRALLSASPEVVVAVGFPGAGKSTFLKKHLVSAGYVHVNRDTLGSWQRCVTTCETALKQGKRVAIDNTNPDAASRARYVQCARAAGVPCRCFLFTATLEQARHNNRFREMTDSSHIPVSDMVMYGYRKQFEAPTLAEGFSAILEIPFRLWVEPRLGRLYCQFSEG

SEQ ID NO: 5501 - protein, 735 aa, Homo sapiens
MAAGGAVAAAPECRLLPYALHKWSSFSSTYLPENILVDKPNDQSSRWSSESNYPPQYLILKLERPAIVQNITFGKYEKTHVCNLKKFKVFGGMNEENMTELLSSGLKNDYNKETFTLKHKIDEQMFPCRFIKIVPLLSWGPSFNFSIWYVELSGIDDPDIVQPCLNWYSKYREQEAIRLCLKHFRQHNYTEAFESLQKKTKIALEHPMLTDIHDKLVLKGDFDACEELIEKAVNDGLFNQYISQQEYKPRWSQIIPKSTKGDGEDNRPGMRGGHQMVIDVQTETVYLFGGWDGTQDLADFWAYSVKENQWTCISRDTEKENGPSARSCHKMCIDIQRRQIYTLGRYLDSSVRNSKSLKSDFYRYDIDTNTWMLLSEDTAADGGPKLVFDHQMCMDSEKHMIYTFGGRILTCNGSVDDSRASEPQFSGLFAFNCQCQTWKLLREDSCNAGPEDIQSRIGHCMLFHSKNRCLYVFGGQRSKTYLNDFFSYDVDSDHVDIISDGTKKDSGMVPMTGFTQRATIDPELNEIHVLSGLSKDKEKREENVRNSFWIYDIVRNSWSCVYKNDQAAKDNPTKSLQEEEPCPRFAHQLVYDELHKVHYLFGGNPGKSCSPKMRLDDFWSLKLCRPSKDYLLRHCKYLIRKHRFEEKAQVDPLSALKYLQNDLYITVDHSDPEETKEFQLLASALFKSGSDFTALGFSDVDHTYAQRTQLFDTLVNFFPDSMTPPKGNLVDLITL

SEQ ID NO: 5502 - protein, 2446 aa, Homo sapiens
MLRGPGPGLLLLAVQCLGTAVPSTGASKSKRQAQQMVQPQSPVAVSQSKPGCYDNGKHYQINQQWERTYLGNALVCTCYGGSRGFNCESKPEAEETCFDKYTGNTYRVGDTYERPKDSMIWDCTCIGAGRGRISCTIANRCHEGGQSYKIGDTWRRPHETGGYMLECVCLGNGKGEWTCKPIAEKCFDHAAGTSYVVGETWEKPYQGWMMVDCTCLGEGSGRITCTSRNRCNDQDTRTSYRIGDTWSKKDNRGNLLQCICTGNGRGEWKCERHTSVQTTSSGSGPFTDVRAAVYQPQPHPQPPPYGHCVTDSGVVYSVGMQWLKTQGNKQMLCTCLGNGVSCQETAVTQTYGGNSNGEPCVLPFTYNGRTFYSCTTEGRQDGHLWCSTTSNYEQDQKYSFCTDHTVLVQTRGGNSNGALCHFPFLYNNHNYTDCTSEGRRDNMKWCGTTQNYDADQKFGFCPMAAHEEICTTNEGVMYRIGDQWDKQHDMGHMMRCTCVGNGRGEWTCIAYSQLRDQCIVDDITYNVNDTFHKRHEEGHMLNCTCFGQGRGRWKCDPVDQCQDSETGTFYQIGDSWEKYVHGVRYQCYCYGRGIGEWHCQPLQTYPSSSGPVEVFITETPSQPNSHPIQWNAPQPSHISKYILRWRPKNSVGRWKEATIPGHLNSYTIKGLKPGVVYEGQLISIQQYGHQEVTRFDFTTTSTSTPVTSNTVTGETTPFSPLVATSESVTEITASSFVVSWVSASDTVSGFRVEYELSEEGDEPQYLDLPSTATSVNIPDLLPGRKYIVNVYQISEDGEQSLILSTSQTTAPDAPPDTTVDQVDDTSIVVRWSRPQAPITGYRIVYSPSVEGSSTELNLPETANSVTLSDLQPGVQYNITIYAVEENQESTPVVIQQETTGTPRSDTVPSPRDLQFVEVTDVKVTIMWTPPESAVTGYRVDVIPVNLPGEHGQRLPISRNTFAEVTGLSPGVTYYFKVFAVSHGRESKPLTAQQTTKLDAPTNLQFVNETDSTVLVRWTPPRAQITGYRLTVGLTRRGQPRQYNVGPSVSKYPLRNLQPASEYTVSLVAIKGNQESPKATGVFTTLQPGSSIPPYNTEVTETTIVITWTPAPRIGFKLGVRPSQGGEAPREVTSDSGSIVVSGLTPGVEYVYTIQVLRDGQERDAPIVNKVVTPLSPPTNLHLEANPDTGVLTVSWERSTTPDITGYRITTTPTNGQQGNSLEEVVHADQSSCTFDNLSPGLEYNVSVYTVKDDKESVPISDTIIPEVPQLTDLSFVDITDSSIGLRWTPLNSSTIIGYRITVVAAGEGIPIFEDFVDSSVGYYTVTGLEPGIDYDISVITLINGGESAPTTLTQQTAVPPPTDLRFTNIGPDTMRVTWAPPPSIDLTNFLVRYSPVKNEEDVAELSISPSDNAVVLTNLLPGTEYVVSVSSVYEQHESTPLRGRQKTGLDSPTGIDFSDITANSFTVHWIAPRATITGYRIRHHPEHFSGRPREDRVPHSRNSITLTNLTPGTEYVVSIVALNGREESPLLIGQQSTVSDVPRDLEVVAATPTSLLISWDAPAVTVRYYRITYGETGGNSPVQEFTVPGSKSTATISGLKPGVDYTITVYAVTGRGDSPASSKPISINYRTEIDKPSQMQVTDVQDNSISVKWLPSSSPVTGYRVTTTPKNGPGPTKTKTAGPDQTEMTIEGLQPTVEYVVSVYAQNPSGESQPLVQTAVTNIDRPKGLAFTDVDVDSIKIAWESPQGQVSRYRVTYSSPEDGIHELFPAPDGEEDTAELQGLRPGSEYTVSVVALHDDMESQPLIGTQSTAIPAPTDLKFTQVTPTSLSAQWTPPNVQLTGYRVRVTPKEKTGPMKEINLAPDSSSVVVSGLMVATKYEVSVYALKDTLTSRPAQGVVTTLENVSPPRRARVTDATETTITISWRTKTETITGFQVDAVPANGQTPIQRTIKPDVRSYTITGLQPGTDYKIYLYTLNDNARSSPVVIDASTAIDAPSNLRFLATTPNSLLVSWQPPRARITGYIIKYEKPGSPPREVVPRPRPGVTEATITGLEPGTEYTIYVIALKNNQKSEPLIGRKKTDELPQLVTLPHPNLHGPEILDVPSTVQKTPFVTHPGYDTGNGIQLPGTSGQQPSVGQQMIFEEHGFRRTTPPTTATPIRHRPRPYPPNVGQEALSQTTISWAPFQDTSEYIISCHPVGTDEEPLQFRVPGTSTSATLTGLTRGATYNVIVEALKDQQRHKVREEVVTVGNSVNEGLNQPTDDSCFDPYTVSHYAVGDEWERMSESGFKLLCQCLGFGSGHFRCDSSRWCHDNGVNYKIGEKWDRQGENGQMMSCTCLGNGKGEFKCDPHEATCYDDGKTYHVGEQWQKEYLGAICSCTCFGGQRGWRCDNCRRPGGEPSPEGTTGQSYNQYSQRYHQRTNTNVNCPIECFMPLDVQADREDSRE

SEQ ID NO: 5503 - protein, 524 aa, Homo sapiens
MTEDKVTGTLVFTVITAVLGSFQFGYDIGVINAPQQVIISHYRHVLGVPLDDRKAINNYVINSTDELPTISYSMNPKPTPWAEEETVAAAQLITMLWSLSVSSFAVGGMTASFFGGWLGDTLGRIKAMLVANILSLVGALLMGFSKLGPSHILIIAGRSISGLYCGLISGLVPMYIGEIAPTALRGALGTFHQLAIVTGILISQIIGLEFILGNYDLWHILLGLSGVRAILQSLLLFFCPESPRYLYIKLDEEVKAKQSLKRLRGYDDVTKDINEMRKEREEASSEQKVSIIQLFTNSSYRQPILVALMLHVAQQFSGINGIFYYSTSIFQTAGISKPVYATIGVGAVNMVFTAVSVFLVEKAGRRSLFLIGMSGMFVCAIFMSVGLVLLNKFSWMSYVSMIAIFLFVSFFEIGPGPIPWFMVAEFFSQGPRPAALAIAAFSNWTCNFIVALCFQYIADFCGPYVFFLFAGVLLAFTLFTFFKVPETKGKSFEEIAAEFQKKSGSAHRPKAAVEMKFLGATETV

SEQ ID NO: 5504 - protein, 833 aa, Homo sapiens
MKFTNTKVQMMQNVHLAPETDEDDLYSGYNDYNPIYDIEELENDAAFQQAVRTSHGRRPPITAKISSTAVTRPIATGYGSKTSLASSIGRPMTGAIQDGVTRPMTAVRAAGFTKAALRGSAFDPLSQSRGPASPLEAKKKDSPEEKIKQLEKEVNELVEESCIANSCGDLKLALEKAKDAGRKERVLVRQREQVTTPENINLDLTYSVLFNLASQYSVNEMYAEALNTYQVIVKNKMFSNAGILKMNMGNIYLKQRNYSKAIKFYRMALDQVPSVNKQMRIKIMQNIGVTFIQAGQYSDAINSYEHIMSMAPNLKAGYNLTICYFAIGDREKMKKAFQKLITVPLEIDEDKYISPSDDPHTNLVTEAIKNDHLRQMERERKAMAEKYIMTSAKLIAPVIETSFAAGYDWCVEVVKASQYVELANDLEINKAVTYLRQKDYNQAVEILKVLEKKDSRVKSAAATNLSALYYMGKDFAQASSYADIAVNSDRYNPAALTNKGNTVFANGDYEKAAEFYKEALRNDSSCTEALYNIGLTYEKLNRLDEALDCFLKLHAILRNSAEVLYQIANIYELMENPSQAIEWLMQVVSVIPTDPQVLSKLGELYDREGDKSQAFQYYYESYRYFPCNIEVIEWLGAYYIDTQFWEKAIQYFERASLIQPTQVKWQLMVASCFRRSGNYQKALDTYKDTHRKFPENVECLRFLVRLCTDLGLKDAQEYARKLKRLEKMKEIREQRIKSGRDGSGGSRGKREGSASGDSGQNYSASSKGERLSARLRALPGTNEPYESSSNKEIDASYVDPLGPQIERPKTAAKKRIDEDDFADEELGDDLLPE

SEQ ID NO: 5505 - protein, 1032 aa, Homo sapiens
MCNEETEIKEAQSYQNSPVSSATNQDAGYGSPFSESSDQLAHFKGSSSREEKEDPQCPDSVSYPQDSLAQIKAVYANLFSESCWSSLALDLKKSGSTTSTNDASQKESSAPTPTPPTCPVSTTGPTTSTPSTSCSSSTSHSSTTSTSSSSGYDWHQAALAKTLQQTSSYGLLPEPSLFSTVQLYRQNNKLYGSVFTGASKFRCKDCSAAYDTLVELTVHMNETGHYRDDNRDKDSEKTKRWSKPRKRSLMEMEGKEDAQKVLKCMYCGHSFESLQDLSVHMIKTKHYQKVPLKEPVPAITKLVPSTKKRALQDLAPPCSPEPAGMAAEVALSESAKDQKAANPYVTPNNRYGYQNGASYTWQFEARKAQILKCMECGSSHDTLQQLTAHMMVTGHFLKVTTSASKKGKQLVLDPVVEEKIQSIPLPPTTHTRLPASSIKKQPDSPAGSTTSEEKKEPEKEKPPVAGDAEKIKEESEDSLEKFEPSTLYPYLREEDLDDSPKGGLDILKSLENTVSTAISKAQNGAPSWGGYPSIHAAYQLPGTVKPLPAAVQSVQVQPSYAGGVKSLSSAEHNALLHSPGSLTPPPHKSNVSAMEELVEKVTGKVNIKKEERPPEKEKSSLAKAASPIAKENKDFPKTEEVSGKPQKKGPEAETGKAKKEGPLDVHTPNGTEPLKAKVTNGCNNLGIIMDHSPEPSFINPLSALQSIMNTHLGKVSKPVSPSLDPLAMLYKISNSMLDKPVYPATPVKQADAIDRYYYENSDQPIDLTKSKNKPLVSSVADSVASPLRESALMDISDMVKNLTGRLTPKSSTPSTVSEKSDADGSSFEEALDELSPVHKRKGRQSNWNPQHLLILQAQFASSLRETTEGKYIMSDLGPQERVHISKFTGLSMTTISHWLANVKYQLRRTGGTKFLKNLDTGHPVFFCNDCASQFRTASTYISHLETHLGFSLKDLSKLPLNQIQEQQNVSKVLTNKTLGPLGATEEDLGSTFQCKLCNRTFASKHAVKLHLSKTHGKSPEDHLIYVTELEKQ

SEQ ID NO: 5506 - protein, 313 aa, Homo sapiens
MNQLSFLLFLIATTRGWSTDEANTYFKEWTCSSSPSLPRSCKEIKDECPSAFDGLYFLRTENGVIYQTFCDMTSGGGGWTLVASVHENDMRGKCTVGDRWSSQQGSKAVYPEGDGNWANYNTFGSAEAATSDDYKNPGYYDIQAKDLGIWHVPNKSPMQHWRNSSLLRYRTDTGFLQTLGHNLFGIYQKYPVKYGEGKCWTDNGPVIPVVYDFGDAQKTASYYSPYGQREFTAGFVQFRVFNNERAANALCAGMRVTGCNTEHHCIGGGGYFPEASPQQCGDFSGFDWSGYGTHVGYSSSREITEAAVLLFYR

SEQ ID NO: 5507 - protein, 454 aa, Homo sapiens
MAEFSQKRGKRRSDEGLGSMVDFLLANARLVLGVGGAAVLGIATLAVKRFIDRATSPRDEDDTKADSWKELSLLKATPHLQPRPPPAALSQPVLPLAPSSSAPEGPAETDPEVTPQLSSPAPLCLTLQERLLAFERDRVTIPAAQVALAKQLAGDIALELQAYFRSKFPELPFGAFVPGGPLYDGLQAGAADHVRLLVPLVLEPGLWSLVPGVDTVARDPRCWAVRRTQLEFCPRGSSPWDRFLVGGYLSSRVLLELLRKALAASVNWPAIGSLLGCLIRPSMASEELLLEVQHERLELTVAVLVAVPGVDADDRLLLAWPLEGLAGNLWLQDLYPVEAARLRALDDHDAGTRRRLLLLLCAVCRGCSALGQLGRGHLTQVVLRLGEDNVDWTEEALGERFLQALELLIGSLEQASLPCHFNPSVNLFSSLREEEIDDIGYALYSGLQEPEGLL

SEQ ID NO: 5508 - protein, 583 aa, Homo sapiens
MAGSEQQRPRRRDDGDSDAAAAAAAPLQDAELALAGINMLLNNGFRESDQLFKQYRNHSPLMSFGASFVSFLNAMMTFEEEKMQLACDDLKTTEKLCESEEAGVIETIKNKIKKNVDVRKSAPSMVDRLQRQIIIADCQVYLAVLSFVKQELSAYIKGGWILRKAWKIYNKCYLDINALQELYQKKLTEESLTSDAANDNHIVAEGVSEESLNRLKGAVSFGYGLFHLCISMVPPNLLKIINLLGFPGDRLQGLSSLMYASESKDMKAPLATLALLWYHTVVRPFFALDGSDNKAGLDEAKEILLKKEAAYPNSSLFMFFKGRIQRLECQINSALTSFHTALELAVDQREIQHVCLYEIGWCSMIELNFKDAFDSFERLKNESRWSQCYYAYLTAVCQGATGDVDGAQIVFKEVQKLFKRKNNQIEQFSVKKAERFRKQTPTKALCVLASIEVLYLWKALPNCSFPNLQRMSQACHEVDDSSVVGLKYLLLGAIHKCLGNSEDAVQYFQRAVKDELCRQNNLYVQPYACYELGCLLLDKPETVGRGRALLLQAKEDFSGYDFENRLHVRIHAALASLRELVPQ

SEQ ID NO: 5509 - protein, 1321 aa, Homo sapiens
MVLTLGESWPVLVGRRFLSLSAADGSDGSHDSWDVERVAEWPWLSGTIRAVSHTDVTKKDLKVCVEFDGESWRKRRWIEVYSLLRRAFLVEHNLVLAERKSPEISERIVQWPAITYKPLLDKAGLGSITSVRFLGDQQRVFLSKDLLKPIQDVNSLRLSLTDNQIVSKEFQALIVKHLDESHLLKGDKNLVGSEVKIYSLDPSTQWFSATVINGNPASKTLQVNCEEIPALKIVDPSLIHVEVVHDNLVTCGNSARIGAVKRKSSENNGTLVSKQAKSCSEASPSMCPVQSVPTTVFKEILLGCTAATPPSKDPRQQSTPQAANSPPNLGAKIPQGCHKQSLPEEISSCLNTKSEALRTKPDVCKAGLLSKSSQIGTGDLKILTEPKGSCTQPKTNTDQENRLESVPQALTGLPKECLPTKASSKAELEIANPPELQKHLEHAPSPSDVSNAPEVKAGVNSDSPNNCSGKKVEPSALACRSQNLKESSVKVDNESCCSRSNNKIQNAPSRKSVLTDPAKLKKLQQSGEAFVQDDSCVNIVAQLPKCRECRLDSLRKDKEQQKDSPVFCRFFHFRRLQFNKHGVLRVEGFLTPNKYDNEAIGLWLPLTKNVVGIDLDTAKYILANIGDHFCQMVISEKEAMSTIEPHRQVAWKRAVKGVREMCDVCDTTIFNLHWVCPRCGFGVCVDCYRMKRKNCQQGAAYKTFSWLKCVKSQIHEPENLMPTQIIPGKALYDVGDIVHSVRAKWGIKANCPCSNRQFKLFSKPASKEDLKQTSLAGEKPTLGAVLQQNPSVLEPAAVGGEAASKPAGSMKPACPASTSPLNWLADLTSGNVNKENKEKQPTMPILKNEIKCLPPLPPLSKSSTVLHTFNSTILTPVSNNNSGFLRNLLNSSTGKTENGLKNTPKILDDIFASLVQNKTTSDLSKRPQGLTIKPSILGFDTPHYWLCDNRLLCLQDPNNKSNWNVFRECWKQGQPVMVSGVHHKLNSELWKPESFRKEFGEQEVDLVNCRTNEIITGATVGDFWDGFEDVPNRLKNEKEPMVLKLKDWPPGEDFRDMMPSRFDDLMANIPLPEYTRRDGKLNLASRLPNYFVRPDLGPKMYNAYGLITPEDRKYGTTNLHLDVSDAANVMVYVGIPKGQCEQEEEVLKTIQDGDSDELTIKRFIEGKEKPGALWHIYAAKDTEKIREFLKKVSEEQGQENPADHDPIHDQSWYLDRSLRKRLHQEYGVQGWAIVQFLGDVVFIPAGAPHQVHNLYSCIKVAEDFVSPEHVKHCFWLTQEFRYLSQTHTNHEDKLQVKNVIYHAVKDAVAMLKASESSFGKP

SEQ ID NO: 5510 - protein, 584 aa, Homo sapiens
MAGGVDGPIGIPFPDHSSDILSGLNEQRTQGLLCDVVILVEGREFPTHRSVLAACSQYFKKLFTSGAVVDQQNVYEIDFVSAEALTALMDFAYTATLTVSTANVGDILSAARLLEIPAVSHVCADLLDRQILAADAGADAGQLDLVDQIDQRNLLRAKEYLEFFQSNPMNSLPPAAAAAAASFPWSAFGASDDDLDATKEAVAAAVAAVAAGDCNGLDFYGPGPPAERPPTGDGDEGDSNPGLWPERDEDAPTGGLFPPPVAPPAATQNGHYGRGGEEEAASLSEAAPEPGDSPGFLSGAAEGEDGDGPDVDGLAASTLLQQMMSSVGRAGAAAGDSDEESRADDKGVMDYYLKYFSGAHDGDVYPAWSQKVEKKIRAKAFQKCPICEKVIQGAGKLPRHIRTHTGEKPYECNICKVRFTRQDKLKVHMRKHTGEKPYLCQQCGAAFAHNYDLKNHMRVHTGLRPYQCDSCCKTFVRSDHLHRHLKKDGCNGVPSRRGRKPRVRGGAPDPSPGATATPGAPAQPSSPDARRNGQEKHFKDEDEDEDVASPDGLGRLNVAGAGGGGDSGGGPGAATDGNFTAGLA

SEQ ID NO: 5511 - protein, 717 aa, Homo sapiens
MELRCGGLLFSSRFDSGNLAHVEKVESLSSDGEGVGGGASALTSGIASSPDYEFNVWTRPDCAETEFENGNRSWFYFSVRGGMPGKLIKINIMNMNKQSKLYSQGMAPFVRTLPTRPRWERIRDRPTFEMTETQFVLSFVHRFVEGRGATTFFAFCYPFSYSDCQELLNQLDQRFPENHPTHSSPLDTIYYHRELLCYSLDGLRVDLLTITSCHGLREDREPRLEQLFPDTSTPRPFRFAGKRIFFLSSRVHPGETPSSFVFNGFLDFILRPDDPRAQTLRRLFVFKLIPMLNPDGVVRGHYRTDSRGVNLNRQYLKPDAVLHPAIYGAKAVLLYHHVHSRLNSQSSSEHQPSSCLPPDAPVSDLEKANNLQNEAQCGHSADRHNAEAWKQTEPAEQKLNSVWIMPQQSAGLEESAPDTIPPKESGVAYYVDLHGHASKRGCFMYGNSFSDESTQVENMLYPKLISLNSAHFDFQGCNFSEKNMYARDRRDGQSKEGSGRVAIYKASGIIHSYTLECNYNTGRSVNSIPAACHDNGRASPPPPPAFPSRYTVELFEQVGRAMAIAALDMAECNPWPRIVLSEHSSLTNLRAWMLKHVRNSRGLSSTLNVGVNKKRGLRTPPKSHNGLPVSCSENTLSRARSFSTGTSAGGSSSSQQNSPQMKNSPSFPFHGSRPAGLPGLGSSTQKVTHRVLGPVRGKPVWEPLQHVFGCLGHCWGK

SEQ ID NO: 5512 - protein, 1292 aa, Homo sapiens
MADPAAPTPAAPAPAQAPAPAPEAVPAPAAAPVPAPAPASDSASGPSSDSGPEAGSQRLLFSHDLVSGRYRGSVHFGLVRLIHGEDSDSEGEEEGRGSSGCSEAGGAGHEEGRASPLRRGYVRVQWYPEGVKQHVKETKLKLEDRSVVPRDVVRHMRSTDSQCGTVIDVNIDCAVKLIGTNCIIYPVNSKDLQHIWPFMYGDYIAYDCWLGKVYDLKNQIILKLSNGARCSMNTEDGAKLYDVCPHVSDSGLFFDDSYGFYPGQVLIGPAKIFSSVQWLSGVKPVLSTKSKFRVVVEEVQVVELKVTWITKSFCPGGTDSVSPPPSVITQENLGRVKRLGCFDHAQRQLGERCLYVFPAKVEPAKIAWECPEKNCAQGEGSMAKKVKRLLKKQVVRIMSCSPDTQCSRDHSMEDPDKKGESKTKSEAESASPEETPDGSASPVEMQDEGAEEPHEAGEQLPPFLLKEGRDDRLHSAEQDADDEAADDTDDTSSVTSSASSTTSSQSGSGTSRKKSIPLSIKNLKRKHKRKKNKITRDFKPGDRVAVEVVTTMTSADVMWQDGSVECNIRSNDLFPVHHLDNNEFCPGDFVVDKRVQSCPDPAVYGVVQSGDHIGRTCMVKWFKLRPSGDDVELIGEEEDVSVYDIADHPDFRFRTTDIVIRIGNTEDGAPHKEDEPSVGQVARVDVSSKVEVVWADNSKTIILPQHLYNIESEIEESDYDSVEGSTSGASSDEWEDDSDSWETDNGLVEDEHPKIEEPPIPPLEQPVAPEDKGVVISEEAATAAVQGAVAMAAPMAGLMEKAGKDGPPKSFRELKEAIKILESLKNMTVEQLLTGSPTSPTVEPEKPTREKKFLDDIKKLQENLKKTLDNVAIVEEEKMEAVPDVERKEDKPEGQSPVKAEWPSETPVLCQQCGGKPGVTFTSAKGEVFSVLEFAPSNHSFKKIEFQPPEAKKFFSTVRKEMALLATSLPEGIMVKTFEDRMDLFSALIKGPTRTPYEDGLYLFDIQLPNIYPAVPPHFCYLSQCSGRLNPNLYDNGKVCVSLLGTWIGKGTERWTSKSSLLQVLISIQGLILVNEPYYNEAGFDSDRGLQEGYENSRCYNEMALIRVVQSMTQLVRRPPEVFEQEIRQHFSTGGWRLVNRIESWLETHALLEKAQALPNGVPKASSSPEPPAVAELSDSGQQEPEDGGPAPGEASQGSDSEGGAQGLASASRDHTDQTSETAPDASVPPSVKPKKRRKSYRSFLPEKSGYPDIGFPLFPLSKGFIKSIRGVLTQFRAALLEAGMPECTEDK

SEQ ID NO: 5513 - protein, 401 aa, Homo sapiens
MEPGRRGAAALLALLCVACALRAGRAQYERYSFRSFPRDELMPLESAYRHALDKYSGEHWAESVGYLEISLRLHRLLRDSEAFCHRNCSAAPQPEPAAGLASYPELRLFGGLLRRAHCLKRCKQGLPAFRQSQPSREVLADFQRREPYKFLQFAYFKANNLPKAIAAAHTFLLKHPDDEMMKRNMAYYKSLPGAEDYIKDLETKSYESLFIRAVRAYNGENWRTSITDMELALPDFFKAFYECLAACEGSREIKDFKDFYLSIADHYVEVLECKIQCEENLTPVIGGYPVEKFVATMYHYLQFAYYKLNDLKNAAPCAVSYLLFDQNDKVMQQNLVYYQYHRDTWGLSDEHFQPRPEAVQFFNVTTLQKELYDFAKENIMDDDEGEVVEYVDDLLELEETS

SEQ ID NO: 5514 - protein, 1454 aa, Homo sapiens
MAPVQLENHQLVPPGGGGGGSGGPPSAPAPPPPGAAVAAAAAAAASPGYRLSTLIEFLLHRAYSELMVLTDLLPRKSDVERKIEIVQFASRTRQLFVRLLALVKWANNAGKVEKCAMISSFLDQQAILFVDTADRLASLARDALVHARLPSFAIPYAIDVLTTGSYPRLPTCIRDKIIPPDPITKIEKQATLHQLNQILRHRLVTTDLPPQLANLTVANGRVKFRVEGEFEATLTVMGDDPDVPWRLLKLEILVEDKETGDGRALVHSMQISFIHQLVQSRLFADEKPLQDMYNCLHSFCLSLQLEVLHSQTLMLIRERWGDLVQVERYHAGKCLSLSVWNQQVLGRKTGTASVHKVTIKIDENDVSKPLQIFHDPPLPASDSKLVERAMKIDHLSIEKLLIDSVHARAHQKLQELKAILRGFNANENSSIETALPALVVPILEPCGNSECLHIFVDLHSGMFQLMLYGLDQATLDDMEKSVNDDMKRIIPWIQQLKFWLGQQRCKQSIKHLPTISSETLQLSNYSTHPIGNLSKNKLFIKLTRLPQYYIVVEMLEVPNKPTQLSYKYYFMSVNAADREDSPAMALLLQQFKENIQDLVFRTKTGKQTRTNAKRKLSDDPCPVESKKTKRAGEMCAFNKVLAHFVAMCDTNMPFVGLRLELSNLEIPHQGVQVEGDGFSHAIRLLKIPPCKGITEETQKALDRSLLDCTFRLQGRNNRTWVAELVFANCPLNGTSTREQGPSRHVYLTYENLLSEPVGGRKVVEMFLNDWNSIARLYECVLEFARSLPDIPAHLNIFSEVRVYNYRKLILCYGTTKGSSISIQWNSIHQKFHISLGTVGPNSGCSNCHNTILHQLQEMFNKTPNVVQLLQVLFDTQAPLNAINKLPTVPMLGLTQRTNTAYQCFSILPQSSTHIRLAFRNMYCIDIYCRSRGVVAIRDGAYSLFDNSKLVEGFYPAPGLKTFLNMFVDSNQDARRRSVNEDDNPPSPIGGDMMDSLISQLQPPPQQQPFPKQPGTSGAYPLTSPPTSYHSTVNQSPSMMHTQSPGNLHAASSPSGALRAPSPASFVPTPPPSSHGISIGPGASFASPHGTLDPSSPYTMVSPSGRAGNWPGSPQVSGPSPAARMPGMSPANPSLHSPVPDASHSPRAGTSSQTMPTNMPPPRKLPQRSWAASIPTILTHSALNILLLPSPTPGLVPGLAGSYLCSPLERFLGSVIMRRHLQRIIQQETLQLINSNEPGVIMFKTDALKCRVALSPKTNQTLQLKVTPENAGQWKPDELQVLEKFFETRVAGPPFKANTLIAFTKLLGAPTHILRDCVHIMKLELFPDQATQLKWNVQFCLTIPPSAPPIAPPGTPAVVLKSKMLFFLQLTQKTSVPPQEPVSIIVPIIYDMASGTTQQADIPRQQNSSVAAPMMVSNILKRFAEMNPPRQGECTIFAAVRDLMANLTLPPGGRP

SEQ ID NO: 5515 - protein, 465 aa, Homo sapiens
MKPTGTDPRILSIAAEVAKSPEQNVPVILLKLKEIINITPLGSSELKKIKQDIYCYDLIQYCLLVLSQDYSRIQGGWTTISQLTQILSHCCVGLEPGEDAEEFYNELLPSAAENFLVLGRQLQTCFINAAKAEEKDELLHFFQIVTDSLFWLLGGHVELIQNVLQSDHFLHLLQADNVQIGSAVMMMLQNILQINRSKRSKMLLEINRQKEEEDLKLQLQLQRQRAMRLSRELQLSMLEIVHPGQVEKHYREMEEKSALIIQKHWRGYRERKNFHQQRQSLIEYKAAVTLQRAALKFLAKCRKKKKLFAPWRGLQELTDARRVELKKRVDDYVRRHLGSPMSDVVSRELHAQAQERLQHYFMGRALEERAQQHREALIAQISTNVEQLMKAPSLKEAEGKEPELFLSRSRPVAAKAKQAHLTTLKHIQAPWWKKLGEESGDEIDVPKDELSIELENLFIGGTKPP

SEQ ID NO: 5516 - protein, 215 aa, Homo sapiens
MSCTIEKALADAKALVERLRDHDDAAESLIEQTTALNKRVEAMKQYQEEIQELNEVARHRPRSTLVMGIQQENRQIRELQQENKELRTSLEEHQSALELIMSKYREQMFRLLMASKKDDPGIIMKLKEQHSKELQAHVDQITEMAAVMRKAIEIDEQQGCKEQERIFQLEQENKGLREILQITRESFLNLRKDDASESTSLSALVTNSDLSLRKS

SEQ ID NO: 5517 - protein, 224 aa, Homo sapiens
MAAPSEVAAIAPGEGDGGGGGFGSWLDGRLEALGVDRAVYGAYILGILQEEEEEEKLDALQGILSAFLEEDSLLNICKEIVERWSETQNVVTKVKKEDEVQAIATLIEKQAQIVVKPRMVSEEEKQRKAALLAQYADVTDEEDEADEKDDSGATTMNIGSDKLLFRNTNVEDVLNARKLERDSLRDESQRKKEQDKLQRERDKLAKQERKEKEKKRTQRGERKR

SEQ ID NO: 5518 - protein, 411 aa, Homo sapiens
MAEAELHKERLQAIAEKRKRQTEIEGKRQQLDEQILLLQHSKSKVLREKWLLQGIPAGTAEEEEARRRQSEEDEFRVKQLEDNIQRLEQEIQTLESEESQISAKEQIILEKLKETEKSFKDFQKGFSSTDGDAVNYISSQLPDLPILCSRTAEPSPGQDGTSRAAAVYAMEINVEKDKQTGETKILSTSTIGPEGVHQKGVKVYDDGTKVVYEVRSGGTVVENGVHKLSTKDVEELIQKAGQSSLGGGHVSERTVIADGSLSHPKEHMLCKEAKLEMVHKSRKDHSSGNPGQQAQAPSAAGPEANLDQPVTMIFMGYQNIEDEEETKKVLGYDETIKAELVLIDEDDEKSLREKTVTDVSTIDGNAAELVSGRPVSDTTEPSSPEGKEESLATEPAPGTQKKKRCQCCVVM

SEQ ID NO: 5519 - protein, 578 aa, Homo sapiens [sequence omitted]

SEQ ID NO: 5520 - protein, 421 aa, Homo sapiens
MSKRLRSSEVCADCSGPDPSWASVNRGTFLCDECCSVHRSLGRHISQVRHLKHTPWPPTLLQMVETLYNNGANSIWEHSLLDPASIMSGRRKANPQDKVHPNKAEFIRAKYQMLAFVHRLPCRDDDSVTAKDLSKQLHSSVRTGNLETCLRLLSLGAQANFFHPEKGNTPLHVASKAGQILQAELLAVYGADPGTQDSSGKTPVDYARQGGHHELAERLVEIQYELTDRLAFYLCGRKPDHKNGQHFIIPQMADSSLDLSELAKAAKKKLQSLSNHLFEELAMDVYDEVDRRETDAVWLATQNHSALVTETTVVPFLPVNPEYSSTRNQGRQKLARFNAHEFATLVIDILSDAKRRQQGSSLSGSKDNVELILKTINNQHSVESQDNDQPDYDSVASDEDTDLETTASKTNRQKLLGKDAN

SEQ ID NO: 5521 - protein, 4684 aa, Homo sapiens
MVAGMLMPRDQLRAIYEVLFREGVMVAKKDRRPRSLHPHVPGVTNLQVMRAMASLRARGLVRETFAWCHFYWYLTNEGIAHLRQYLHLPPEIVPASLQRVRRPVAMVMPARRTPHVQAVQGPLGSPPKRGPLPTEEQRVYRRKELEEVSPETPVVPATTQRTLARPGPEPAPATDERDRVQKKTFTKWVNKHLIKAQRHISDLYEDLRDGHNLISLLEVLSGDSLPREKGRMRFHKLQNVQIALDYLRHRQVKLVNIRNDDIADGNPKLTLGLIWTIILHFQISDIQVSGQSEDMTAKEKLLLWSQRMVEGYQGLRCDNFTSSWRDGRLFNAIIHRHKPLLIDMNKVYRQTNLENLDQAFSVAERDLGVTRLLDPEDVDVPQPDEKSIITYVSSLYDAMPRVPDVQDGVRANELQLRWQEYRELVLLLLQWMRHHTAAFEERRFPSSFEEIEILWSQFLKFKEMELPAKEADKNRSKGIYQSLEGAVQAGQLKVPPGYHPLDVEKEWGKLHVAILEREKQLRSEFERLECLQRIVTKLQMEAGLCEEQLNQADALLQSDVRLLAAGKVPQRAGEVERDLDKADSMIRLLFNDVQTLKDGRHPQGEQMYRRVYRLHERLVAIRTEYNLRLKAGVAAPATQVAQVTLQSVQRRPELEDSTLRYLQDLLAWVEENQHRVDGAEWGVDLPSVEAQLGSHRGLHQSIEEFRAKIERARSDEGQLSPATRGAYRDCLGRLDLQYAKLLNSSKARLRSLESLHSFVAAATKELMWLNEKEEEEVGFDWSDRNTNMTAKKESYSALMRELELKEKKIKELQNAGDRLLREDHPARPTVESFQAALQTQWSWMLQLCCCIEAHLKENAAYFQFFSDVREAEGQLQKLQEALRRKYSCDRSATVTRLEDLLQDAQDEKEQLNEYKGHLSGLAKRAKAVVQLKPRHPAHPMRGRLPLLAVCDYKQVEVTVHKGDECQLVGPAQPSHWKVLSSSGSEAAVPSVCFLVPPPNQEAQEAVTRLEAQHQALVTLWHQLHVDMKSLLAWQSLRRDVQLIRSWSLATFRTLKPEEQRQALHSLELHYQAFLRDSQDAGGFGPEDRLMAEREYGSCSHHYQQLLQSLEQGAQEESRCQRCISELKDIRLQLEACETRTVHRLRLPLDKEPARECAQRIAEQQKAQAEVEGLGKGVARLSAEAEKVLALPEPSPAAPTLRSELELTLGKLEQVRSLSAIYLEKLKTISLVIRGTQGAEEVLRAHEEQLKEAQAVPATLPELEATKASLKKLRAQAEAQQPTFDALRDELRGAQEVGERLQQRHGERDVEVERWRERVAQLLERWQAVLAQTDVRQRELEQLGRQLRYYRESADPLGAWLQDARRRQEQIQAMPLADSQAVREQLRQEQALLEEIERHGEKVEECQRFAKQYINAIKDYELQLVTYKAQLEPVASPAKKPKVQSGSESVIQEYVDLRTHYSELTTLTSQYIKFISETLRRMEEEERLAEQQRAEERERLAEVEAALEKQRQLAEAHAQAKAQAEREAKELQQRMQEEVVRREEAAVDAQQQKRSIQEELQQLRQSSEAEIQAKARQAEAAERSRLRIEEEIRVVRLQLEATERQRGGAEGELQALRARAEEAEAQKRQAQEEAERLRRQVQDESQRKRQAEVELASRVKAEAEAAREKQRALQALEELRLQAEEAERRLRQAEVERARQVQVALETAQRSAEAELQSKRASFAEKTAQLERSLQEEHVAVAQLREEAERRAQQQAEAERAREEAERELERWQLKANEALRLRLQAEEVAQQKSLAQAEAEKQKEEAEREARRRGKAEEQAVRQRELAEQELEKQRQLAEGTAQQRLAAEQELIRLRAETEQGEQQRQLLEEELARLQREAAAATQKRQELEAELAKVRAEMEVLLASKARAEEESRSTSEKSKQRLEAEAGRFRELAEEAARLRALAEEAKRQRQLAEEDAARQRAEAERVLAEKLAAIGEATRLKTEAEIALKEKEAENERLRRLAEDEAFQRRRLEEQAAQHKADIEERLAQLRKASDSELERQKGLVEDTLRQRRQVEEEILALKASFEKAAAGKAELELELGRIRSNAEDTLRSKEQAELEAARQRQLAAEEERRRREAEERVQKSLAAEEEAARQRKAALEEVERLKAKVEEARRLRERAEQESARQLQLAQEAAQKRLQAEEKAHAFAVQQKEQELQQTLQQEQSVLDQLRGEAEAARRAAEEAEEARVQAEREAAQSRRQVEEAERLKQSAEEQAQARAQAQAAAEKLRKEAEQEAARRAQAEQAALRQKQAADAEMEKHKKFAEQTLRQKAQVEQELTTLRLQLEETDHQKNLLDEELQRLKAEATEAARQRSQVEEELFSVRVQMEELSKLKARIEAENRALILRDKDNTQRFLQEEAEKMKQVAEEAARLSVAAQEAARLRQLAEEDLAQQRALAEKMLKEKMQAVQEATRLKAEAELLQQQKELAQEQARRLQEDKEQMAQQLAEETQGFQRTLEAERQRQLEMSAEAERLKLRVAEMSRAQARAEEDAQRFRKQAEEIGEKLHRTELATQEKVTLVQTLEIQRQQSDHDAERLREAIAELEREKEKLQQEAKLLQLKSEEMQTVQQEQLLQETQALQQSFLSEKDSLLQRERFIEQEKAKLEQLFQDEVAKAQQLREEQQRQQQQMEQERQRLVASMEEARRRQHEAEEGVRRKQEELQQLEQQRRQQEELLAEENQRLREQLQLLEEQHRAALAHSEEVTASQVAATKTLPNGRDALDGPAAEAEPEHSFDGLRRKVSAQRLQEAGILSAEELQRLAQGHTTVDELARREDVRHYLQGRSSIAGLLLKATNEKLSVYAALQRQLLSPGTALILLEAQAASGFLLDPVRNRRLTVNEAVKEGVVGPELHHKLLSAERAVTGYKDPYTGQQISLFQAMQKGLIVREHGIRLLEAQIATGGVIDPVHSHRVPVDVAYRRGYFDEEMNRVLADPSDDTKGFFDPNTHENLTYLQLLERCVEDPETGLCLLPLTDKAAKGGELVYTDSEARDVFEKATVSAPFGKFQGKTVTIWEIINSEYFTAEQRRDLLRQFRTGRITVEKIIKIIITVVEEQEQKGRLCFEGLRSLVPAAELLESRVIDRELYQQLQRGERSVRDVAEVDTVRRALRGANVIAGVWLEEAGQKLSIYNALKKDLLPSDMAVALLEAQAGTGHIIDPATSARLTVDEAVRAGLVGPEFHEKLLSAEKAVTGYRDPYTGQSVSLFQALKKGLIPREQGLRLLDAQLSTGGIVDPSKSHRVPLDVACARGCLDEETSRALSAPRADAKAYSDPSTGEPATYGELQQRCRPDQLTGLSLLPLSEKAARARQEELYSELQARETFEKTPVEVPVGGFKGRTVTVWELISSEYFTAEQRQELLRQFRTGKVTVEKVIKILITIVEEVETLRQERLSFSGLRAPVPASELLASGVLSRAQFEQLKDGKTTVKDLSELGSVRTLLQGSGCLAGIYLEDTKEKVSIYEAMRRGLLRATTAALLLEAQAATGFLVDPVRNQRLYVHEAVKAGVVGPELHEQLLSAEKAVTGYRDPYSGSTISLFQAMQKGLVLRQHGIRLLEAQIATGGIIDPVHSHRVPVDVAYQRGYFSEEMNRVLADPSDDTKGFFDPNTHENLTYRQLLERCVEDPETGLRLLPLKGAEKAEVVETTQVYTEEETRRAFEETQIDIPGGGSHGGSTMSLWEVMQSDLIPEEQRAQLMADFQAGRVTKERMIIIIIEIIEKTEIIRQQGLASYDYVRRRLTAEDLFEARIISLETYNLLREGTRSLREALEAESAWCYLYGTGSVAGVYLPGSRQTLSIYQALKKGLLSAEVARLLLEAQAATGFLLDPVKGERLTVDEAVRKGLVGPELHDRLLSAERAVTGYRDPYTEQTISLFQAMKKELIPTEEALRLLDAQLATGGIVDPRLGFHLPLEVAYQRGYLNKDTHDQLSEPSEVRSYVDPSTDERLSYTQLLRRCRRDDGTGQLLLPLSDARKLTFRGLRKQITMEELVRSQVMDEATALQLREGLTSIEEVTKNLQKFLEGTSCIAGVFVDATKERLSVYQAMKKGIIRPGTAFELLEAQAATGYVIDPIKGLKLTVEEAVRMGIVGPEFKDKLLSAERAVTGYKDPYSGKLISLFQAMKKGLILKDHGIRLLEAQIATGGIIDPEESHRLPVEVAYKRGLFDEEMNEILTDPSDDTKGFFDPNTEENLTYLQLMERCITDPQTGLCLLPLKEKKRERKTSSKSSVRKRRVVIVDPETGKEMSVYEAYRKGLIDHQTYLELSEQECEWEEITISSSDGVVKSMIIDRRSGRQYDIDDAIAKNLIDRSALDQYRAGTLSITEFADMLSGNAGGFRSRSSSVGSSSSYPISPAVSRTQLASWSDPTEETGPVAGILDTETLEKVSITEAMHRNLVDNITGQRLLEAQACTGGIIDPSTGERFPVTDAVNKGLVDKIMVDRINLAQKAFCGFEDPRTKTKMSAAQALKKGWLYYEAGQRFLEVQYLTGGLIEPDTPGRVPLDEALQRGTVDARTAQKLRDVGAYSKYLTCPKTKLKISYKDALDRSMVEEGTGLRLLEAAAQSTKGYYSPYSVSGSGSTAGSRTGSRTGSRAGSRRGSFDATGSGFSMTFSSSSYSSSGYGRRYASGSSASLGGPESAVA

SEQ ID NO: 5522 - protein, 882 aa, Homo sapiens
MAADKGPAAGPRSRAAMAQWRKKKGLRKRRGAASQARGSDSEDGEFEIQAEDDARARKLGPGRPLPTFPTSECTSDVEPDTREMVRAQNKKKKKSGGFQSMGLSYPVFKGIMKKGYKVPTPIQRKTIPVILDGKDVVAMARTGSGKTACFLLPMFERLKTHSAQTGARALILSPTRELALQTLKFTKELGKFTGLKTALILGGDRMEDQFAALHENPDIIIATPGRLVHVAVEMSLKLQSVEYVVFDEADRLFEMGFAEQLQEIIARLPGGHQTVLFSATLPKLLVEFARAGLTEPVLIRLDVDTKLNEQLKTSFFLVREDTKAAVLLHLLHNVVRPQDQTVVFVATKHHAEYLTELLTTQRVSCAHIYSALDPTARKINLAKFTLGKCSTLIVTDLAARGLDIPLLDNVINYSFPAKGKLFLHRVGRVARAGRSGTAYSLVAPDEIPYLLDLHLFLGRSLTLARPLKEPSGVAGVDGMLGRVPQSVVDEEDSGLQSTLEASLELRGLARVADNAQQQYVRSRPAPSPESIKRAKEMDLVGLGLHPLFSSRFEEEELQRLRLVDSIKNYRSRATIFEINASSRDLCSQVMRAKRQKDRKAIARFQQGQQGRQEQQEGPVGPAPSRPALQEKQPEKEEEEEAGESVEDIFSEVVGRKRQRSGPNRGAKRRREEARQRDQEFYIPYRPKDFDSERGLSISGEGGAFEQQAAGAVLDLMGDEAQNLTRGRQQLKWDRKKKRFVGQSGQEDKKKIKTESGRYISSSYKRDLYQKWKQKQKIDDRDSDEEGASDRRGPERRGGKRDRGQAGASRPHAPGTPAGRVRPELKTKQQILKQRRRAQKLHFLQRGGLKQLSARNRRRVQELQQGAFGRGARSKKGKMRKRM

SEQ ID NO: 5523 - protein, 630 aa, Homo sapiens
MAELCPLAEELSCSICLEPFKEPVTTPCGHNFCGSCLNETWAVQGSPYLCPQCRAVYQARPQLHKNTVLCNVVEQFLQADLAREPPADVWTPPARASAPSPNAQVACDHCLKEAAVKTCLVCMASFCQEHLQPHFDSPAFQDHPLQPPVRDLLRRKCSQHNRLREFFCPEHSECICHICLVEHKTCSPASLSQASADLEATLRHKLTVMYSQINGASRALDDVRNRQQDVRMTANRKVEQLQQEYTEMKALLDASETTSTRKIKEEEKRVNSKFDTIYQILLKKKSEIQTLKEEIEQSLTKRDEFEFLEKASKLRGISTKPVYIPEVELNHKLIKGIHQSTIDLKNELKQCIGRLQEPTPSSGDPGEHDPASTHKSTRPVKKVSKEEKKSKKPPPVPALPSKLPTFGAPEQLVDLKQAGLEAAAKATSSHPNSTSLKAKVLETFLAKSRPELLEYYIKVILDYNTAHNKVALSECYTVASVAEMPQNYRPHPQRFTYCSQVLGLHCYKKGIHYWEVELQKNNFCGVGICYGSMNRQGPESRLGRNSASWCVEWFNTKISAWHNNVEKTLPSTKATRVGVLLNCDHGFVIFFAVADKVHLMYKFRVDFTEALYPAFWVFSAGATLSICSPK

SEQ ID NO: 5524 - protein, 565 aa, Homo sapiens
MRPRSALPRLLLPLLLLPAAGPAQFHGEKGISIPDHGFCQPISIPLCTDIAYNQTIMPNLLGHTNQEDAGLEVHQFYPLVKVQCSPELRFFLCSMYAPVCTVLEQAIPPCRSICERARQGCEALMNKFGFQWPERLRCEHFPRHGAEQICVGQNHSEDGAPALLTTAPPPGLQPGAGGTPGGPGGGGAPPRYATLEHPFHCPRVLKVPSYLSYKFLGERDCAAPCEPARPDGSMFFSQEETRFARLWILTWSVLCCASTFFTVTTYLVDMQRFRYPERPIIFLSGCYTMVSVAYIAGFVLQERVVCNERFSEDGYRTVVQGTKKEGCTILFMMLYFFSMASSIWWVILSLTWFLAAGMKWGHEAIEANSQYFHLAAWAVPAVKTITILAMGQIDGDLLSGVCFVGLNSLDPLRGFVLAPLFVYLFIGTSFLLAGFVSLFRIRTIMKHDGTKTEKLERLMVRIGVFSVLYTVPATIVIACYFYEQAFREHWERSWVSQHCKSLAIPCPAHYTPRMSPDFTVYMIKYLMTLIVGITSGFWIWSGKTLHSWRKFYTRLTNSRHGETTV

SEQ ID NO: 5525 - protein, 500 aa, Homo sapiens
MRGELWLLVLVLREAARALSPQPGAGHDEGPGSGWAAKGTVRGWNRRARESPGHVSEPDRTQLSQDLGGGTLAMDTLPDNRTRVVEDNHSYYVSRLYGPSEPHSRELWVDVAEANRSQVKIHTILSNTHRQASRVVLSFDFPFYGHPLRQITIATGGFIFMGDVIHRMLTATQYVAPLMANFNPGYSDNSTVVYFDNGTVFVVQWDHVYLQGWEDKGSFTFQAALHHDGRIVFAYKEIPMSVPEISSSQHPVKTGLSDAFMILNPSPDVPESRRRSIFEYHRIELDPSKVTSMSAVEFTPLPTCLQHRSCDACMSSDLTFNCSWCHVLQRCSSGFDRYRQEWMDYGCAQEAEGRMCEDFQDEDHDSASPDTSFSPYDGDLTTTSSSLFIDSLTTEDDTKLNPYAGGDGLQNNLSPKTKGTPVHLGTIVGIVLAVLLVAAIILAGIYINGHPTSNAALFFIERRPHHWPAMKFRSHPDHSTYAEVEPSGHEKEGFMEAEQC

SEQ ID NO: 5526 - protein, 1474 aa, Homo sapiens
MGKNKLLHPSLVLLLLVLLPTDASVSGKPQYMVLVPSLLHTETTEKGCVLLSYLNETVTVSASLESVRGNRSLFTDLEAENDVLHCVAFAVPKSSSNEEVMFLTVQVKGPTQEFKKRTTVMVKNEDSLVFVQTDKSIYKPGQTVKFRVVSMDENFHPLNELIPLVYIQDPKGNRIAQWQSFQLEGGLKQFSFPLSSEPFQGSYKVVVQKKSGGRTEHPFTVEEFVLPKFEVQVTVPKIITILEEEMNVSVCGLYTYGKPVPGHVTVSICRKYSDASDCHGEDSQAFCEKFSGQLNSHGCFYQQVKTKVFQLKRKEYEMKLHTEAQIQEEGTVVELTGRQSSEITRTITKLSFVKVDSHFRQGIPFFGQVRLVDGKGVPIPNKVIFIRGNEANYYSNATTDEHGLVQFSINTTNVMGTSLTVRVNYKDRSPCYGYQWVSEEHEEAHHTAYLVFSPSKSFVHLEPMSHELPCGHTQTVQAHYILNGGTLLGLKKLSFYYLIMAKGGIVRTGTHGLLVKQEDMKGHFSISIPVKSDIAPVARLLIYAVLPTGDVIGDSAKYDVENCLANKVDLSFSPSQSLPASHAHLRVTAAPQSVCALRAVDQSVLLMKPDAELSASSVYNLLPEKDLTGFPGPLNDQDNEDCINRHNVYINGITYTPVSSTNEKDMYSFLEDMGLKAFTNSKIRKPKMCPQLQQYEMHGPEGLRVGFYESDVMGRGHARLVHVEEPHTETVRKYFPETWIWDLVVVNSAGVAEVGVTVPDTITEWKAGAFCLSEDAGLGISSTASLRAFQPFFVELTMPYSVIRGEAFTLKATVLNYLPKCIRVSVQLEASPAFLAVPVEKEQAPHCICANGRQTVSWAVTPKSLGNVNFTVSAEALESQELCGTEVPSVPEHGRKDTVIKPLLVEPEGLEKETTFNSLLCPSGGEVSEELSLKLPPNVVEESARASVSVLGDILGSAMQNTQNLLQMPYGCGEQNMVLFAPNIYVLDYLNETQQLTPEIKSKAIGYLNTGYQRQLNYKHYDGSYSTFGERYGRNQGNTWLTAFVLKTFAQARAYIFIDEAHITQALIWLSQRQKDNGCFRSSGSLLNNAIKGGVEDEVTLSAYITIALLEIPLTVTHPVVRNALFCLESAWKTAQEGDHGSHVYTKALLAYAFALAGNQDKRKEVLKSLNEEAVKKDNSVHWERPQKPKAPVGHFYEPQAPSAEVEMTSYVLLAYLTAQPAPTSEDLTSATNIVKWITKQQNAQGGFSSTQDTVVALHALSKYGAATFTRTGKAAQVTIQSSGTFSSKFQVDNNNRLLLQQVSLPELPGEYSMKVTGEGCVYLQTSLKYNILPEKEEFPFALGVQTLPQTCDEPKAHTSFQISLSVSYTGSRSASNMAIVDVKMVSGFIPLKPTVKMLERSNHVSRTEVSSNHVLIYLDKVSNQTLSLFFTVLQDVPVRDLKPAIVKVYDYYETDEFAIAEYNAPCSKDLGNA

SEQ ID NO: 5527 - protein, 744 aa, Homo sapiens
MGLGLLLPLLLLWTRGTQGSELDPKGQHVCVASSPSAELQCCAGWRQKDQECTIPICEGPDACQKDEVCVKPGLCRCKPGFFGAHCSSRCPGQYWGPDCRESCPCHPHGQCEPATGACQCQADRWGARCEFPCACGPHGRCDPATGVCHCEPGWWSSTCRRPCQCNTAAARCEQATGACVCKPGWWGRRCSFRCNCHGSPCEQDSGRCACRPGWWGPECQQQCECVRGRCSAASGECTCPPGFRGARCELPCPAGSHGVQCAHSCGRCKHNEPCSPDTGSCESCEPGWNGTQCQQPCLPGTFGESCEQQCPHCRHGEACEPDTGHCQPGSGSRDTALIAGSLVPLLLLFLGLACCACCCWAPRSDLKDRPARDGATVSRMKLQVWGTLTSLGSTLPCRSLSSHKLPWVTVSHHDPEVPFNHSFIEPPSAGWATDDSFSSDPESGEADEVPAYCVPPQEGMVPVAQAGSSEASLAAGAFPPPEDASTPFAIPRTSSLARAKRPSVSFAEGTKFAPQSRRSSGELSSPLRKPKRLSRGAQSGPEGREAEESTGPEEAEAPESFPAAASPGDSATGHRRPPLGGRTVAEHVEAIEGSVQESSGPVTTIYMLAGKPRGSEGPVRSVFRHFGSFQKGQAEAKVKRAIPKPPRQALNRKKGSPGLASGSVGQSPNSAPKAGLPGATGPMAVRPEEAVRGLGAGTESSRRAQEPVSGCGSPEQDPQKQAEEERQEEPEYENVVPISRPPEP

SEQ ID NO: 5528 - protein, 411 aa, Homo sapiens
MSKRPSYAPPPTPAPATQMPSTPGFVGYNPYSHLAYNNYRLGGNPGTNSRVTASSGITIPKPPKPPDKPLMPYMRYSRKVWDQVKASNPDLKLWEIGKIIGGMWRDLTDEEKQEYLNEYEAEKIEYNESMKAYHNSPAYLAYINAKSRAEAALEEESRQRQSRMEKGEPYMSIQPAEDPDDYDDGFSMKHTATARFQRNHRLISEILSESVVPDVRSVVTTARMQVLKRQVQSLMVHQRKLEAELLQIEERHQEKKRKFLESTDSFNNELKRLCGLKVEVDMEKIAAEIAQAEEQARKRQEEREKEAAEQAERSQSSIVPEEEQAANKGEEKKDDENIPMETEETHLEETTESQQNGEEGTSTPEDKESGQEGVDSMAEEGTSDSNTGSESNSATVEEPPTDPIPEDEKKE

SEQ ID NO: 5529 - protein, 1182 aa, Homo sapiens
MRAVLTWRDKAEHCINDIAFKPDGTQLILAAGSRLLVYDTSDGTLLQPLKGHKDTVYCVAYAKDGKRFASGSADKSVIIWTSKLEGILKYTHNDAIQCVSYNPITHQLASCSSSDFGLWSPEQKSVSKHKSSSKIICCSWTNDGQYLALGMFNGIISIRNKNGEEKVKIERPGGSLSPIWSICWNPSREERNDILAVADWGQKVSFYQLSGKQIGKDRALNFDPCCISYFTKGEYILLGGSDKQVSLFTKDGVRLGTVGEQNSWVWTCQAKPDSNYVVVGCQDGTISFYQLIFSTVHGLYKDRYAYRDSMTDVIVQHLITEQKVRIKCKELVKKIAIYRNRLAIQLPEKILIYELYSEDLSDMHYRVKEKIIKKFECNLLVVCANHIILCQEKRLQCLSFSGVKEREWQMESLIRYIKVIGGPPGREGLLVGLKNGQILKIFVDNLFAIVLLKQATAVRCLDMSASRKKLAVVDENDTCLVYDIDTKELLFQEPNANSVAWNTQCEDMLCFSGGGYLNIKASTFPVHRQKLQGFVVGYNGSKIFCLHVFSISAVEVPQSAPMYQYLDRKLFKEAYQIACLGVTDTDWRELAMEALEGLDFETAKKAFIRVQDLRYLELISSIEERKKRGETNNDLFLADVFSYQGKFHEAAKLYKRSGHENLALEMYTDLCMFEYAKDFLGSGDPKETKMLITKQADWARNIKEPKAAVEMYISAGEHVKAIEICGDHGWVDMLIDIARKLDKAEREPLLLCATYLKKLDSPGYAAETYLKMGDLKSLVQLHVETQRWDEAFALGEKHPEFKDDIYMPYAQWLAENDRFEEAQKAFHKAGRQREAVQVLEQLTNNAVAESRFNDAAYYYWMLSMQCLDIAQDPAQKDTMLGKFYHFQRLAELYHGYHAIHRHTEDPFSVHRPETLFNISRFLLHSLPKDTPSGISKVKILFTLAKQSKALGAYRLARHAYDKLRGLYIPARFQKSIELGTLTIRAKPFHDSEELVPLCYRCSTNNPLLNNLGNVCINCRQPFIFSASSYDVLHLVEFYLEEGITDEEAISLIDLEVLRPKRDDRQLEIANNSSQILRLVETKDSIGDEDPFTAKLSFEQGGSEFVPVVVSRLVLRSMSRRDVLIKRWPPPLRWQYFRSLLPDASITMCPSCFQMFHSEDYELLVLQHGCCPYCRRCKDDPGP

SEQ ID NO: 5530 - protein, 1241 aa, Homo sapiens
MRAVLTWRDKAEHCINDIAFKPDGTQLILAAGSRLLVYDTSDGTLLQPLKGHKDTVYCVAYAKDGKRFASGSADKSVIIWTSKLEGILKYTHNDAIQCVSYNPITHQLASCSSSDFGLWSPEQKSVSKHKSSSKIICCSWTNDGQYLALGMFNGIISIRNKNGEEKVKIERPGGSLSPIWSICWNPSSRWESFWMNRENEDAEDVIVNRYIQEIPSTLKSAVYSSQGSEAEEEEPEEEDDSPRDDNLEERNDILAVADWGQKVSFYQLSGKQIGKDRALNFDPCCISYFTKGEYILLGGSDKQVSLFTKDGVRLGTVGEQNSWVWTCQAKPDSNYVVVGCQDGTISFYQLIFSTVHGLYKDRYAYRDSMTDVIVQHLITEQKVRIKCKELVKKIAIYRNRLAIQLPEKILIYELYSEDLSDMHYRVKEKIIKKFECNLLVVCANHIILCQEKRLQCLSFSGVKEREWQMESLIRYIKVIGGPPGREGLLVGLKNGQILKIFVDNLFAIVLLKQATAVRCLDMSASRKKLAVVDENDTCLVYDIDTKELLFQEPNANSVAWNTQCEDMLCFSGGGYLNIKASTFPVHRQKLQGFVVGYNGSKIFCLHVFSISAVEVPQSAPMYQYLDRKLFKEAYQIACLGVTDTDWRELAMEALEGLDFETAKKAFIRVQDLRYLELISSIEERKKRGETNNDLFLADVFSYQGKFHEAAKLYKRSGHENLALEMYTDLCMFEYAKDFLGSGDPKETKMLITKQADWARNIKEPKAAVEMYISAGEHVKAIEICGDHGWVDMLIDIARKLDKAEREPLLLCATYLKKLDSPGYAAETYLKMGDLKSLVQLHVETQRWDEAFALGEKHPEFKDDIYMPYAQWLAENDRFEEAQKAFHKAGRQREAVQVLEQLTNNAVAESRFNDAAYYYWMLSMQCLDIAQDPAQKDTMLGKFYHFQRLAELYHGYHAIHRHTEDPFSVHRPETLFNISRFLLHSLPKDTPSGISKVKILFTLAKQSKALGAYRLARHAYDKLRGLYIPARFQKSIELGTLTIRAKPFHDSEELVPLCYRCSTNNPLLNNLGNVCINCRQPFIFSASSYDVLHLVEFYLEEGITDEEAISLIDLEVLRPKRDDRQLEIANNSSQILRLVETKDSIGDEDPFTAKLSFEQGGSEFVPVVVSRLVLRSMSRRDVLIKRWPPPLRWQYFRSLLPDASITMCPSCFQMFHSEDYELLVLQHGCCPYCRRCKDDPGP

SEQ ID NO: 5531 - protein, 318 aa, Homo sapiens
MLPLTMTVLILLLLPTGQAAPKDGVTRPDSEVQHQLLPNPFQPGQEQLGLLQSYLKGLGRTEVQLEHLSREQVLLYLFALHDYDQSGQLDGLELLSMLTAALAPGAANSPTTNPVILIVDKVLETQDLNGDGLMTPAELINFPGVALRHVEPGEPLAPSPQEPQAVGRQSLLAKSPLRQETQEAPGPREEAKGQVEARRESLDPVQEPGGQAEADGDVPGPRGEAEGQAEAKGDAPGPRGEAGGQAEAEGDAPGPRGEAGGQAEAEGDAPGPRGEAGGQAEARENGEEAKELPGETLESKNTQNDFEVHIVQVENDEI

SEQ ID NO: 5532 - protein, 554 aa, Homo sapiens [sequence omitted]

SEQ ID NO: 5533 - protein, 261 aa, Homo sapiens [sequence omitted]

SEQ ID NO: 5534 - protein, 253 aa, Homo sapiens
MGEFNEKKTTCGTVCLKYLLFTYNCCFWLAGLAVMAVGIWTLALKSDYISLLASGTYLATAYILVVAGTVVMVTGVLGCCATFKERRNLLRLYFILLLIIFLLEIIAGILAYAYYQQLNTELKENLKDTMTKRYHQPGHEAVTSAVDQLQQEFHCCGSNNSQDWRDSEWIRSQEAGGRVVPDSCCKTVVALCGQRDHASNIYKVEGGCITKLETFIQEHLRVIGAVGIGIACVQVFGMIFTCCLYRSLKLEHY

SEQ ID NO: 5535 - protein, 499 aa, Homo sapiens
MSLADELLADLEEAAEEEEGGSYGEEEEEPAIEDVQEETQLDLSGDSVKTIAKLWDSKMFAEIMMKIEEYISKQAKASEVMGPVEAAPEYRVIVDANNLTVEIENELNIIHKFIRDKYSKRFPELESLVPNALDYIRTVKELGNSLDKCKNNENLQQILTNATIMVVSVTASTTQGQQLSEEELERLEEACDMALELNASKHRIYEYVESRMSFIAPNLSIIIGASTAAKIMGVAGGLTNLSKMPACNIMLLGAQRKTLSGFSSTSVLPHTGYIYHSDIVQSLPPDLRRKAARLVAAKCTLAARVDSFHESTEGKVGYELKDEIERKFDKWQEPPPVKQVKPLPAPLDGQRKKRGGRRYRKMKERLGLTEIRKQANRMSFGEIEEDAYQEDLGFSLGHLGKSGSGRVRQTQVNEATKARISKTLQRTLQKQSVVYGGKSTIRDRSSGTASSVAFTPLQGLEIVNPQAAEKKVAEANQKYFSSMAEFLKVKGEKSGLMST

SEQ ID NO: 5536 - protein, 67 aa, Homo sapiens
MIIPVRCFTCGKIVGNKWEAYLGLLQAEYTEGDALDALGLKRYCCRRMLLAHVDLIEKLLNYAPLEK

SEQ ID NO: 5537 - protein, 654 aa, Homo sapiens
MKLSLVAAMLLLLSAARAEEEDKKEDVGTVVGIDLGTTYSCVGVFKNGRVEIIANDQGNRITPSYVAFTPEGERLIGDAAKNQLTSNPENTVFDAKRLIGRTWNDPSVQQDIKFLPFKVVEKKTKPYIQVDIGGGQTKTFAPEEISAMVLTKMKETAEAYLGKKVTHAVVTVPAYFNDAQRQATKDAGTIAGLNVMRIINEPTAAAIAYGLDKREGEKNILVFDLGGGTFDVSLLTIDNGVFEVVATNGDTHLGGEDFDQRVMEHFIKLYKKKTGKDVRKDNRAVQKLRREVEKAKRALSSQHQARIEIESFYEGEDFSETLTRAKFEELNMDLFRSTMKPVQKVLEDSDLKKSDIDEIVLVGGSTRIPKIQQLVKEFFNGKEPSRGINPDEAVAYGAAVQAGVLSGDQDTGDLVLLDVCPLTLGIETVGGVMTKLIPRNTVVPTKKSQIFSTASDNQPTVTIKVYEGERPLTKDNHLLGTFDLTGIPPAPRGVPQIEVTFEIDVNGILRVTAEDKGTGNKNKITITNDQNRLTPEEIERMVNDAEKFAEEDKKLKERIDTRNELESYAYSLKNQIGDKEKLGGKLSSEDKETMEKAVEEKIEWLESHQDADIEDFKAKKKELEEIVQPIISKLYGSAGPPPTGEEDTAEKDEL

SEQ ID NO: 5538 - protein, 208 aa, Homo sapiens
MEDLLDLDEELRYSLATSRAKMGRRAQQESAQAENHLNGKNSSLTLTGETSSAKLPRCRQGGWAGDSVKASKFRRKASEEIEDFRLRPQSLNGSDYGGDIPIIPDLEEVQEEDFVLQVAAPPSIQIKRVMTYRDLDNDLMKYSAIQTLDGEIDLKLLTKVLAPEHEVREDDVGWDWDHLFTEVSSEVLTEWDPLQTEKEDPAGQARHT

SEQ ID NO: 5539 - protein, 248 aa, Homo sapiens
MGLSIFLLLCVLGLSQAATPKIFNGTECGRNSQPWQVGLFEGTSLRCGGVLIDHRWVLTAAHCSGSRYWVRLGEHSLSQLDWTEQIRHSGFSVTHPGYLGASTSHEHDLRLLRLRLPVRVTSSVQPLPLPNDCATAGTECHVSGWGITNHPRNPFPDLLQCLNLSIVSHATCHGVYPGRITSNMVCAGGVPGQDACQGDSGGPLVCGGVLQGLVSWGSVGPCGQDGIPGVYTYICKYVDWIRMIMRNN

SEQ ID NO: 5540 - protein, 548 aa, Homo sapiens
MKTLETQPLAPDCCPSDQDPAPAHPSPHASPMNKNADSELMPPPPERGDPPRLSPDPVAGSAVSQELREGDPVSLSTPLETEFGSPSELSPRIEEQELSENTSLPAEEANGSLSEEEANGPELGSGKAMEDTSGEPAAEDEGDTAWNYSFSQLPRFLSGSWSEFSTQPENFLKGCKWAPDGSCILTNSADNILRIYNLPPELYHEGEQVEYAEMVPVLRMVEGDTIYDYCWYSLMSSAQPDTSYVASSSRENPIHIWDAFTGELRASFRAYNHLDELTAAHSLCFSPDGSQLFCGFNRTVRVFSTARPGRDCEVRATFAKKQGQSGIISCIAFSPAQPLYACGSYGRSLGLYAWDDGSPLALLGGHQGGITHLCFHPDGNRFFSGARKDAELLCWDLRQSGYPLWSLGREVTTNQRIYFDLDPTGQFLVSGSTSGAVSVWDTDGPGNDGKPEPVLSFLPQKDCTNGVSLHPSLPLLATASGQRVFPEPTESGDEGEELGLPLLSTRHVHLECRLQLWWCGGAPDSSIPDDHQGEKGQGGTEGGVGELI

SEQ ID NO: 5541 - protein, 222 aa, Homo sapiens
MSGLGRLFGKGKKEKGPTPEEAIQKLKETEKILIKKQEFLEQKIQQELQTAKKYGTKNKRAALQALRRKKRFEQQLAQTDGTLSTLEFQREAIENATTNAEVLRTMELAAQSMKKAYQDMDIDKVDELMTDITEQQEVAQQISDAISRPMGFGDDVDEDELLEELEELEQEELAQELLNVGDKEEEPSVKLPSVPSTHLPAGPAPKVDEDEEALKQLAEWVS

SEQ ID NO: 5542 - protein, 847 aa, Homo sapiens
MEALGPGGDRASPASSTSSLDLWHLSMRADSAYSSFSAASGGPEPRTQSPGTDLLPYLDWDYVRVVWGGPGPAPPDAALCTSPRPRPAVAARSGPQPTEVPGTPGPLNRQATPLLYALAAEAEAAAQAAEPPSPPASRAAYRQRLQGAQRRVLRETSFQRKELRMSLPARLRPTVPARPPATHPRSASLSHPGGEGEPARSRAPAPGTAGRGPLANQQRKWCFSEPGKLDRVGRGGGPARECLGEACSSSGLPGPEPLEFQHPALAKFEDHEVGWLPETQPQGSMNLDSGSLKLGDAFRPASRSRSASGEVLGSWGGSGGTIPIVQAVPQGAETPRPLFQTKLSRFLPQKEAAVMYPAELPQSSPADSEQRVSETCIVPAWLPSLPDEVFLEEAPLVRMRSPPDPHASQGPPASVHASDQPYGTGLGQRTGQVTVPTEYPLHECPGTAGADDCWQGVNGSVGISRPTSHTPTGTANDNIPTIDPTGLTTNPPTAAESDLLKPVPADALGLSGNDTPGPSHNTALARGTGQPGSRPTWPSQCLEELVQELARLDPSLCDPLASQPSPEPPLGLLDGLIPLAEVRAAMRPACGEAGEEAASTFEPGSYQFSFTQLLPAPREETRLENPATHPVLDQPCGQGLPAPNNSIQGKKVELAARLQKMLQDLHTEQERLQGEAQAWARRQAALEAAVRQACAPQELERFSRFMADLERVLGLLLLLGSRLARVRRALARAASDSDPDEQRLRLLQRQEEDAKELKEHVARRERAVREVLVRALPVEELRVYCALLAGKAAVLAQQRNLDERIRLLQDQLDAIRDDLGHHAPSPSPARPPGTCPPVQPPFPLLLT

SEQ ID NO: 5543 - protein, 267 aa, Homo sapiens
MARFLTLCTWLLLLGPGLLATVRAECSQDCATCSYRLVRPADINFLACVMECEGKLPSLKIWETCKELLQLSKPELPQDGTSTLRENSKPEESHLLAKRYGGFMKRYGGFMKKMDELYPMEPEEEANGSEILAKRYGGFMKKDAEEDDSLANSSDLLKELLETGDNRERSHHQDGSDNEEEVSKRYGGFMRGLKRSPQLEDEAKELQKRYGGFMRRVGRPEWWMDYQKRYGGFLKRFAEALPSDEEGESYSKEVPEMEKRYGGFMRF

SEQ ID NO: 5544 - protein, 250 aa, Homo sapiens
MRILQLILLALATGLVGGETRIIKGFECKPHSQPWQAALFEKTRLLCGATLIAPRWLLTAAHCLKPRYIVHLGQHNLQKEEGCEQTRTATESFPHPGFNNSLPNKDHRNDIMLVKMASPVSITWAVRPLTLSSRCVTAGTSCLISGWGSTSSPQLRLPHTLRCANITIIEHQKCENAYPGNITDTMVCASVQEGGKDSCQGDSGGPLVCNQSLQGIISWGQDPCAITRKPGVYTKVCKYVDWIQETMKNN

SEQ ID NO: 5545 - protein, 525 aa, Homo sapiens
MSGNWVHPGQILIWAIWVLAAPTKGPSAEGPQRNTRLGWIQGKQVTVLGSPVPVNVFLGVPFAAPPLGSLRFTNPQPASPWDNLREATSYPNLCLQNSEWLLLDQHMLKVHYPKFGVSEDCLYLNIYAPAHADTGSKLPVLVWFPGGAFKTGSASIFDGSALAAYEDVLVVVVQYRLGIFGFFTTWDQHAPGNWAFKDQVAALSWVQKNIEFFGGDPSSVTIFGESAGAISVSSLILSPMAKGLFHKAIMESGVAIIPYLEAHDYEKSEDLQVVAHFCGNNASDSEALLRCLRTKPSKELLTLSQKTKSFTRVVDGAFFPNEPLDLLSQKAFKAIPSIIGVNNHECGFLLPMKEAPEILSGSNKSLALHLIQNILHIPPQYLHLVANEYFHDKHSLTEIRDSLLDLLGDVFFVVPALITARYHREGATEEEKLLSRKMMKYWATFARTGNPNGNDLSLWPAYNLTEQYLQLDLNMSLGQRLKEPRVDFWTSTIPLILSASDMLHSPLSSLTFLSLLQPFFFFCAP

SEQ ID NO: 5546 - protein, 170 aa, Homo sapiens
MATPMHRLIARRQAEANKQHVRCQKCLEFGHWTYECTGKRKYLHRPSRTAELKKALKEKENRLLLQQSIGETNVERKAKKKRSKSVTSSSSSSSDSSASDSSSESEETSTSSSSEDSDTDESSSSSSSSASSTTSSSSSDSDSDSSSSSSSSTSTDSSSDDEPPKKKKKK

SEQ ID NO: 5547 - protein, 778 aa, Homo sapiens
MKMTVDFEECLKDSPRFRAALEEVEGDVAELELKLDKLVKLCIAMIDTGKAFCVANKQFMNGIRDLAQYSSNDAVVETSLTKFSDSLQEMINFHTILFDQTQRSIKAQLQNFVKEDLRKFKDAKKQFEKVSEEKENALVKNAQVQRNKQHEVEEATNILTATRKCFRHIALDYVLQINVLQSKRRSEILKSMLSFMYAHLAFFHQGYDLFSELGPYMKDLGAQLDRLVVDAAKEKREMEQKHSTIQQKDFSSDDSKLEYNVDAANGIVMEGYLFKRASNAFKTWNRRWFSIQNNQLVYQKKFKDNPTVVVEDLRLCTVKHCEDIERRFCFEVVSPTKSCMLQADSEKLRQAWIKAVQTSIATAYREKGDESEKLDKKSSPSTGSLDSGNESKEKLLKGESALQRVQCIPGNASCCDCGLADPRWASINLGITLCIECSGIHRSLGVHFSKVRSLTLDTWEPELLKLMCELGNDVINRVYEANVEKMGIKKPQPGQRQEKEAYIRAKYVERKFVDKYSISLSPPEQQKKFVSKSSEEKRLSISKFGPGDQVRASAQSSVRSNDSGIQQSSDDGRESLPSTVSANSLYEPEGERQDSSMFLDSKHLNPGLQLYRASYEKNLPKMAEALAHGADVNWANSEENKATPLIQAVLGGSLVTCEFLLQNGANVNQRDVQGRGPLHHATVLGHTGQVCLFLKRGANQHATDEEGKDPLSIAVEAANADIVTLLRLARMNEEMRESEGLYGQPGDETYQDIFRDFSQMASNNPEKLNRFQQDSQKF

SEQ ID NO: 5548 - protein, 735 aa, Homo sapiens
MEDAGGGEETPAPEAPHPPQLAPPEEQGLLFQEETIDLGGDEFGSEENETASEGSSPLADKLNEHMMESVLISDSPNSEGDAGDLGRVRDEAEPGGEGDPGPEPAGTPSPSGEADGDCAPEDAAPSSGGAPRQDAAREVPGSEAARPEQEPPVAEPVPVCTIFSQRAPPASGDGFEPQMVKSPSFGGASEASARTPPQVVQPSPSLSTFFGDTAASHSLASDFFDSFTTSAFISVSNPGAGSPAPASPPPLAVPGTEGRPEPVAMRGPQAAAPPASPEPFAHIQAVFAGSDDPFATALSMSEMDRRNDAWLPGEATRGVLRAVATQQRGAVFVDKENLTMPGLRFDNIQGDAVKDLMLRFLGEKAAAKRQVLNADSVEQSFVGLKQLISCRNWRAAVDLCGRLLTAHGQGYGKSGLLTSHTTDSLQLWFVRLALLVKLGLFQNAEMEFEPFGNLDQPDLYYEYYPHVYPGRRGSMVPFSMRILHAELQQYLGNPQESLDRLHKVKTVCSKILANLEQGLAEDGGMSSVTQEGRQASIRLWRSRLGRVMYSMANCLLLMKDYVLAVEAYHSVIKYYPEQEPQLLSGIGRISLQIGDIKTAEKYFQDVEKVTQKLDGLQGKIMVLMNSAFLHLGQNNFAEAHRFFTEILRMDPRNAVANNNAAVCLLYLGKLKDSLRQLEAMVQQDPRHYLHESVLFNLTTMYELESSRSMQKKQALLEAVAGKEGDSFNTQCLKLA

SEQ ID NO: 5549 - protein, 384 aa, Homo sapiens
MAGAEWKSLEECLEKHLPLPDLQEVKRVLYGKELRKLDLPREAFEAASREDFELQGYAFEAAEEQLRRPRIVHVGLVQNRIPLPANAPVAEQVSALHRRIKAIVEVAAMCGVNIICFQEAWTMPFAFCTREKLPWTEFAESAEDGPTTRFCQKLAKNHDMVVVSPILERDSEHGDVLWNTAVVISNSGAVLGKTRKNHIPRVGDFNESTYYMEGNLGHPVFQTQFGRIAVNICYGRHHPLNWLMYSINGAEIIFNPSATIGALSESLWPIEARNAAIANHCFTCAINRVGTEHFPNEFTSGDGKKAHQDFGYFYGSSYVAAPDSSRTPGLSRSRDGLLVAKLDLNLCQQVNDVWNFKMTGRYEMYARELAEAVKSNYSPTIVKE

SEQ ID NO: 5550 - protein, 498 aa, Homo sapiens
MALPTLPSYWCSQQRLNQQLARQREQEARLRQQWEQNSRYFRMSDICSSKQAEWSSKTSYQRSMHAYQREKMKEEKRRSLEARREKLRQLMQEEQDLLARELEELRLSMNLQERRIREQHGKLKSAKEEQRKLIAEQLLYEHWKKNNPKLREMELDLHQKHVVNSWEMQKEEKKQQEATAEQENKRYENEYERARREALERMKAEEERRQLEDKLQAEALLQQMEELKLKEVEATKLKKEQENLLKQRWELERLEEERKQMEAFRQKAELGRFLRHQYNAQLSRRTQQIQEELEADRRILQALLEKEDESQRLHLARREQVMADVAWMKQAIEEQLQLERAREAELQMLLREEAKEMWEKREAEWARERSARDRLMSEVLTGRQQQIQEKIEQNRRAQEESLKHREQLIRNLEEVRELARREKEESEKLKSARKQELEAQVAERRLQAWEADQQEEEEEEEARRVEQLSDALLQQEAETMAEQGYRPKPYGHPKIAWN

SEQ ID NO: 5551 - protein, 572 aa, Homo sapiens
MAAPRPSPAISVSVSAPAFYAPQKKFGPVVAPKPKVNPFRPGDSEPPPAPGAQRAQMGRVGEIPPPPPEDFPLPPPPLAGDGDDAEGALGGAFPPPPPPIEESFPPAPLEEEIFPSPPPPPEEEGGPEAPIPPPPQPREKVSSIDLEIDSLSSLLDDMTKNDPFKARVSSGYVPPPVATPFSSKSSTKPAAGGTAPLPPWKSPSSSQPLPQVPAPAQSQTQFHVQPQPQPKPQVQLHVQSQTQPVSLANTQPRGPPASSPAPAPKFSPVTPKFTPVASKFSPGAPGGSGSQPNQKLGHPEALSAGTGSPQPPSFTYAQQREKPRVQEKQHPVPPPAQNQNQVRSPGAPGPLTLKEVEELEQLTQQLMQDMEHPQRQNVAVNELCGRCHQPLARAQPAVRALGQLFHIACFTCHQCAQQLQGQQFYSLEGAPYCEGCYTDTLEKCNTCGEPITDRMLRATGKAYHPHCFTCVVCARPLEGTSFIVDQANRPHCVPDYHKQYAPRCSVCSEPIMPEPGRDETVRVVALDKNFHMKCYKCEDCGKPLSIEADDNGCFPLDGHVLCRKCHTARAQT

SEQ ID NO: 5552 - protein, 343 aa, Homo sapiens
MAAATELNRPSSGDRNLERRCRPNLSREVLYEIFRSLHTLVGQLDLRDDVVKITIDWNKLQSLSAFQPALLFSALEQHILYLQPFLAKLQSPIKEENTTAVEEIGRTEMGNKNEVNDKFSIGDLQEEEKHKESDLRDVKKTQIHFDPEVVQIKAGKAEIDRRISAFIERKQAEINENNVREFCNVIDCNQENSCARTDAIFTPYPGFKSHVKVSRVVNTYGPQTRPEGIPGSGHKPNSMLRDCGNQAVEERLQNIEAHLRLQTGGPVPRDIYQRIKKLEDKILELEGISPEYFQSVSFSGKRRKVQPPQNYSLAELDEKISALKQALLRKSREAESMATHHLP

SEQ ID NO: 5553 - protein, 2146 aa, Homo sapiens
MYPNWGRYGGSSHYPPPPVPPPPPVALPEASPGPGYSSSTTPAAPSSSGFMSFREQHLAQLQQLQQMHQKQMQCVLQPHHLPPPPLPPPPVMPGGGYGDWQPPPPPMPPPPGPALSYQKQQQYKHQMLHHQRDGPPGLVPMELESPPESPPVPPGSYMPPSQSYMPPPQPPPSYYPPTSSQPYLPPAQPSPSQSPPSQSYLAPTPSYSSSSSSSQSYLSHSQSYLPSSQASPSRPSQGHSKSQLLAPPPPSAPPGNKTTVQQEPLESGAKNKSTEQQQAAPEPDPSTMTPQEQQQYWYRQHLLSLQQRTKVHLPGHKKGPVVAKDTPEPVKEEVTVPATSQVPESPSSEEPPLPPPNEEVPPPLPPEEPQSEDPEEDARLKQLQAAAAHWQQHQQHRVGFQYQGIMQKHTQLQQILQQYQQIIQPPPHIQTMSVDMQLRHYEMQQQQFQHLYQEWEREFQLWEEQLHSYPHKDQLQEYEKQWKTWQGHMKATQSYLQEKVNSFQNMKNQYMGNMSMPPPFVPYSQMPPPLPTMPPPVLPPSLPPPVMPPALPATVPPPGMPPPVMPPSLPTSVPPPGMPPSLSSAGPPPVLPPPSLSSAGPPPVLPPPSLSSTAPPPVMPLPPLSSATPPPGIPPPGVPQGIPPQLTAAPVPPASSSQSSQVPEKPRPALLPTPVSFGSAPPTTYHPPLQSAGPSEQVNSKAPLSKSALPYSSFSSDQGLGESSAAPSQPITAVKDMPVRSGGLLPDPPRSSYLESPRGPRFDGPRRFEDLGSRCEGPRPKGPRFEGNRPDGPRPRYEGHPAEGTKSKWGMIPRGPASQFYITPSTSLSPRQSGPQWKGPKPAFGQQHQQQPKSQAEPLSGNKEPLADTSSNQQKNFKMQSAAFSIAADVKDVKAAQSNENLSDSQQEPPKSEVSEGPVEPSNWDQNVQSMETQIDKAQAVTQPVPLANKPVPAQSTFPSKTGGMEGGTAVATSSLTADNDFKPVGIGLPHSENNQDKGLPRPDNRDNRLEGNRGNSSSYRGPGQSRMEDTRDKGLVNRGRGQAISRGPGLVKQEDFRDKMMGRREDSREKMNRGEGSRDRGLVRPGSSREKVPGGLQGSQDRGAAGSRERGPPRRAGSQERGPLRRAGSRERIPPRRAGSRERGPPRGPGSRERGLGRSDFGRDRGPFRPEPGDGGEKMYPYHRDEPPRAPWNHGEERGHEEFPLDGRNAPMERERLDDWDRERYWRECERDYQDDTLELYNREDRFSAPPSRSHDGDRRGPWWDDWERDQDMDEDYNREMERDMDRDVDRISRPMDMYDRSLDNEWDRDYGRPLDEQESQFRERDIPSLPPLPPLPPLPPLDRYRDDRWREERNREHGYDRDFRDRGELRIREYPERGDTWREKRDYVPDRMDWERERLSDRWYPSDVDRHSPMAEHMPSSHHSSEMMGSDASLDSDQGLGGVMVLSQRQHEIILKAAQELKMLREQKEQLQKMKDFGSEPQMADHLPPQESRLQNTSSRPGMYPPPGSYRPPPPMGKPPGSIVRPSAPPARSSVPVTRPPVPIPPPPPPPPLPPPPPVIKPQTSAVEQERWDEDSFYGLWDTNDEQGLNSEFKSETAAIPSAPVLPPPPVHSSIPPPGPVPMGMPPMSKPPPVQQTVDYGHGRDISTNKVEQIPYGERITLRPDPLPERSTFETEHAGQRDRYDRERDREPYFDRQSNVIADHRDFKRDRETHRDRDRDRGVIDYDRDRFDRERRPRDDRAQSYRDKKDHSSSRRGGFDRPSYDRKSDRPVYEGPSMFGGERRTYPEERMPLPAPSLSHQPPPAPRVEKKPESKNVDDILKPPGRESRPERIVVIMRGLPGSGKTHVAKLIRDKEVEFGGPAPRVLSLDDYFITEVEKEEKDPDSGKKVKKKVMEYEYEAEMEETYRTSMFKTFKKTLDDGFFPFIILDAINDRVRHFDQFWSAAKTKGFEVYLAEMSADNQTCGKRNIHGRKLKEINKMADHWETAPRHMMRLDIRSLLQDAAIEEVEMEDFDANIEEQKEEKKDAEEEESELGYIPKSKWEMDTSEAKLDKLDGLRTGTKRKRDWEAIASRMEDYLQLPDDYDTRASEPGKKRVRWADLEEKKDADRKRAIGFVVGQTDWEKITDESGHLAEKALNRTKYI

SEQ ID NO: 5554 - protein, 415 aa, Homo sapiens [sequence omitted]

SEQ ID NO: 5555 - protein, 453 aa, Homo sapiens
MWSPEREAEAPAGGDPAGLLPPEWEEDEERMSFLFSAFKRSREVNSTDWDSKMGFWAPLVLSHSRRQGVVRLRLRDLQEAFQRKGSVPLGLATVLQDLLRRGELQRESDFMASVDSSWISWGVGVFLLKPLKWTLSNMLGDNKVPAEEVLVAVELLKEKAEEVYRLYQNSPLSSHPVVALSELSTLCANSCPDERTFYLVLLQLQKEKRVTVLEQNGEKIVKFARGPRAKVSPVNDVDVGVYQLMQSEQLLSRKVESLSQEAERCKEEARRACRAGKKQLALRSLKAKQRTEKRIEALHAKLDTVQGILDRIYASQTDQMVFNAYQAGVGALKLSMKDVTVEKAESLVDQIQELCDTQDEVSQTLAGGVTNGLDFDSEELEKELDILLQDTTKEPLDLPDNPRNRHFTNSVPNPRISDAELEAELEKLSLSEGGLVPSSKSPKRQLEPTLKPL

SEQ ID NO: 5556 - protein, 1006 aa, Homo sapiens
MAEQESLEFGKADFVLMDTVSMPEFMANLRLRFEKGRIYTFIGEVVVSVNPYKLLNIYGRDTIEQYKGRELYERPPHLFAIADAAYKAMKRRSKDTCIVISGESGAGKTEASKYIMQYIAAITNPSQRAEVERVKNMLLKSNCVLEAFGNAKTNRNDNSSRFGKYMDINFDFKGDPIGGHINNYLLEKSRVIVQQPGERSFHSFYQLLQGGSEQMLRSLHLQKSLSSYNYIHVGAQLKSSINDAAEFRVVADAMKVIGFKPEEIQTVYKILAAILHLGNLKFVVDGDTPLIENGKVVSIIAELLSTKTDMVEKALLYRTVATGRDIIDKQHTEQEASYGRDAFAKAIYERLFCWIVTRINDIIEVKNYDTTIHGKNTVIGVLDIYGFEIFDNNSFEQFCINYCNEKLQQLFIQLVLKQEQEEYQREGIPWKHIDYFNNQIIVDLVEQQHKGIIAILDDACMNVGKVTDEMFLEALNSKLGKHAHFSSRKLCASDKILEFDRDFRIRHYAGDVVYSVIGFIDKNKDTLFQDFKRLMYNSSNPVLKNMWPEGKLSITEVTKRPLTAATLFKNSMIALVDNLASKEPYYVRCIKPNDKKSPQIFDDERCRHQVEYLGLLENVRVRRAGFAFRQTYEKFLHRYKMISEFTWPNHDLPSDKEAVKKLIERCGFQDDVAYGKTKIFIRTPRTLFTLEELRAQMLIRIVLFLQKVWRGTLARMRYKRTKAALTIIRYYRRYKVKSYIHEVARRFHGVKTMRDYGKHVKWPSPPKVLRRFEEALQTIFNRWRASQLIKSIPASDLPQVRAKVAAVEMLKGQRADLGLQRAWEGNYLASKPDTPQTSGTFVPVANELKRKDKYMNVLFSCHVRKVNRFSKVEDRAIFVTDRHLYKMDPTKQYKVMKTIPLYNLTGLSVSNGKDQLVVFHTKDNKDLIVCLFSKQPTHESRIGELVGVLVNHFKSEKRHLQVNVTNPVQCSLHGKKCTVSVETRLNQPQPDFTKNRSGFILSVPGN

SEQ ID NO: 5557 - protein, 3333 aa, Homo sapiens
MAAAARPRGRALGPVLPPTPLLLLVLRVLPACGATARDPGAAAGLSLHPTYFNLAEAARIWATATCGERGPGEGRPQPELYCKLVGGPTAPGSGHTIQGQFCDYCNSEDPRKAHPVTNAIDGSERWWQSPPLSSGTQYNRVNLTLDLGQLFHVAYILIKFANSPRPDLWVLERSVDFGSTYSPWQYFAHSKVDCLKEFGREANMAVTRDDDVLCVTEYSRIVPLENGEVVVSLINGRPGAKNFTFSHTLREFTKATNIRLRFLRTNTLLGHLISKAQRDPTVTRRYYYSIKDISIGGQCVCNGHAEVCNINNPEKLFRCECQHHTCGETCDRCCTGYNQRRWRPAAWEQSHECEACNCHGHASNCYYDPDVERQQASLNTQGIYAGGGVCINCQHNTAGVNCEQCAKGYYRPYGVPVDAPDGCIPCSCDPEHADGCEQGSGRCHCKPNFHGDNCEKCAIGYYNFPFCLRIPIFPVSTPSSEDPVAGDIKGCDCNLEGVLPEICDAHGRCLCRPGVEGPRCDTCRSGFYSFPICQACWCSALGSYQMPCSSVTGQCECRPGVTGQRCDRCLSGAYDFPHCQGSSSACDPAGTINSNLGYCQCKLHVEGPTCSRCKLLYWNLDKENPSGCSECKCHKAGTVSGTGECRQGDGDCHCKSHVGGDSCDTCEDGYFALEKSNYFGCQGCQCDIGGALSSMCSGPSGVCQCREHVVGKVCQRPENNYYFPDLHHMKYEIEDGSTPNGRDLRFGFDPLAFPEFSWRGYAQMTSVQNDVRITLNVGKSSGSLFRVILRYVNPGTEAVSGHITIYPSWGAAQSKEIIFLPSKEPAFVTVPGNGFADPFSITPGIWVACIKAEGVLLDYLVLLPRDYYEASVLQLPVTEPCAYAGPPQENCLLYQHLPVTRFPCTLACEARHFLLDGEPRPVAVRQPTPAHPVMVDLSGREVELHLRLRIPQVGHYVVVVEYSTEAAQLFVVDVNVKSSGSVLAGQVNIYSCNYSVLCRSAVIDHMSRIAMYELLADADIQLKGHMARFLLHQVCIIPIEEFSAEYVRPQVHCIASYGRFVNQSATCVSLAHETPPTALILDVLSGRPFPHLPQQSSPSVDVLPGVTLKAPQNQVTLRGRVPHLGRYVFVIHFYQAAHPTFPAQVSVDGGWPRAGSFHASFCPHVLGCRDQVIAEGQIEFDISEPEVAATVKVPEGKSLVLVRVLVVPAENYDYQILHKKSMDKSLEFITNCGKNSFYLDPQTASRFCKNSARSLVAFYHKGALPCECHPTGATGPHCSPEGGQCPCQPNVIGRQCTRCATGHYGFPRCKPCSCGRRLCEEMTGQCRCPPRTVRPQCEVCETHSFSFHPMAGCEGCNCSRRGTIEAAMPECDRDSGQCRCKPRITGRQCDRCASGFYRFPECVPCNCNRDGTEPGVCDPGTGACLCKENVEGTECNVCREGSFHLDPANLKGCTSCFCFGVNNQCHSSHKRRTKFVDMLGWHLETADRVDIPVSFNPGSNSMVADLQELPATIHSASWVAPTSYLGDKVSSYGGYLTYQAKSFGLPGDMVLLEKKPDVQLTGQHMSIIYEETNTPRPDRLHHGRVHVVEGNFRHASSRAPVSREELMTVLSRLADVRIQGLYFTETQRLTLSEVGLEEASDTGSGRIALAVEICACPPAYAGDSCQGCSPGYYRDHKGLYTGRCVPCNCNGHSNQCQDGSGICVNCQHNTAGEHCERCQEGYYGNAVHGSCRACPCPHTNSFATGCVVNGGDVRCSCKAGYTGTQCERCAPGYFGNPQKFGGSCQPCSCNSNGQLGSCHPLTGDCINQEPKDSSPAEECDDCDSCVMTLLNDLATMGEQLRLVKSQLQGLSASAGLLEQMRHMETQAKDLRNQLLNYRSAISNHGSKIEGLERELTDLNQEFETLQEKAQVNSRKAQTLNNNVNRATQSAKELDVKIKNVIRNVHILLKQISGTDGEGNNVPSGDFSREWAEAQRMMRELRNRNFGKHLREAEADKRESQLLLNRIRTWQKTHQGENNGLANSIRDSLNEYEAKLSDLRARLQEAAAQAKQANGLNQENERALGAIQRQVKEINSLQSDFTKYLTTADSSLLQTNIALQLMEKSQKEYEKLAASLNEARQELSDKVRELSRSAGKTSLVEEAEKHARSLQELAKQLEEIKRNASGDELVRCAVDAATAYENILNAIKAAEDAANRAASASESALQTVIKEDLPRKAKTLSSNSDKLLNEAKMTQKKLKQEVSPALNNLQQTLNIVTVQKEVIDTNLTTLRDGLHGIQRGDIDAMISSAKSMVRKANDITDEVLDGLNPIQTDVERIKDTYGRTQNEDFKKALTDADNSVNKLTNKLPDLWRKIESINQQLLPLGNISDNMDRIRELIQQARDAASKVAVPMRFNGKSGVEVRLPNDLEDLKGYTSLSLFLQRPNSRENGGTENMFVMYLGNKDASRDYIGMAVVDGQLTCVYNLGDREAELQVDQILTKSETKEAVMDRVKFQRIYQFARLNYTKGATSSKPETPGVYDMDGRNSNTLLNLDPENVVFYVGGYPPDFKLPSRLSFPPYKGCIELDDLNENVLSLYNFKKTFNLNTTEVEPCRRRKEESDKNYFEGTGYARVPTQPHAPIPTFGQTIQTTVDRGLLFFAENGDRFISLNIEDGKLMVRYKLNSELPKERGVGDAINNGRDHSIQIKIGKLQKRMWINVDVQNTIIDGEVFDFSTYYLGGIPIAIRERFNISTPAFRGCMKNLKKTSGVVRLNDTVGVTKKCSEDWKLVRSASFSRGGQLSFTDLGLPPTDHLQASFGFQTFQPSGILLDHQTWTRNLQVTLEDGYIELSTSDSGGPIFKSPQTYMDGLLHYVSVISDNSGLRLLIDDQLLRNSKRLKHISSSRQSLRLGGSNFEGCISNVFVQRLSLSPEVLDLTSNSLKRDVSLGGCSLNKPPFLMLLKGSTRFNKTKTFRINQLLQDTPVASPRSVKVWQDACSPLPKTQANHGALQFGDIPTSHLLFKLPQELLKPRSQFAVDMQTTSSRGLVFHTGTKNSFMALYLSKGRLVFALGTDGKKLRIKSKEKCNDGKWHTVVFGHDGEKGRLVVDGLRAREGSLPGNSTISIRAPVYLGSPPSGKPKSLPTNSFVGCLKNFQLDSKPLYTPSSSFGVSSCLGGPLEKGIYFSEEGGHVVLAHSVLLGPEFKLVFSIRPRSLTGILIHIGSQPGKHLCVYLEAGKVTASMDSGAGGTSTSVTPKQSLCDGQWHSVAVTIKQHILHLELDTDSSYTAGQIPFPPASTQEPLHLGGAPANLTTLRIPVWKSFFGCLRNIHVNHIPVPVTEALEVQGPVSLNGCPDQ

SEQ ID NO: 5558 - protein, 1050 aa, Homo sapiens
MEPGRGGTETVGKFEFSRKDLIGHGAFAVVFKGRHREKHDLEVAVKCINKKNLAKSQTLLGKEIKILKELKHENIVALYDFQEMANSVYLVMEYCNGGDLADYLHAMRTLSEDTIRLFLQQIAGAMRLLHSKGIIHRDLKPQNILLSNPAGRRANPNSIRVKIADFGFARYLQSNMMAATLCGSPMYMAPEVIMSQHYDGKADLWSIGTIVYQCLTGKAPFQASSPQDLRLFYEKNKTLVPTIPRETSAPLRQLLLALLQRNHKDRMDFDEFFHHPFLDASPSVRKSPPVPVPSYPSSGSGSSSSSSSTSHLASPPSLGEMQQLQKTLASPADTAGFLHSSRDSGGSKDSSCDTDDFVMVPAQFPGDLVAEAPSAKPPPDSLMCSGSSLVASAGLESHGRTPSPSPPCSSSPSPSGRAGPFSSSRCGASVPIPVPTQVQNYQRIERNLQSPTQFQTPRSSAIRRSGSTSPLGFARASPSPPAHAEHGGVLARKMSLGGGRPYTPSPQVGTIPERPGWSGTPSPQGAEMRGGRSPRPGSSAPEHSPRTSGLGCRLHSAPNLSDLHVVRPKLPKPPTDPLGAVFSPPQASPPQPSHGLQSCRNLRGSPKLPDFLQRNPLPPILGSPTKAVPSFDFPKTPSSQNLLALLARQGVVMTPPRNRTLPDLSEVGPFHGQPLGPGLRPGEDPKGPFGRSFSTSRLTDLLLKAAFGTQAPDPGSTESLQEKPMEIAPSAGFGGSLHPGARAGGTSSPSPVVFTVGSPPSGSTPPQGPRTRMFSAGPTGSASSSARHLVPGPCSEAPAPELPAPGHGCSFADPITANLEGAVTFEAPDLPEETLMEQEHTEILRGLRFTLLFVQHVLEIAALKGSASEAAGGPEYQLQESVVADQISLLSREWGFAEQLVLYLKVAELLSSGLQSAIDQIRAGKLCLSSTVKQVVRRLNELYKASVVSCQGLSLRLQRFFLDKQRLLDRIHSITAERLIFSHAVQMVQSAALDEMFQHREGCVPRYHKALLLLEGLQHMLSDQADIENVTKCKLCIERRLSALLTGICA

SEQ ID NO: 5559 - protein, 1269 aa, Homo sapiens
MEATGVLPFVRGVDLSGNDFKGGYFPENVKAMTSLRWLKLNRTGLCYLPEELAALQKLEHLSVSHNNLTTLHGELSSLPSLRAIVARANSLKNSGVPDDIFKLDDLSVLDLSHNQLTECPRELENAKNMLVLNLSHNSIDTIPNQLFINLTDLLYLDLSENRLESLPPQMRRLVHLQTLVLNGNPLLHAQLRQLPAMTALQTLHLRSTQRTQSNLPTSLEGLSNLADVDLSCNDLTRVPECLYTLPSLRRLNLSSNQITELSLCIDQWVHVETLNLSRNQLTSLPSAICKLSKLKKLYLNSNKLDFDGLPSGIGKLTNLEEFMAANNNLELVPESLCRCPKLRKLVLNKNHLVTLPEAIHFLTEIEVLDVRENPNLVMPPKPADRAAEWYNIDFSLQNQLRLAGASPATVAAAAAAGSGPKDPMARKMRLRRRKDSAQDDQAKQVLKGMSDVAQEKNKKQEESADARAPSGKVRRWDQGLEKPRLDYSEFFTEDVGQLPGLTIWQIENFVPVLVEEAFHGKFYEADCYIVLKTFLDDSGSLNWEIYYWIGGEATLDKKACSAIHAVNLRNYLGAECRTVREEMGDESEEFLQVFDNDISYIEGGTASGFYTVEDTHYVTRMYRVYGKKNIKLEPVPLKGTSLDPRFVFLLDRGLDIYVWRGAQATLSSTTKARLFAEKINKNERKGKAEITLLVQGQELPEFWEALGGEPSEIKKHVPEDFWPPQPKLYKVGLGLGYLELPQINYKLSVEHKQRPKVELMPRMRLLQSLLDTRCVYILDCWSDVFIWLGRKSPRLVRAAALKLGQELCGMLHRPRHATVSRSLEGTEAQVFKAKFKNWDDVLTVDYTRNAEAVLQSPGLSGKVKRDAEKKDQMKADLTALFLPRQPPMSLAEAEQLMEEWNEDLDGMEGFVLEGKKFARLPEEEFGHFYTQDCYVFLCRYWVPVEYEEEEKKEDKEEKAEGKEGEEATAEAEEKQPEEDFQCIVYFWQGREASNMGWLTFTFSLQKKFESLFPGKLEVVRMTQQQENPKFLSHFKRKFIIHRGKRKAVQGAQQPSLYQIRTNGSALCTRCIQINTDSSLLNSEFCFILKVPFESEDNQGIVYAWVGRASDPDEAKLAEDILNTMFDTSYSKQVINEGEEPENFFWVGIGAQKPYDDDAEYMKHTRLFRCSNEKGYFAVTEKCSDFCQDDLADDDIMLLDNGQEVYMWVGTQTSQVEIKLSLKACQVYIQHMRSKEHERPRRLRLVRKGNEQHAFTRCFHAWSAFCKALA

SEQ ID NO: 5560 - protein, 441 aa, Homo sapiens
MKAAVDLKPTLTIIKTEKVDLELFPSPDMECADVPLLTPSSKEMMSQALKATFSGFTKEQQRLGIPKDPRQWTETHVRDWVMWAVNEFSLKGVDFQKFCMNGAALCALGKDCFLELAPDFVGDILWEHLEILQKEDVKPYQVNGVNPAYPESRYTSDYFISYGIEHAQCVPPSEFSEPSFITESYQTLHPISSEELLSLKYENDYPSVILRDPLQTDTLQNDYFAIKQEVVTPDNMCMGRTSRGKLGGQDSFESIESYDSCDRLTQSWSSQSSFNSLQRVPSYDSFDSEDYPAALPNHKPKGTFKDYVRDRADLNKDKPVIPAAALAGYTGSGPIQLWQFLLELLTDKSCQSFISWTGDGWEFKLSDPDEVARRWGKRKNKPKMNYEKLSRGLRYYYDKNIIHKTAGKRYVYRFVCDLQSLLGYTPEELHAMLDVKPDADE

SEQ ID NO: 5561 - protein, 312 aa, Homo sapiens
MAAQKINEGLEHLAKAEKYLKTGFLKWKPDYDSAASEYGKAAVAFKNAKQFEQAKDACLREAVAHENNRALFHAAKAYEQAGMMLKEMQKLPEAVQLIEKASMMYLENGTPDTAAMALERAGKLIENVDPEKAVQLYQQTANVFENEERLRQAVELLGKASRLLVRGRRFDEAALSIQKEKNIYKEIENYPTCYKKTIAQVLVHLHRNDYVAAERCVRESYSIPGFNGSEDCAALEQLLEGYDQQDQDQVSDVCNSPLFKYMDNDYAKLGLSLVVPGGGIKKKSPATPQAKPDGVTATAADEEEDEYSGGLC

SEQ ID NO: 5562 - protein, 67 aa, Homo sapiens; identical to SEQ ID NO: 5350

SEQ ID NO: 5563 - protein, 474 aa, Homo sapiens
MISFCPDCGKSIQAAFKFCPYCGNSLPVEEHVGSQTFVNPHVSSFQGSKRGLNSSFETSPKKVKWSSTVTSPRLSLFSDGDSSESEDTLSSSERSKGSGSRPPTPKSSPQKTRKSPQVTRGSPQKTSCSPQKTRQSPQTLKRSRVTTSLEALPTGTVLTDKSGRQWKLKSFQTRDNQGILYEAAPTSTLTCDSGPQKQKFSLKLDAKDGRLFNEQNFFQRAAKPLQVNKWKKLYSTPLLAIPTCMGFGVHQDKYRFLVLPSLGRSLQSALDVSPKHVLSERSVLQVACRLLDALEFLHENEYVHGNVTAENIFVDPEDQSQVTLAGYGFAFRYCPSGKHVAYVEGSRSPHEGDLEFISMDLHKGCGPSRRSDLQSLGYCMLKWLYGFLPWTNCLPNTEDIMKQKQKFVDKPGPFVGPCGHWIRPSETLQKYLKVVMALTYEEKPPYAMLRNNLEALLQDLRVSPYDPIGLPMVP

SEQ ID NO: 5564 - protein, 491 aa, Homo sapiens
MELSVLLFLALLTGLLLLLVQRHPNTHDRLPPGPRPLPLLGNLLQMDRRGLLKSFLRFREKYGDVFTVHLGPRPVVMLCGVEAIREALVDKAEAFSGRGKIAMVDPFFRGYGVIFANGNRWKVLRRFSVTTMRDFGMGKRSVEERIQEEAQCLIEELRKSKGALMDPTFLFQSITANIICSIVFGKRFHYQDQEFLKMLNLFYQTFSLISSVFGQLFELFSGFLKYFPGAHRQVYKNLQEINAYIGHSVEKHRETLDPSAPKDLIDTYLLHMEKEKSNAHSEFSHQNLNLNTLSLFFAGTETTSTTLRYGFLLMLKYPHVAERVYREIEQVIGPHRPPELHDRAKMPYTEAVIYEIQRFSDLLPMGVPHIVTQHTSFRGYIIPKDTEVFLILSTALHDPHYFEKPDAFNPDHFLDANGALKKTEAFIPFSLGKRICLGEGIARAELFLFFTTILQNFSMASPVAPEDIDLTPQECGVGKIPPTYQIRFLPR

SEQ ID NO: 5565 - protein, 575 aa, Homo sapiens
MKRSLQALYCQLLSFLLILALTEALAFAIQEPSPRESLQVLPSGTPPGTMVTAPHSSTRHTSVVMLTPNPDGPPSQAAAPMATPTPRAEGHPPTHTISTIAATVTAPHSESSLSTGPAPAAMATTSSKPEGRPRGQAAPTILLTKPPGATSRPTTAPPRTTTRRPPRPPGSSRKGAGNSSRPVPPAPGGHSRSKEGQRGRNPSSTPLGQKRPLGKIFQIYKGNFTGSVEPEPSTLTPRTPLWGYSSSPQPQTVAATTVPSNTSWAPTTTSLGPAKDKPGLRRAAQGGGSTFTSQGGTPDATAASGAPVSPQAAPVPSQRPHHGDPQDGPSHSDSWLTVTPGTSRPLSTSSGVFTAATGPTPAAFDTSVSAPSQGIPQGASTTPQAPTHPSRVSESTISGAKEETVATLTMTDRVPSPLSTVVSTATGNFLNRLVPAGTWKPGTAGNISHVAEGDKPQHRATICLSKMDIAWVILAISVPISSCSVLLTVCCMKRKKKTANPENNLSYWNNTITMDYFNRHAVELPREIQSLETSEDQLSEPRSPANGDYRDTGMVLVNPFCQETLFVGNDQVSEI

SEQ ID NO: 5566 - protein, 402 aa, Homo sapiens
MASLGLLLLLLLTALPPLWSSSLPGLDTAESKATIADLILSALERATVFLEQRLPEINLDGMVGVRVLEEQLKSVREKWAQEPLLQPLSLRVGMLGEKLEAAIQRSLHYLKLSDPKYLREFQLTLQPGFWKLPHAWIHTDASLVYPTFGPQDSFSEERSDVCLVQLLGTGTDSSEPCGLSDLCRSLMTKPGCSGYCLSHQLLFFLWARMRGCTQGPLQQSQDYINLFCANMMDLNRRAEAIGYAYPTRDIFMENIMFCGMGGFSDFYKLRWLEAILSWQKQQEGCFGEPDAEDEELSKAIQYQQHFSRRVKRREKQFPDSRSVAQAGVQWRNLGSLQPLPPGFKQFSCLILPSSWDYRSVPPYLANFYIFLVETGFHHVAHAGLELLISRDPPTSGSQSVGL

SEQ ID NO: 5567 - protein, 383 aa, Homo sapiens
MLSRKKTKNEVSKPAEVQGKYVKKETSPLLRNLMPSFIRHGPTIPRRTDICLPDSSPNAFSTSGDVVSRNQSFLRTPIQRTPHEIMRRESNRLSAPSYLARSLADVPREYGSSQSFVTEVSFAVENGDSGSRYYYSDNFFDGQRKRPLGDRAHEDYRYYEYNHDLFQRMPQNQGRHASGIGRVAATSLGNLTNHGSEDLPLPPGWSVDWTMRGRKYYIDHNTNTTHWSHPLEREGLPPGWERVESSEFGTYYVDHTNKKAQYRHPCAPSVPRYDQPPPVTYQPQQTERNQSLLVPANPYHTAEIPDWLQVYARAPVKYDHILKWELFQLADLDTYQGMLKLLFMKELEQIVKMYEAYRQALLTELENRKQRQQWYAQQHGKNF

SEQ ID NO: 5568 - protein, 543 aa, Homo sapiens
MGCIKSKENKSPAIKYRPENTPEPVSTSVSHYGAEPTTVSPCPSSSAKGTAVNFSSLSMTPFGGSSGVTPFGGASSSFSVVPSSYPAGLTGGVTIFVALYDYEARTTEDLSFKKGERFQIINNTEGDWWEARSIATGKNGYIPSNYVAPADSIQAEEWYFGKMGRKDAERLLLNPGNQRGIFLVRESETTKGAYSLSIRDWDEIRGDNVKHYKIRKLDNGGYYITTRAQFDTLQKLVKHYTEHADGLCHKLTTVCPTVKPQTQGLAKDAWEIPRESLRLEVKLGQGCFGEVWMGTWNGTTKVAIKTLKPGTMMPEAFLQEAQIMKKLRHDKLVPLYAVVSEEPIYIVTEFMSKGSLLDFLKEGDGKYLKLPQLVDMAAQIADGMAYIERMNYIHRDLRAANILVGENLVCKIADFGLARLIEDNEYTARQGAKFPIKWTAPEAALYGRFTIKSDVWSFGILQTELVTKGRVPYPGMVNREVLEQVERGYRMPCPQGCPESLHELMNLCWKKDPDERPTFEYIQSFLEDYFTATEPQYQPGENL

SEQ ID NO: 5569 - protein, 580 aa, Homo sapiens
MESQCDYSMYFPAVPLPPRAELAGDPGRYRALPRRNHLYLGETVRFLLVLRCRGGAGSGTGGGPGLGSRGAWAELATALAALASVSAGGGMPGGGGAGDQDSEPPGGGDPGGGGLFRGCSPLLTHGPGPATSGGATTLPVEEPIVSTDEVIFPLTVSLDRLPPGTPKAKIVVTVWKREIEAPEVRDQGYLRLLQTRSPGETFRGEQSAFKAQVSTLLTLLPPPVLRCRQFTVAGKHLTVLKVLNSSSQEEISIWDIRILPNFNASYLPVMPDGSVLLVDNVCHQSGEVSMGSFCRLPGTSGCFPCPLNALEEHNFLFQLRGGEQPPPGAKEGLEVPLIAVVQWSTPKLPFTQSIYTHYRLPSVRLDRPCFVMTASCKSPVRTYERFTVTYTLLNNLQDFLAVRLVWTPEHAQAGKQLCEEERRAMQAALDSVVCHTPLNNLGFSRKGSALTFSVAFQALRTGLFELSQHMKLKLQFTASVSHPPPEARPLSRKSSPSSPAVRDLVERHQASLGRSQSFSHQQPSRSHLMRSGSVMERRAITPPVASPVGRPLYLPPDKAVLSLDKIAKRECKVLVVEPVK

SEQ ID NO: 5570 - protein, 150 aa, Homo sapiens
MNLWLLACLVAGFLGAWAPAVHTQGVFEDCCLAYHYPIGWAVLRRAWTYRIQEVSGSCNLPAAIFYLPKRHRKVCGNPKSREVQRAMKLLDARNKVFAKLHHNTQTFQAGPHAVKKLSSGNSKLSSSKFSNPISSSKRNVSLLISANSGK

SEQ ID NO: 5571 - protein, 548 aa, Homo sapiens
MPALRPLLPLLLLLRLTSGAGLLPGLGSHPGVCPNQLSPNLWVDAQSTCERECSRDQDCAAAEKCCINVCGLHSCVAARFPGSPAAPTTAASCEGFVCPQQGSDCDIWDGQPVCRCRDRCEKEPSFTCASDGLTYYNRCYMDAEACLRGLHLHIVPCKHVLSWPPSSPGPPETTARPTPGAAPVPPALYSSPSPQAVQVGGTASLHCDVSGRPPPAVTWEKQSHQRENLIMRPDQMYGNVVVTSIGQLVLYNARPEDAGLYTCTARNAAGLLRADFPLSVVQREPARDAAPSIPAPAECLPDVQACTGPTSPHLVLWHYDPQRGGCMTFPARGCDGAARGFETYEACQQACARGPGDACVLPAVQGPCRGWEPRWAYSPLLQQCHPFVYGGCEGNGNNFHSRESCEDACPVPRTPPCRACRLRSKLALSLCRSDFAIVGRLTEVLEEPEAAGGIARVALEDVLKDDKMGLKFLGTKYLEVTLSGMDWACPCPNMTAGDGPLVIMGEVRDGVAVLDAGSYVRAASEKRVKKILELLEKQACELLNRFQD

SEQ ID NO: 5572 - protein, 419 aa, Homo sapiens
MAEPVGKRGRWSGGSGAGRGGRGGWGGRGRRPRAQRSPSRGTLDVVSVDLVTDSDEEILEVATARGAADEVEVEPPEPPGPVASRDNSNSDSEGEDRRPAGPPREPVRRRRRLVLDPGEAPLVPVYSGKVKSSLRLIPDDLSLLKLYPPGDEEEAELADSSGLYHEGSPSPGSPWKTKLRTKDKEEKKKTEFLDLDNSPLSPPSPRTKSRTHTRALKKLSEVNKRLQDLRSCLSPKPPQGQEQQGQEDEVVLVEGPTLPETPRLFPLKIRCRADLVRLPLRMSEPLQSVVDHMATHLGVSPSRILLLFGETELSPTATPRTLKLGVADIIDCVVLTSSPEATETSQQLQLRVQGKEKHQTLEVSLSRDSPLKTLMSHYEEAMGLSGRKLSFFFDGTKLSGRELPADLGMESGDLIEVWG

SEQ ID NO: 5573 - protein, 589 aa, Homo sapiens
MAAADGDDSLYPIAVLIDELRNEDVQLRLNSIKKLSTIALALGVERTRSELLPFLTDTIYDEDEVLLALAEQLGTFTTLVGGPEYVHCLLPPLESLATVEETVVRDKAVESLRAISHEHSPSDLEAHFVPLVKRLAGGDWFTSRTSACGLFSVCYPRVSSAVKAELRQYFRNLCSDDTPMVRRAAASKLGEFAKVLELDNVKSEIIPMFSNLASDEQDSVRLLAVEACVNIAQLLPQEDLEALVMPTLRQAAEDKSWRVRYMVADKFTELQKAVGPEITKTDLVPAFQNLMKDCEAEVRAAASHKVKEFCENLSADCRENVIMSQILPCIKELVSDANQHVKSALASVIMGLSPILGKDNTIEHLLPLFLAQLKDECPEVRLNIISNLDCVNEVIGIRQLSQSLLPAIVELAEDAKWRVRLAIIEYMPLLAGQLGVEFFDEKLNSLCMAWLVDHVYAIREAATSNLKKLVEKFGKEWAHATIIPKVLAMSGDPNYLHRMTTLFCINVLSEVCGQDITTKHMLPTVLRMAGDPVANVRFNVAKSLQKIGPILDNSTLQSEVKPILEKLTQDQDVDVKYFAQEALTVLSLA

SEQ ID NO: 5574 - protein, 273 aa, Homo sapiens
MDPVPGTDSAPLAGLAWSSASAPPPRGFSAISCTVEGAPASFGKSFAQKSGYFLCLSSLGSLENPQENVVADIQIVVDKSPLPLGFSPVCDPMDSKASVSKKKRMCVKLLPLGATDTAVFDVRLSGKTKTVPGYLRIGDMGGFAIWCKKAKAPRPVPKPRGLSRDMQGLSLDAASQPSKGGLLERTASRLGSRASTLRRNDSIYEASSLYGISAMDGVPFTLHPRFEGKSCSPLAFSAFGDLTIKSLADIEEEYNYGFVVEKTAAARLPPSVS

SEQ ID NO: 5575 - protein, 695 aa, Homo sapiens
MAAATIVHDTSEAVELCPAYGLYLKPITKMTISVALPQLKQPGKSISNWEVMERLKGMVQNHQFSTLRISKSTMDFIRFEGEVENKSLVKSFLACLDGKTIKLSGFSDILKVRAAEFKIDFPTRHDWDSFFRDAKDMNETLPGERPDTIHLEGLPCKWFALKESGSEKPSEDVLVKVFEKFGEIRNVDIPMLDPYREEMTGRNFHTFSFGGHLNFEAYVQYREYMGFIQAMSALRGMKLMYKGEDGKAVACNIKVSFDSTKHLSDASIKKRQLERQKLQELEQQREEQKRREKEAEERQRAEERKQKELEELERERKREEKLRKREQKQRDRELRRNQKKLEKLQAEEQKQLQEKIKLEERKLLLAQRNLQSIRLIAELLSRAKAVKLREQEQKEEKLRLQQQEERRRLQEAELRRVEEEKERALGLQRKERELRERLLSILLSKKPDDSHTHDELGVAHADLLQPVLDILQTVSSGCVSATTLHPLGGQPPAGAPKESPAHPEADGAPKSVNGSVAEEAPCKEVQSSCRVVPEDGSPEKRCPGGVLSCIPDNNQQPKGIPACEQNVSRKDTRSEQDKCNREPSKGRGRATGDGLADRHKRERSRARRASSREDGRPRKERRPHKKHAYKDDSPRRRSTSPDHTRSRRSHSKDRHRRERSRERRGSASRKHSRHRRRSERSRSRSPSRHRSTWNR

SEQ ID NO: 5576 - protein, 672 aa, Homo sapiens
MSKEERPGREEILECQVMWEPDSKKNTQMDRFRAAVGAACGLALESYDDLYHWSVESYSDFWAEFWKFSGIVFSRVYDEVVDTSKGIADVPEWFKGSRLNYAENLLRHKENDRVALYIAREGKEEIVKVTFEELRQEVALFAAAMRKMGVKKGDRVVGYLPNSEHAVEAMLAAASIGAIWSSTSPDFGVNGVLDRFSQIQPKLIFSVEAVVYNGKEHNHMEKLQQVVKGLPDLKKVVVIPYVSSRENIDLSKIPNSVFLDDFLATGTSEQAPQLEFEQLPFSHPLFIMFSSGTTGAPKCMVHSAGGTLIQHLKEHLLHGNMTSSDILLCYTTVGWMMWNWMVSLLATGAAMVLYDGSPLVPTPNVLWDLVDRIGITVLVTGAKWLSVLEEKAMKPVETHSLQMLHTILSTGSPLKAQSYEYVYRCIKSSILLGSISGGTDIISCFMGHNFSLPVYKGEIQARNLGMAVEAWNEEGKAVWGESGELVCTKPIPCQPTHFWNDENGNKYRKAYFSKFPGIWAHGDYCRINPKTGGIVMLGRSDGTLNPNGVRFGSSEIYNIVESFEEVEDSLCVPQYNKYREERVILFLKMASGHAFQPDLVKRIRDAIRMGLSARHVPSLILETKGIPYTLNGKKVEVAVKQIIAGKAVEQGGAFSNPETLDLYRDIPELQGF

SEQ ID NO: 5577 - protein, 1073 aa, Homo sapiens
MRVFLLCAYILLLMVSQLRAVSFPEDDEPLNTVDYHYSRQYPVFRGRPSGNESQHRLDFQLMLKIRDTLYIAGRDQVYTVNLNEMPKTEVIPNKKLTWRSRQQDRENCAMKGKHKDECHNFIKVFVPRNDEMVFVCGTNAFNPMCRYYRLSTLEYDGEEISGLARCPFDARQTNVALFADGKLYSATVADFLASDAVIYRSMGDGSALRTIKYDSKWIKEPHFLHAIEYGNYVYFFFREIAVEHNNLGKAVYSRVARICKNDMGGSQRVLEKHWTSFLKARLNCSVPGDSFFYFDVLQSITDIIQINGIPTVVGVFTTQLNSIPGSAVCAFSMDDIEKVFKGRFKEQKTPDSVWTAVPEDKVPKPRPGCCAKHGLAEAYKTSIDFPDETLSFIKSHPLMDSAVPPIADEPWFTKTRVRYRLTAISVDHSAGPYQNYTVIFVGSEAGMVLKVLAKTSPFSLNDSVLLEEIEAYNHAKCSAENEEDKKVISLQLDKDHHALYVAFSSCIIRIPLSRCERYGSCKKSCIASRDPYCGWLSQGSCGRVTPGMLAEGYEQDTEFGNTAHLGDCHEILPTSTTPDYKIFGGPTSDMEVSSSSVTTMASIPEITPKVIDTWRPKLTSSRKFVVQDDPNTSDFTDPLSGIPKGVRWEVQSGESNQMVHMNVLITCVFAAFVLGAFIAGVAVYCYRDMFVRKNRKIHKDAESAQSCTDSSGSFAKLNGLFDSPVKEYQQNIDSPKLYSNLLTSRKELPPNGDTKSMVMDHRGQPPELAALPTPESTPVLHQKTLQAMKSHSEKAHGHGASRKETPQFFPSSPPPHSPLSHGHIPSAIVLPNATHDYNTSFSNSNAHKAEKKLQNIDHPLTKSSSKRDHRRSVDSRNTLNDLLKHLNDPNSNPKAIMGDIQMAHQNLMLDPMGSMSEVPPKVPNREASLYSPPSTLPRNSPTKRVDVPTTPGVPMTSLERQRGYHKNSSQRHSISAMPKNLNSPNGVLLSRQPSMNRGGYMPTPTGAKVDYIQGTPVSVHLQPSLSRQSSYTSNGTLPRTGLKRTPSLKPDVPPKPSFVPQTPSVRPLNKYTY

SEQ ID NO: 5578 - protein, 80 aa, Homo sapiens
MKLSGMFLLLSLALFCFLTGVFSQGGQVDCGEFQDPKVYCTRESNPHCGSDGQTYGNKCAFCKAIVKSGGKISLKHPGKC

SEQ ID NO: 5579 - protein, 220 aa, Homo sapiens
MLRLLLALNLFPSIQVTGNKILVKQSPMLVAYDNAVNLSCKYSYNLFSREFRASLHKGLDSAVEVCVVYGNYSQQLQVYSKTGFNCDGKLGNESVTFYLQNLYVNQTDIYFCKIEVMYPPPYLDNEKSNGTIIHVKGKHLCPSPLFPGPSKPFWVLVVVGGVLACYSLLVTVAFIIFWVRSKRSRLLHSDYMNMTPRRPGPTRKHYQPYAPPRDFAAYRS

SEQ ID NO: 5580 - protein, 158 aa, Homo sapiens [sequence omitted]

SEQ ID NO: 5581 - protein, 287 aa, Homo sapiens
MAAPRQIPSHIVRLKPSCSTDSSFTRTPVPTVSLASRELPVSSWQVTEPSSKNLWEQICKEYEAEQPPFPEGYKVKQEPVITVAPVEEMLFHGFSAEHYFPVSHFTMISRTPCPQDKSETINPKTCSPKEYLETFIFPVLLPGMASLLHQAKKEKCFERKRTKFIACDFLTEWLYNQNPKRAGEPFTEFFSIPFVEERLKQHPRPPIPLSLLLTEEEAALYIQSFWRACVVRCDPEIQELRQWQKKLREAKHIHQQVKIFWAKQEQKVKCKMEDDAVPAAKMKIPSS

SEQ ID NO: 5582 - protein, 495 aa, Homo sapiens
MAAEPQPSSLSYRTTGSTYLHPLSELLGIPLDQVNFVVCQLVALFAAFWFRIYLRPGTTSSDVRHAVATIFGIYFVIFCFGWYSVHLFVLVLMCYAIMVTASVSNIHRYSFFVAMGYLTICHISRIYIFHYGILTTDFSGPLMIVTQKITTLAFQVHDGLGRRAEDLSAEQHRLAIKVKPSFLEYLSYLLNFMSVIAGPCNNFKDYIAFIEGKHIHMKLLEVNWKRKGFHSLPEPSPTGAVIHKLGITLVSLLLFLTLTKTFPVTCLVDDWFVHKASFPARLCYLYVVMQASKPKYYFAWTLADAVNNAAGFGFSGVDKNGNFCWDLLSNLNIWKIETATSFKMYLENWNIQTATWLKCVCYQRVPWYPTVLTFILSALWHGVYPGYYFTFLTGILVTLAARAVRNNYRHYFLSSRALKAVYDAGTWAVTQLAVSYTVAPFVMLAVEPTISLYKSMYFYLHIISLLIILFLPMKPQAHTQRRPQTLNSINKRKTD

SEQ ID NO: 5583 - protein, 874 aa, Homo sapiens
MLKKFDKKDEESGGGSNPFQHLEKSAVLQEARVFNETPINPRKCAHILTKILYLINQGEHLGTTEATEAFFAMTKLFQSNDPTLRRMCYLTIKEMSCIAEDVIIVTSSLTKDMTGKEDNYRGPAVRALCQITDSTMLQAIERYMKQAIVDKVPSVSSSALVSSLHLLKCSFDVVKRWVNEAQEAASSDNIMVQYHALGLLYHVRKNDRLAVNKMISKVTRHGLKSPFAYCMMIRVASKQLEEEDGSRDSPLFDFIESCLRNKHEMVVYEAASAIVNLPGCSAKELAPAVSVLQLFCSSPKAALRYAAVRTLNKVAMKHPSAVTACNLDLENLVTDSNRSIATLAITTLLKTGSESSIDRLMKQISSFMSEISDEFKVVVVQAISALCQKYPRKHAVLMNFLFTMLREEGGFEYKRAIVDCIISIIEENSESKETGLSHLCEFIEDCEFTVLATRILHLLGQEGPKTTNPSKYIRFIYNRVVLEHEEVRAGAVSALAKFGAQNEEMLPSILVLLKRCVMDDDNEVRDRATFYLNVLEQKQKALNAGYILNGLTVSIPGLERALQQYTLEPSEKPFDLKSVPLATAPMAEQRTESTPITAVKQPEKVAATRQEIFQEQLAAVPEFRGLGPLFKSSPEPVALTESETEYVIRCTKHTFTNHMVFQFDCTNTLNDQTLENVTVQMEPTEAYEVLCYVPARSLPYNQPGTCYTLVALPKEDPTAVACTFSCMMKFTVKDCDPTTGETDDEGYEDEYVLEDLEVTVADHIQKVMKLNFEAAWDEVGDEFEKEETFTLSTIKTLEEAVGNIVKFLGMHPCERSDKVPDNKNTHTLLLAGVFRGGHDILVRSRLLLLDTVTMQVTARSLEELPVDIILASVG

SEQ ID NO: 5584 - protein, 1401 aa, Homo sapiens
MAPQMYEFHLPLSPEELLKSGGVNQYVVQEVLSIKHLPPQLRAFQAAFRAQGPLAMLQHFDTIYSILHHFRSIDPGLKEDTLQFLIKVVSRHSQELPAILDDTTLSGSDRNAHLNALKMNCYALIRLLESFETMASQTNLVDLDLGGKGKKARTKAAHGFDWEEERQPILQLLTQLLQLDIRHLWNHSIIEEEFVSLVTGCCYRLLENPTINHQKNRPTREAITHLLGVALTRYNHMLSATVKIIQMLQHFEHLAPVLVAAVSLWATDYGMKSIVGEIVREIGQKCPQELSRDPSGTKGFAAFLTELAERVPAILMSSMCILLDHLDGENYMMRNAVLAAMAEMVLQVLSGDQLEAAARDTRDQFLDTLQAHGHDVNSFVRSRVLQLFTRIVQQKALPLTRFQAVVALAVGRLADKSVLVCKNAIQLLASFLANNPFSCKLSDADLAGPLQKETQKLQEMRAQRRTAAASAVLDPEEEWEAMLPELKSTLQQLLQLPQGEEEIPEQIANTETTEDVKGRIYQLLAKASYKKAIILTREATGHFQESEPFSHIDPEESEETRLLNILGLIFKGPAASTQEKNPRESTGNMVTGQTVCKNKPNMSDPEESRGNDELVKQEMLVQYLQDAYSFSRKITEAIGIISKMMYENTTTVVQEVIEFFVMVFQFGVPQALFGVRRMLPLIWSKEPGVREAVLNAYRQLYLNPKGDSARAKAQALIQNLSLLLVDASVGTIQCLEEILCEFVQKDELKPAVTQLLWERATEKVACCPLERCSSVMLLGMMARGKPEIVGSNLDTLVSIGLDEKFPQDYRLAQQVCHAIANISDRRKPSLGKRHPPFRLPQEHRLFERLRETVTKGFVHPDPLWIPFKEVAVTLIYQLAEGPEVICAQILQGCAKQALEKLEEKRTSQEDPKESPAMLPTFLLMNLLSLAGDVALQQLVHLEQAVSGELCRRRVLREEQEHKTKDPKEKNTSSETTMEEELGLVGATADDTEAELIRGICEMELLDGKQTLAAFVPLLLKVCNNPGLYSNPDLSAAASLALGKFCMISATFCDSQLRLLFTMLEKSPLPIVRSNLMVATGDLAIRFPNLVDPWTPHLYARLRDPAQQVRKTAGLVMTHLILKDMVKVKGQVSEMAVLLIDPEPQIAALAKNFFNELSHKGNAIYNLLPDIISRLSDPELGVEEEPFHTIMKQLLSYITKDKQTESLVEKLCQRFRTSRTERQQRDLAYCVSQLPLTERGLRKMLDNFDCFGDKLSDESIFSAFLSVVGKLRRGAKPEGKAIIDEFEQKLRACHTRGLDGIKELEIGQAGSQRAPSAKKPSTGSRYQPLASTASDNDFVTPEPRRTTRRHPNTQQRASKKKPKVVFSSDESSEEDLSAEMTEDETPKKTTPILRASARRHRS

SEQ ID NO: 5585 - protein, 393 aa, Homo sapiens
MRTLFNLLWLALACSPVHTTLSKSDAKKAASKTLLEKSQFSDKPVQDRGLVVTDLKAESVVLEHRSYCSAKARDRHFAGDVLGYVTPWNSHGYDVTKVFGSKFTQISPVWLQLKRRGREMFEVTGLHDVDQGWMRAVRKHAKGLHIVPRLLFEDWTYDDFRNVLDSEDEIEELSKTVVQVAKNQHFDGFVVEVWNQLLSQKRVGLIHMLTHLAEALHQARLLALLVIPPAITPGTDQLGMFTHKEFEQLAPVLDGFSLMTYDYSTAHQPGPNAPLSWVRACVQVLDPKSKWRSKILLGLNFYGMDYATSKDAREPVVGARYIQTLKDHRPRMVWDSQASEHFFEYKKSRSGRHVVFYPTLKSLQVRLELARELGVGVSIWELGQGLDYFYDLL

SEQ ID NO: 5586 - protein, 474 aa, Homo sapiens
MTILTYPFKNLPTASKWALRFSIRPLSCSSQLRAAPAVQTKTKKTLAKPNIRNVVVVDGVRTPFLLSGTSYKDLMPHDLARAALTGLLHRTSVPKEVVDYIIFGTVIQEVKTSNVAREAALGAGFSDKTPAHTVTMACISANQAMTTGVGLIASGQCDVIVAGGVELMSDVPIRHSRKMRKLMLDLNKAKSMGQRLSLISKFRFNFLAPELPAVSEFSTSETMGHSADRLAAAFAVSRLEQDEYALRSHSLAKKAQDEGLLSDVVPFKVPGKDTVTKDNGIRPSSLEQMAKLKPAFIKPYGTVTAANSSFLTDGASAMLIMAEEKALAMGYKPKAYLRDFMYVSQDPKDQLLLGPTYATPKVLEKAGLTMNDIDAFEFHEAFSGQILANFKAMDSDWFAENYMGRKTKVGLPPLEKFNNWGGSLSLGHPFGATGCRLVMAAANRLRKEGGQYGLVAACAAGGQGHAMIVEAYPK

SEQ ID NO: 5587 - protein, 1059 aa, Homo sapiens
MCVRSCFQSPRLQWVWRTAFLKHTQRRHQGSHRWTHLGGSTYRAVIFDMGGVLIPSPGRVAAEWEVQNRIPSGTILKALMEGGENGPWMRFMRAEITAEGFLREFGRLCSEMLKTSVPVDSFFSLLTSERVAKQFPVMTEAITQIRAKGLQTAVLSNNFYLPNQKSFLPLDRKQFDVIVESCMEGICKPDPRIYKLCLEQLGLQPSESIFLDDLGTNLKEAARLGIHTIKVNDPETAVKELEALLGFTLRVGVPNTRPVKKTMEIPKDSLQKYLKDLLGIQTTGPLELLQFDHGQSNPTYYIRLANRDLVLRKKPPGTLLPSAHAIEREFRIMKALANAGVPVPNVLDLCEDSSVIGTPFYVMEYCPGLIYKDPSLPGLEPSHRRAIYTAMNTVLCKIHSVDLQAVGLEDYGKQGDYIPRQVRTWVKQYRASETSTIPAMERLIEWLPLHLPRQQRTTVVHGDFRLDNLVFHPEEPEVLAVLDWELSTLGDPLADVAYSCLAHYLPSSFPVLRGINDCDLTQLGIPAAEEYFRMYCLQMGLPPTENWNFYMAFSFFRVAAILQGVYKRSLTGQASSTYAEQTGKLTEFVSNLAWDFAVKEGFRVFKEMPFTNPLTRSYHTWARPQSQWCPTGSRSYSSVPEASPAHTSRGGLVISPESLSPPVRELYHRLKHFMEQRVYPAEPELQSHQASAARWSPSPLIEDLKEKAKAEGLWNLFLPLEADPEKKYGAGLTNVEYAHLCELMGTSLYAPEVCNCSAPDTGNMELLVRYGTEAQKARWLIPLLEGKARSCFAMTEPQVASSDATNIEASIREEDSFYVINGHKWWITGILDPRCQLCVFMGKTDPHAPRHRQQSVLLVPMDTPGIKIIRPLTVYGLEDAPGGHGEVRFEHVRVPKENMVLGPGRGFEIAQGRLGPGRIHHCMRLIGFSERALALMKARVKSRLAFGKPLVEQGTVLADIAQSRVEIEQARLLVLRAAHLMDLAGNKAAALDIAMIKMVAPSMASRVIDRAIQAFGAAGLSSDYPLAQFFTWARALRFADGPDEVHRATVAKLELKHRI

SEQ ID NO: 5588 - protein, 3063 aa, Homo sapiens
MRSRLPPALAALGAALLLSSIEAEVDPPSDLNFKIIDENTVHMSWAKPVDPIVGYRITVDPTTDGPTKEFTLSASTTETLLSELVPETEYVVTITSYDEVEESVPVIGQLTIQTGSSTKPVEKKPGKTEIQKCSVSAWTDLVFLVDGSWSVGRNNFKYILDFIAALVSAFDIGEEKTRVGVVQYSSDTRTEFNLNQYYQRDELLAAIKKIPYKGGNTMTGDAIDYLVKNTFTESAGARVGFPKVAIIITDGKSQDEVEIPARELRNVGVEVFSLGIKAADAKELKQIASTPSLNHVFNVANFDAIVDIQNEIISQVCSGVDEQLGELVSGEEVVEPPSNLIAMEVSSKYVKLNWNPSPSPVTGYKVILTPMTAGSRQHALSVGPQTTTLSVRDLSADTEYQISVSAMKGMTSSEPISIMEKTQPMKVQVECSRGVDIKADIVFLVDGSYSIGIANFVKVRAFLEVLVKSFEISPNRVQISLVQYSRDPHTEFTLKKFTKVEDIIEAINTFPYRGGSTNTGKAMTYVREKIFVPSKGSRSNVPKVMILITDGKSSDAFRDPAIKLRNSDVEIFAVGVKDAVRSELEAIASPPAETHVFTVEDFDAFQRISFELTQSICLRIEQELAAIKKKAYVPPKDLSFSEVTSYGFKTNWSPAGENVFSYHITYKEAAGDDEVTVVEPASSTSVVLSSLKPETLYLVNVTAEYEDGFSIPLAGEETTEEVKGAPRNLKVTDETTDSFKITWTQAPGRVLRYRIIYRPVAGGESREVTTPPNQRRRTLENLIPDTKYEVSVIPEYFSGPGTPLTGNAATEEVRGNPRDLRVSDPTTSTMKLSWSGAPGKVKQYLVTYTPVAGGETQEVTVRGDTTNTVLQGLKEGTQYALSVTALYASGAGDALFGEGTTLEERGSPQDLVTKDITDTSIGAYWTSAPGMVRGYRVSWKSLYDDVDTGEKNLPEDAIHTMIENLQPETKYRISVFATYSSGEGEPLTGDATTELSQDSKTLKVDEETENTMRVTWKPAPGKVVNYRVVYRPHGRGKQMVAKVPPTVTSTVLKRLQPQTTYDITVLPIYKMGEGKLRQGSGTTASRFKSPRNLKTSDPTMSSFRVTWEPAPGEVKGYKVTFHPTGDDRRLGELVVGPYDNTVVLEELRAGTTYKVNVFGMFDGGESSPLVGQEMTTLSDTTVMPILSSGMECLTRAEADIVLLVDGSWSIGRANFRTVRSFISRIVEVFDIGPKRVQIALAQYSGDPRTEWQLNAHRDKKSLLQAVANLPYKGGNTLTGMALNFIRQQNFRTQAGMRPRARKIGVLITDGKSQDDVEAPSKKLKDEGVELFAIGIKNADEVELKMIATDPDDTHAYNVADFESLSRIVDDLTINLCNSVKGPGDLEAPSNLVISERTHRSFRVSWTPPSDSVDRYKVEYYPVSGGKRQEFYVSRMETSTVLKDLKPETEYVVNVYSVVEDEYSEPLKGTEKTLPVPVVSLNIYDVGPTTMHVQWQPVGGATGYILSYKPVKDTEPTRPKEVRLGPTVNDMQLTDLVPNTEYAVTVQAVLHDLTSEPVTVREVTLPLPRPQDLKLRDVTHSTMNVFWEPVPGKVRKYIVRYKTPEEDVKEVEVDRSETSTSLKDLFSQTLYTVSVSAVHDEGESPPVTAQETTRPVPAPTNLKITEVTSEGFRGTWDHGASDVSLYRITWAPFGSSDKMETILNGDENTLVFENLNPNTIYEVSITAIYPDESESDDLIGSERTLPILTTQAPKSGPRNLQVYNATSNSLTVKWDPASGRVQKYRITYQPSTGEGNEQTTTIGGRQNSVVLQKLKPDTPYTITVSSLYPDGEGGRMTGRGKTKPLNTVRNLRVYDPSTSTLNVRWDHAEGNPRQYKLFYAPAAGGPEELVPIPGNTNYAILRNLQPDTSYTVTVVPVYTEGDGGRTSDTGRTLMRGLARNVQVYNPTPNSLDVRWDPAPGPVLQYRVVYSPVDGTRPSESIVVPGNTRMVHLERLIPDTLYSVNLVALYSDGEGNPSPAQGRTLPRSGPRNLRVFGETTNSLSVAWDHADGPVQQYRIIYSPTVGDPIDEYTTVPGRRNNVILQPLQPDTPYKITVIAVYEDGDGGHLTGNGRTVGLLPPQNIHISDEWYTRFRVSWDPSPSPVLGYKIVYKPVGSNEPMEAFVGEMTSYTLHNLNPSTTYDVNVYAQYDSGLSVPLTDQGTTLYLNVTDLKTYQIGWDTFCVKWSPHRAATSYRLKLSPADGTRGQEITVRGSETSHCFTGLSPDTDYGVTVFVQTPNLEGPGVSVKEHTTVKPTEAPTEPPTPPPPPTIPPARDVCKGAKADIVFLTDASWSIGDDNFNKVVKFIFNTVGGFDEISPAGIQVSFVQYSDEVKSEFKLNTYNDKALALGALQNIRYRGGNTRTGKALTFIKEKVLTWESGMRKNVPKVLVVVTDGRSQDEVKKAALVIQQSGFSVFVVGVADVDYNELANIASKPSERHVFIVDDFESFEKIEDNLITFVCETATSSCPLIYLDGYTSPGFKMLEAYNLTEKNFASVQGVSLESGSFPSYSAYRIQKNAFVNQPTADLHPNGLPPSYTIILLFRLLPETPSDPFAIWQITDRDYKPQVGVIADPSSKTLSFFNKDTRGEVQTVTFDTEEVKTLFYGSFHKVHIVVTSKSVKIYIDCYEIIEKDIKEAGNITTDGYEILGKLLKGERKSAAFQIQSFDIVCSPVWTSRDRCCDIPSRRDEGKCPAFPNSCTCTQDSVGPPGPPGPAGGPGAKGPRGERGISGAIGPPGPRGDIGPPGPQGPPGPQGPNGLSIPGEQGRQGMKGDAGEPGLPGRTGTPGLPGPPGPMGPPGDRGFTGKDGAMGPRGPPGPPGSPGSPGVTGPSGKPGKPGDHGRPGPSGLKGEKGDRGDIASQNMMRAVARQVCEQLISGQMNRFNQMLNQIPNDYQSSRNQPGPPGPPGPPGSAGARGEPGPGGRPGFPGTPGMQGPPGERGLPGEKGERGTGSSGPRGLPGPPGPQGESRTGPPGSTGSRGPPGPPGRPGNSGIRGPPGPPGYCDSSQCASIPYNGQGYPGSG

SEQ ID NO: 5589 - protein, 137 aa, Homo sapiens
MGLTSQLLPPLFFLLACAGNFVHGHKCDITLQEIIKTLNSLTEQKNTTEKETFCRAATVLRQFYSHHEKDTRCLGATAQQFHRHKQLIRFLKRLDRNLWGLAGLNSCPVKEANQSTLENFLERLKTIMREKYSKCSS

SEQ ID NO: 5590 - protein, 261 aa, Homo sapiens
MNPNCARCGKIVYPTEKVNCLDKFWHKACFHCETCKMTLNMKNYKGYEKKPYCNAHYPKQSFTMVADTPENLRLKQQSELQSQVRYKEEFEKNKGKGFSVVADTPELQRIKKTQDQISNIKYHEEFEKSRMGPSGGEGMEPERRDSQDGSSYRRPLEQQQPHHIPTSAPVYQQPQQQPVAQSYGGYKEPAAPVSIQRSAPGGGGKRYRAVYDYSAADEDEVSFQDGDTIVNVQQIDDGWMYGTVERTGDTGMLPANYVEAI

SEQ ID NO: 5591 - protein, 171 aa, Homo sapiens
MEKRLQEAQLYKEEGNQRYREGKYRDAVSRYHRALLQLRGLDPSLPSPLPNLGPQGPALTPEQENILHTTQTDCYNNLAACLLQMEPVNYERVREYSQKVLERQPDNAKALYRAGVAFFHLQDYDQARHYLLAAVNRQPKDANVRRYLQLTQSELSSYHRKEKQLYLGMFG

SEQ ID NO: 5592 - protein, 1183 aa, Homo sapiens
MQLKIMPKKKRLSAGRVPLILFLCQMISALEVPLDLVQPPTITQQSPKDYIIDPRENIVIQCEAKGKPPPSFSWTRNGTHFDIDKDPLVTMKPGTGTLIINIMSEGKAETYEGVYQCTARNERGAAVSNNIVVRPSRSPLWTKEKLEPITLQSGQSLVLPCRPPIGLPPPIIFWMDNSFQRLPQSERVSQGLNGDLYFSNVLPEDTREDYICYARFNHTQTIQQKQPISVKVISVDELNDTIAANLSDTEFYGAKSSRERPPTFLTPEGNASNKEELRGNVLSLECIAEGLPTPIIYWAKEDGMLPKNRTVYKNFEKTLQIIHVSEADSGNYQCIAKNALGAIHHTISVRVKAAPYWITAPQNLVLSPGEDGTLICRANGNPKPRISWLTNGVPIEIAPDDPSRKIDGDTIIFSNVQERSSAVYQCNASNEYGYLLANAFVNVLAEPPRILTPANTLYQVIANRPALLDCAFFGSPLPTIEWFKGAKGSALHEDIYVLHENGTLEIPVAQKDSTGTYTCVARNKLGMAKNEVHLEIKDPTWIVKQPEYAVVQRGSMVSFECKVKHDHTLSLTVLWLKDNRELPSDERFTVDKDHLVVADVSDDDSGTYTCVANTTLDSVSASAVLSVVDVPNPPFDLELTDQLDKSVQLSWTPGDDNNSPITKFIIEYEDAMHKPGLWHHQTEVSGTQTTAQLKLSPYVNYSFRVMAVNSIGKSLPSEASEQYLTKASEPDKNPTAVEGLGSEPDNLVITWKPLNGFESNGPGLQYKVSWRQKDGDDEWTSVVVANVSKYIVSGTPTFVPYLIKVQALNDMGFAPEPAVVMGHSGEDLPMVAPGNVRVNVVNSTLAEVHWDPVPLKSIRGHLQGYRIYYWKTQSSSKRNRRHIEKKILTFQGSKTHGMLPGLEPFSHYTLNVRVVNGKGEGPASPDRVFNTPEGVPSAPSSLKIVNPTLDSLTLEWDPPSHPNGILTEYTLKYQPINSTHELGPLVDLKIPANKTRWTLKNLNFSTRYKFYFYAQTSAGSGSQITEEAVTTVDEAMASRQVDIATQGWFIGLMCAVALLILILLIVCFIRRNKGGKYPVKEKEDAHADPEIQPMKEDDGTFGEYSDAEDHKPLKKGSRTPSDRTVKKEDSDDSLVDYGEGVNGQFNEDGSFIGQYSGKKEKEPAEGNESSEAPSPVNAMNSFV

SEQ ID NO: 5593 - protein, 1195 aa, Homo sapiens
MGEEGPPSLEYIQAKDLFPPKELVKEEENLQVPFTVLQGEGVEFLGRAADALIAISNYRLHIKFKDSVINVPLRMIDSVESRDMFQLHISCKDSKVVRCHFSTFKQCQEWLSRLSRATARPAKPEDLFAFAYHAWCLGLTEEDQHTHLCQPGEHIRCRQEAELARMGFDLQNVWRVSHINSNYKLCPSYPQKLLVPVWITDKELENVASFRSWKRIPVVVYRHLRNGAAIARCSQPEISWWGWRNADDEYLVTSIAKACALDPGTRATGGSLSTGNNDTSEACDADFDSSLTACSGVESTAAPQKLLILDARSYTAAVANRAKGGGCECEEYYPNCEVVFMGMANIHAIRNSFQYLRAVCSQMPDPSNWLSALESTKWLQHLSVMLKAAVLVANTVDREGRPVLVHCSDGWDRTPQIVALAKILLDPYYRTLEGFQVLVESDWLDFGHKFGDRCGHQENVEDQNEQCPVFLQWLDSVHQLLKQFPCLFEFNEAFLVKLVQHTYSCLYGTFLANNPCEREKRNIYKRTCSVWALLRAGNKNFHNFLYTPSSDMVLHPVCHVRALHLWTAVYLPASSPCTLGEENMDLYLSPVAQSQEFSGRSLDRLPKTRSMDDLLSACDTSSPLTRTSSDPNLNNHCQEVRVGLEPWHSNPEGSETSFVDSGVGGPQQTVGEVGLPPPLPSSQKDYLSNKPFKSHKSCSPSYKLLNTAVPREMKSNTSDPEIKVLEETKGPAPDPSAQDELGRTLDGIGEPPEHCPETEAVSALSKVISNKCDGVCNFPESSQNSPTGTPQQAQPDSMLGVPSKCVLDHSLSTVCNPPSAACQTPLDPSTDFLNQDPSGSVASISHQEQLSSVPDLTHGEEDIGKRGNNRNGQLLENPRFGKMPLELVRKPISQSQISEFSFLGSNWDSFQGMVTSFPSGEATPRRLLSYGCCSKRPNSKQMRATGPCFGGQWAQREGVKSPVCSSHSNGHCTGPGGKNQMWLSSHPKQVSSTKPVPLNCPSPVPPLYLDDDGLPFPTDVIQHRLRQIEAGYKQEVEQLRRQVRELQMRLDIRHCCAPPAEPPMDYEDDFTCLKESDGSDTEDFGSDHSEDCLSEASWEPVDKKETEVTRWVPDHMASHCYNCDCEFWLAKRRHHCRNCGNVFCAGCCHLKLPIPDQQLYDPVLVCNSCYEHIQVSRARELMSQQLKKPIATASS

SEQ ID NO: 5594 - protein, 87 aa, Homo sapiens
MLPCLALLLLMELSVCTVAGDGGEEQTLSTEAETWEGAGPSIQLQLQEVKTGKASQFFGLMGKRVGGRPLIQPRRKKGREDEAQGSE

SEQ ID NO: 5595 - protein, 798 aa, Homo sapiens
MAASLPGPGSRLFRTYGAADGRRQRRPGREAAQWFPPQDRRRFFNSSGSSDASIGDPSQSDDPDDPDDPDFPGSPVRRRRRRPGGRVPKDRPSLTVTPKRWKLRARPSLTVTPRRLGLRARPPQKCSTPCGPLRLPPFPSRDSGRLSPDLSVCGQPRDGDELGISASLFSSLASPCPGSPTPRDSVISIGTSACLVAASAVPSGLHLPEVSLDRASLPCSQEEATGGAKDTRMVHQTRASLRSVLFGLMNSGTPEDSEFRADGKNMRESCCKRKLVVGNGPEGPGLSSTGKRRATGQDSCQERGLQEAVRREHQEASVPKGRIVPRGIDRLERTRSSRKSKHQEATETSLLHSHRFKKGQKLGKDSFPTQDLTPLQNVCFWTKTRASFSFHKKKIVTDVSEVCSIYTTATSLSGSLLSECSNRPVMNRTSGAPSSWHSSSMYLLSPLNTLSISNKKASDAEKVYGECSQKGPVPFSHCLPTEKLQRCEKIGEGVFGEVFQTIADHTPVAIKIIAIEGPDLVNGSHQKTFEEILPEIIISKELSLLSGEVCNRTEGFIGLNSVHCVQGSYPPLLLKAWDHYNSTKGSANDRPDFFKDDQLFIVLEFEFGGIDLEQMRTKLSSLATAKSILHQLTASLAVAEASLRFEHRDLHWGNVLLKKTSLKKLHYTLNGKSSTIPSCGLQVSIIDYTLSRLERDGIVVFCDVSMDEDLFTGDGDYQFDIYRLMKKENNNRWGEYHPYSNVLWLHYLTDKMLKQMTFKTKCNTPAMKQIKRKIQEFHRTMLNFSSATDLLCQHSLFK

SEQ ID NO: 5596 - protein, 478 aa, Homo sapiens
MAGVEEVAASGSHLNGDLDPDDREEGAASTAEEAAKKKRRKKKKSKGPSAAGEQEPDKESGASVDEVARQLERSALEDKERDEDDEDGDGDGDGATGKKKKKKKKKRGPKVQTDPPSVPICDLYPNGVFPKGQECEYPPTQDGRTAAWRTTSEEKKALDQASEEIWNDFREAAEAHRQVRKYVMSWIKPGMTMIEICEKLEDCSRKLIKENGLNAGLAFPTGCSLNNCAAHYTPNAGDTTVLQYDDICKIDFGTHISGRIIDCAFTVTFNPKYDTLLKAVKDATNTGIKCAGIDVRLCDVGEAIQEVMESYEVEIDGKTYQVKPIRNLNGHSIGQYRIHAGKTVPIVKGGEATRMEEGEVYAIETFGSTGKGVVHDDMECSHYMKNFDVGHVPIRLPRTKHLLNVINENFGTLAFCRRWLDRLGESKYLMALKNLCDLGIVDPYPPLCDIKGSYTAQFEHTILLRPTCKEVVSRGDDY

SEQ ID NO: 5597 - protein, 1059 aa, Homo sapiens
MAAVAGSGAAAAPSSLLLVVGSEFGSPGLLTYVLEELERGIRSWDVDPGVCNLDEQLKVFVSRHSATFSSIVKGQRSLHHRGDNLETLVLLNPSDKSLYDELRNLLLDPASHKLLVLAGPCLEETGELLLQTGGFSPHHFLQVLKDREIRDILATTPPPVQPPILTITCPTFGDWAQLAPAVPGLQGALRLQLRLNPPAQLPNSEGLCEFLEYVAESLEPPSPFELLEPPTSGGFLRLGRPCCYIFPGGLGDAAFFAVNGFTVLVNGGSNPKSSFWKLVRHLDRVDAVLVTHPGADSLPGLNSLLRRKLAERSEVAAGGGSWDDRLRRLISPNLGVVFFNACEAASRLARGEDEAELALSLLAQLGITPLPLSRGPVPAKPTVLFEKMGVGRLDMYVLHPPSAGAERTLASVCALLVWHPAGPGEKVVRVLFPGCTPPACLLDGLVRLQHLRFLREPVVTPQDLEGPGRAESKESVGSRDSSKREGLLATHPRPGQERPGVARKEPARAEAPRKTEKEAKTPRELKKDPKPSVSRTQPREVRRAASSVPNLKKTNAQAAPKPRKAPSTSHSGFPPVANGPRSPPSLRCGEASPPSAACGSPASQLVATPSLELGPIPAGEEKALELPLAASSIPRPRTPSPESHRSPAEGSERLSLSPLRGGEAGPDASPTVTTPTVTTPSLPAEVGSPHSTEVDESLSVSFEQVLPPSAPTSEAGLSLPLRGPRARRSASPHDVDLCLVSPCEFEHRKAVPMAPAPASPGSSNDSSARSQERAGGLGAEETPPTSVSESLPTLSDSDPVPLAPGAADSDEDTEGFGVPRHDPLPDPLKVPPPLPDPSSICMVDPEMLPPKTARQTENVSRTRKPLARPNSRAAAPKATPVAAAKTKGLAGGDRASRPLSARSEPSEKGGRAPLSRKSSTPKTATRGPSGSASSRPGVSATPPKSPVYLDLAYLPSGSSAHLVDEEFFQRVRALCYVISGQDQRKEEGMRAVLDALLASKQHWDRDLQVTLIPTFDSVAMHTWYAETHARHQALGITVLGSNSMVSMQDDAFPACKVEF

SEQ ID NO: 5598 - protein, 1342 aa, Homo sapiens
MEENEVESSSDAAPGPGRPEEPSESGLGVGTSEAVSADSSDAAAAPGQAEADDSGVGQSSDRGSRSQEEVSESSSSADPLPNSYLPDSSSVSHGPVAGVTGGPPALVHSSALPDPNMLVSDCTASSSDLGSAIDKIIESTIGPDLIQNCITVTSAEDGGAETTRYLILQGPDDGAPMTSPMSSSTLAHSLAAIEALADGPTSTSTCLEAQGGPSSPVQLPPASGAEEPDLQSLEAMMEVVVVQQFKCKMCQYRSSTKATLLRHMRERHFRPVAAAAAAAGKKGRLRKWSTSTKSQEEEGPEEEDDDDIVDAGAIDDLEEDSDYNPAEDEPRGRQLRLQRPTPSTPRPRRRPGRPRKLPRLEISDLPDGVEGEPLVSSQSGQSPPEPQDPEAPSSSGPGHLVAMGKVSRTPVEAGVSQSDAENAAPSCPDEHDTLPRRRGRPSRRFLGKKYRKYYYKSPKPLLRPFLCRICGSRFLSHEDLRFHVNSHEAGDPQLFKCLQCSYRSRRWSSLKEHMFNHVGSKPYKCDECSYTSVYRKDVIRHAAVHSRDRKKRPDPTPKLSSFPCPVCGRVYPMQKRLTQHMKTHSTEKPHMCDKCGKSFKKRYTFKMHLLTHIQAVANRRFKCEFCEFVCEDKKALLNHQLSHVSDKPFKCSFCPYRTFREDFLLSHVAVKHTGAKPFACEYCHFSTRHKKNLRLHVRCRHASSFEEWGRRHPEEPPSRRRPFFSLQQIEELKQQHSAAPGPPPSSPGPPEIPPEATTFQSSEAPSLLCSDTLGGATIIYQQGAEESTAMATQTALDLLLNMSAQRELGGTALQVAVVKSEDVEAGLASPGGQPSPEGATPQVVTLHVAEPGGGAAAESQLGPPDLPQITLAPGPFGGTGYSVITAPPMEEGTSAPGTPYSEEPAGEAAQAVVVSDTLKEAGTHYIMATDGTQLHHIELTADGSISFPSPDALASGAKWPLLQCGGLPRDGPEPPSPAKTHCVGDSQSSASSPPATSKALGLAVPPSPPSAATAASKKFSCKICAEAFPGRAEMESHKRAHAGPGAFKCPDCPFSARQWPEVRAHMAQHSSLRPHQCSQCSFASKNKKDLRRHMLTHTKEKPFACHLCGQRFNRNGHLKFHIQRLHSPDGRKSGTPTARAPTQTPTQTIILNSDDETLATLHTALQSSHGVLGPERLQQALSQEHIIVAQEQTVTNQEEAAYIQEITTADGQTVQHLVTSDNQVQYIISQDGVQHLLPQEYVVVPEGHHIQVQEGQITHIQYEQGAPFLQESQIQYVPVSPGQQLVTQAQLEAAAHSAVTAVADAAMAQAQGLFGTDETVPEHIQQLQHQGIEYDVITLADD

SEQ ID NO: 5599 - protein, 778 aa, Homo sapiens
MAQKMDCGAGLLGFQAEASVEDSALLMQTLMEAIQISEAPPTNQATAAASPQSSQPPTANEMADIQVSAAAARPKSAFKVQNATTKGPNGVYDFSQAHNAKDVPNTQPKAAFKSQNATPKGPNAAYDFSQAATTGELAANKSEMAFKAQNATTKVGPNATYNFSQSLNANDLANSRPKTPFKAWNDTTKAPTADTQTQNVNQAKMATSQADIETDPGISEPDGATAQTSADGSQAQNLESRTIIRGKRTRKINNLNVEENSSGDQRRAPLAAGTWRSAPVPVTTQNPPGAPPNVLWQTPLAWQNPSGWQNQTARQTPPARQSPPARQTPPAWQNPVAWQNPVIWPNPVIWQNPVIWPNPIVWPGPVVWPNPLAWQNPPGWQTPPGWQTPPGWQGPPDWQGPPDWPLPPDWPLPPDWPLPTDWPLPPDWIPADWPIPPDWQNLRPSPNLRPSPNSRASQNPGAAQPRDVALLQERANKLVKYLMLKDYTKVPIKRSEMLRDIIREYTDVYPEIIERACFVLEKKFGIQLKEIDKEEHLYILISTPESLAGILGTTKDTPKLGLLLVILGVIFMNGNRASEAVLWEALRKMGLRPGVRHPLLGDLRKLLTYEFVKQKYLDYRRVPNSNPPEYEFLWGLRSYHETSKMKVLRFIAEVQKRDPRDWTAQFMEAADEALDALDAAAAEAEARAEARTRMGIGDEAVSGPWSWDDIEFELLTWDEEGDFGDPWSRIPFTFWARYHQNARSRFPQTFAGPIIGPGGTASANFAANFGAIGFFWVE

SEQ ID NO: 5600 - protein, 1202 aa, Homo sapiens
MGREQDLILAVKNGDVTGVQKLVAKVKATKTKLLGSTKRLNVNYQDADGFSALHHAALGGSLELIALLLEAQATVDIKDSNGMRPLHYAAWQGRLEPVRLLLRASAAVNAASLDGQIPLHLAAQYGHYEVSEMLLQHQSNPCLVNKAKKTPLDLACEFGRLKVAQLLLNSHLCVALLEGEAKDPCDPNYTTPLHLAAKNGHREVIRQLLRAGIEINRQTKTGTALHEAALYGKTEVVRLLLEGGVDVNIRNTYNQTALDIVNQFTTSQASREIKQLLREASGILKVRALKDFWNLHDPTALNVRAGDVITVLEQHPDGRWKGHIHESQRGTDRIGYFPPGIVEVVSKRVGIPAARLPSAPTPLRPGFSRTPQPPAEEPPHPLTYSQLPRVGLSPDSPAGDRNSVGSEGSVGSIRSAGSGQSSEGTNGHGPGLLIENAQPLPSAGEDQVLPGLHPPSLADNLSHRPLANCRSGEQIFTQDVRPEQLLEGKDAQAIHNWLSEFQLEGYTAHFLQAGYDVPTISRMTPEDLTAIGVTKPGHRKKIASEIAQLSIAEWLPSYIPTDLLEWLCALGLPQYHKQLVSSGYDSMGLVADLTWEELQEIGVNKLGHQKKLMLGVKRLAELRRGLLQGEALSEGGRRLAKGPELMAIEGLENGEGPATAGPRLLTFQGSELSPELQAAMAGGGPEPLPLPPARSPSQESIGARSRGSGHSQEQPAPQPSGGDPSPPQERNLPEGTERPPKLCSSLPGQGPPPYVFMYPQGSPSSPAPGPPPGAPWAFSYLAGPPATPPDPPRPKRRSHSLSRPGPTEGDAEGEAEGPVGSTLGSYATLTRRPGRSALVRTSPSVTPTPARGTPRSQSFALRARRKGPPPPPPKRLSSVSGPSPEPPPLDESPGPKEGATGPRRRTLSEPAGPSEPPGPPAPAGPASDTEEEEPGPEGTPPSRGSSGEGLPFAEEGNLTIKQRPKPAGPPPRETPVPPGLDFNLTESDTVKRRPKCREREPLQTALLAFGVASATPGPAAPLPSPTPGESPPASSLPQPEPSSLPAQGVPTPLAPSPAMQPPVPPCPGPGLESSAASRWNGETEPPAAPAALLKVPGAGTAPKPVSVACTQLAFSGPKLAPRLGPRPVPPPRPESTGTVGPGQAQQRLEQTSSSLAAALRAAEKSIGTKEQEGTPSASTKHILDDISTMFDALADQLDAMLD

SEQ ID NO: 5601 - protein, 193 aa, Homo sapiens
MIKAILIFNNHGKPRLSKFYQPYSEDTQQQIIRETFHLVSKRDENVCNFLEGGLLIGGSDNKLIYRHYATLYFVFCVDSSESELGILDLIQVFVETLDKCFENVCELDLIFHVDKVHNILAEMVMGGMVLETNMNEIVTQIDAQNKLEKSEAGLAGAPARAVSAVKNMNLPEIPRNINIGDISIKVPNLPSFK

SEQ ID NO: 5602 - protein, 1336 aa, Homo sapiens
MATEIGSPPRFFHMPRFQHQAPRQLFYKRPDFAQQQAMQQLTFDGKRMRKAVNRKTIDYNPSVIKYLENRIWQRDQRDMRAIQPDAGYYNDLVPPIGMLNNPMNAVTTKFVRTSTNKVKCPVFVVRWTPEGRRLVTGASSGEFTLWNGLTFNFETILQAHDSPVRAMTWSHNDMWMLTADHGGYVKYWQSNMNNVKMFQAHKEAIREASFSPTDNKFATCSDDGTVRIWDFLRCHEERILRGHGADVKCVDWHPTKGLVVSGSKDSQQPIKFWDPKTGQSLATLHAHKNTVMEVKLNLNGNWLLTASRDHLCKLFDIRNLKEELQVFRGHKKEATAVAWHPVHEGLFASGGSDGSLLFWHVGVEKEVGGMEMAHEGMIWSLAWHPLGHILCSGSNDHTSKFWTRNRPGDKMRDRYNLNLLPGMSEDGVEYDDLEPNSLAVIPGMGIPEQLKLAMEQEQMGKDESNEIEMTIPGLDWGMEEVMQKDQKKVPQKKVPYAKPIPAQFQQAWMQNKVPIPAPNEVLNDRKEDIKLEEKKKTQAEIEQEMATLQYTNPQLLEQLKIERLAQKQVEQIQPPPSSGTPLLGPQPFPGQGPMSQIPQGFQQPHPSQQMPMNMAQMGPPGPQGQFRPPGPQGQMGPQGPPLHQGGGGPQGFMGPQGPQGPPQGLPRPQDMHGPQGMQRHPGPHGPLGPQGPPGPQGSSGPQGHMGPQGPPGPQGHIGPQGPPGPQGHLGPQGPPGTQGMQGPPGPRGMQGPPHPHGIQGGPGSQGIQGPVSQGPLMGLNPRGMQGPPGPRENQGPAPQGMIMGHPPQEMRGPHPPGGLLGHGPQEMRGPQEIRGMQGPPPQGSMLGPPQELRGPPGSQSQQGPPQGSLGPPPQGGMQGPPGPQGQQNPARGPHPSQGPIPFQQQKTPLLGDGPRAPFNQEGQSTGPPPLIPGLGQQGAQGRIPPLNPGQGPGPNKGDSRGPPNHHMGPMSERRHEQSGGPEHGPERGPFRGGQDCRGPPDRRGPHPDFPDDFSRPDDFHPDKRFGHRLREFEGRGGPLPQEEKWRRGGPGPPFPPDHREFSEGDGRGAARGPPGAWEGRRPGDERFPRDPEDPRFRGRREESFRRGAPPRHEGRAPPRGRDGFPGPEDFGPEENFDASEEAARGRDLRGRGRGTPRGGRKGLLPTPDEFPRFEGGRKPDSWDGNREPGPGHEHFRDTPRPDHPPHDGHSPASRERSSSLQGMDMASLPPRKRPWHDGPGTSEHREMEAPGGPSEDRGGKGRGGPGPAQRVPKSGRSSSLDGEHHDGYHRDEPFGGPPGSGTPSRGGRSGSNWGRGSNMNSGPPRRGASRGGGRGR

SEQ ID NO: 5603 - protein, 214 aa, Homo sapiens
MQLTHQLDLFPECRVTLLLFKDVKNAGDLRRKAMEGTIDGSLINPTVFHSCCPGWSAMARSWLTATSASRVQAIVLPQPPELLGLQIVDPFQILVAANKAVHLYKLGKMKTRTLSTEIIFNLSPNNNISEALKKFGISANDTSILIVYIEEGEKQINQEYLISQVEGHQVSLKNLPEIMNITEVKKIYKLSSQEESIGTLLDAIICRMSTKDVL

SEQ ID NO: 5604 - protein, 196 aa, Homo sapiens
MVGGLKRKHSDLEEEEERWEWSPAGLQSYQQALLRISLDKVQRSLGPRAPSLRRHVLIHNTLQQLQAALRLAPAPALPPEPLFLGEEDFSLSATIGSILRELDTSMDGTEPPQNPVTPLGLQNEVPPQPDPVFLEALSSRYLGDSGLDDFFLDIDTSAVEKEPARAPPEPPHNLFCAPGSWEWNELDHIMEIILGS

SEQ ID NO: 5605 - protein, 379 aa, Homo sapiens
MAWRGWAQRGWGCGQAWGASVGGRSCEELTAVLTPPQLLGRRFNFFIQQKCGFRKAPRKVEPRRSDPGTSGEAYKRSALIPPVEETVFYPSPYPIRSLIKPLFFTVGFTGCAFGSAAIWQYESLKSRVQSYFDGIKADWLDSIRPQKEGDFRKEINKWWNNLSDGQRTVTGIIAANVLVFCLWRVPSLQRTMIRYFTSNPASKVLCSPMLLSTFSHFSLFHMAANMYVLWSFSSSIVNILGQEQFMAVYLSAGVISNFVSYVGKVATGRYGPSLGASGAIMTVLAAVCTKIPEGRLAIIFLPMFTFTAGNALKAIIAMDTAGMILGWKFFDHAAHLGGALFGIWYVTYGHELIWKNREPLVKIWHEIRTNGPKKGGGSK

SEQ ID NO: 5606 - protein, 399 aa, Homo sapiens
MSDILRELLCVSEKAANIARACRQQEALFQLLIEEKKEGEKNKKFAVDFKTLADVLVQEVIKQNMENKFPGLEKNIFGEESNEFTNDWGEKITLRLCSTEEETAELLSKVLNGNKVASEALARVVHQDVAFTDPTLDSTEINVPQDILGIWVDPIDSTYQYIKGSADIKSNQGIFPCGLQCVTILIGVYDIQTGVPLMGVINQPFVSRDPNTLRWKGQCYWGLSYMGTNMHSLQLTISRRNGSETHTGNTGSEAAFSPSFSAVISTSEKETIKAALSRVCGDRIFGAAGAGYKSLCVVQGLVDIYIFSEDTTFKWDSCAAHAILRAMGGGIVDLKECLERNPETGLDLPQLVYHVENEGAAGVDRWANKGGLIAYRSRKRLETFLSLLVQNLAPAETHT

SEQ ID NO: 5607 - protein, 334 aa, Homo sapiens
MVGREKELSIHFVPGSCRLVEEEVNIPNRRVLVTGATGLLGRAVHKEFQQNNWHAVGCGFRRARPKFEQVNLLDSNAVHHIIHDFQPHVIVHCAAERRPDVVENQPDAASQLNVDASGNLAKEAAAVGAFLIYISSDYVFDGTNPPYREEDIPAPLNLYGKTKLDGEKAVLENNLGAAVLRIPILYGEVEKLEESAVTVMFDKVQFSNKSANMDHWQQRFPTHVKDVATVCRQLAEKRMLDPSIKGTFHWSGNEQMTKYEMACAIADAFNLPSSHLRPITDSPVLGAQRPRNAQLDCSKLETLGIGQRTPFRIGIKESLWPFLIDKRWRQTVFH

SEQ ID NO: 5608 - protein, 538 aa, Homo sapiens
MGCLWGLALPLFFFCWEVGVSGSSAGPSTRRADTAMTTDDTEVPAMTLAPGHAALETQTLSAETSSRASTPAGPIPEAETRGAKRISPARETRSFTKTSPNFMVLIATSVETSAASGSPEGAGMTTVQTITGSDPREAIFDTLCTDDSSEEAKTLTMDILTLAHTSTEAKGLSSESSASSDSPHPVITPSRASESSASSDGPHPVITPSRASESSASSDGPHPVITPSWSPGSDVTLLAEALVTVTNIEVINCSITEIETTTSSIPGASDTDLIPTEGVKASSTSDPPALPDSTEAKPHITEVTASAETLSTAGTTESAAPDATVGTPLPTNSATEREVTAPGATTLSGALVTVSRNPLEETSALSVETPSYVKVSGAAPVSIEAGSAVGKTTSFAGSSASSYSPSEAALKNFTPSETPTMDIATKGPFPTSRDPLPSVPPTTTNSSRGTNSTLAKITTSAKTTMKPPTATPTTARTRPTTDVSAGENGGFLLLRLSVASPEDLTDPRVAERLMQQLHRELHAHAPHFQVSLLRVRRG

SEQ ID NO: 5609 - protein, 625 aa, Homo sapiens
MLTQAAVRLVRGSLRKTSWAEWGHRELRLGQLAPFTAPHKDKSFSDQRSELKRRLKAEKKVAEKEAKQKELSEKQLSQATAAATNHTTDNGVGPEEESVDPNQYYKIRSQAIHQLKVNGEDPYPHKFHVDISLTDFIQKYSHLQPGDHLTDITLKVAGRIHAKRASGGKLIFYDLRGEGVKLQVMANSRNYKSEEEFIHINNKLRRGDIIGVQGNPGKTKKGELSIIPYEITLLSPCLHMLPHLHFGLKDKETRYRQRYLDLILNDFVRQKFIIRSKIITYIRSFLDELGFLEIETPMMNIIPGGAVAKPFITYHNELDMNLYMRIAPELYHKMLVVGGIDRVYEIGRQFRNEGIDLTHNPEFTTCEFYMAYADYHDLMEITEKMVSGMVKHITGSYKVTYHPDGPEGQAYDVDFTPPFRRINMVEELEKALGMKLPETNLFETEETRKILDDICVAKAVECPPPRTTARLLDKLVGEFLEVTCINPTFICDHPQIMSPLAKWHRSKEGLTERFELFVMKKEICNAYTELNDPMRQRQLFEEQAKAKAAGDDEAMFIDENFCTALEYGLPPTAGWGMGIDRVAMFLTDSNNIKEVLLFPAMKPEDKKENVATTDTLESTTVGTSV

SEQ ID NO: 5610 - protein, 940 aa, Homo sapiens
MGAARGSPARPRRLPLLSVLLLPLLGGTQTAIVFIKQPSSQDALQGRRALLRCEVEAPGPVHVYWLLDGAPVQDTERRFAQGSSLSFAAVDRLQDSGTFQCVARDDVTGEEARSANASFNIKWIEAGPVVLKHPASEAEIQPQTQVTLRCHIDGHPRPTYQWFRDGTPLSDGQSNHTVSSKERNLTLRPAGPEHSGLYSCCAHSAFGQACSSQNFTLSIADESFARVVLAPQDVVVARYEEAMFHCQFSAQPPPSLQWLFEDETPITNRSRPPHLRRATVFANGSLLLTQVRPRNAGIYRCIGQGQRGPPIILEATLHLAEIEDMPLFEPRVFTAGSEERVTCLPPKGLPEPSVWWEHAGVRLPTHGRVYQKGHELVLANIAESDAGVYTCHAANLAGQRRQDVNITVANGSSLPEWVTDNAGTLHFARVTRDDAGNYTCIASNGPQGQIRAHVQLTVAVFITFKVEPERTTVYQGHTALLQCEAQGDPKPLIQWKGKDRILDPTKLGPRMHIFQNGSLVIHDVAPEDSGRYTCIAGNSCNIKHTEAPLYVVDKPVPEESEGPGSPPPYKMIQTIGLSVGAAVAYIIAVLGLMFYCKKRCKAKRLQKQPEGEEPEMECLNGGPLQNGQPSAEIQEEVALTSLGSGPAATNKRHSTSDKMHFPRSSLQPITTLGKSEFGEVFLAKAQGLEEGVAETLVLVKSLQSKDEQQQLDFRRELEMFGKLNHANVVRLLGLCREAEPHYMVLEYVDLGDLKQFLRISKSKDEKLKSQPLSTKQKVALCTQVALGMEHLSNNRFVHKDLAARNCLVSAQRQVKVSALGLSKDVYNSEYYHFRQAWVPLRWMSPEAILEGDFSTKSDVWAFGVLMWEVFTHGEMPHGGQADDEVLADLQAGKARLPQPEGCPSKLYRLMQRCWALSPKDRPSFSEIASALGDSTVDSKP

SEQ ID NO: 5611 - protein, 392 aa, Homo sapiens
MATAAQGPLSLLWGWLWSERFWLPENVSWADLEGPADGYGYPRGRHILSVFPLAAGIFFVRLLFERFIAKPCALCIGIEDSGPYQAQPNAILEKVFISITKYPDKKRLEGLSKQLDWNVRKIQCWFRHRRNQDKPPTLTKFCESMWRFTFYLCIFCYGIRFLWSSPWFWDIRQCWHNYPFQPLSSGLYHYYIMELAFYWSLMFSQFTDIKRKDFLIMFVHHLVTIGLISFSYINNMVRVGTLIMCLHDVSDFLLEAAKLANYAKYQRLCDTLFVIFSAVFMVTRLGIYPFWILNTTLFESWEIIGPYASWWLLNGLLLTLQLLHVIWSYLIARIALKALIRGKVSKDDRSDVESSSEEEDVTTCTKSPCDSSSSNGANRVNGHMGGSYWAEE

SEQ ID NO: 5612 - protein, 455 aa, Homo sapiens
MSLTVVSMACVGFFLLQGAWPLMGGQDKPFLSARPSTVVPRGGHVALQCHYRRGFNNFMLYKEDRSHVPIFHGRIFQESFIMGPVTPAHAGTYRCRGSRPHSLTGWSAPSNPLVIMVTGNHRKPSLLAHPGPLLKSGETVILQCWSDVMFEHFFLHREGISEDPSRLVGQIHDGVSKANFSIGPLMPVLAGTYRCYGSVPHSPYQLSAPSDPLDIVITGLYEKPSLSAQPGPTVQAGENVTLSCSSWSSYDIYHLSREGEAHERRLRAVPKVNRTFQADFPLGPATHGGTYRCFGSFRALPCVWSNSSDPLLVSVTGNPSSSWPSPTEPSSKSGICRHLHVLIGTSVVIFLFILLLFFLLYRWCSNKKNAAVMDQEPAGDRTVNRQDSDEQDPQEVTYAQLDHCVFIQRKISRPSQRPKTPLTDTSVYTELPNAEPRSKVVSCPRAPQSGLEGVF

SEQ ID NO: 5613 - protein, 354 aa, Homo sapiens
MRARPQVCEALLFALALQTGVCYGIKWLALSKTPSALALNQTQHCKQLEGLVSAQVQLCRSNLELMHTVVHAAREVMKACRRAFADMRWNCSSIELAPNYLLDLERGTRESAFVYALSAAAISHAIARACTSGDLPGCSCGPVPGEPPGPGNRWGGCADNLSYGLLMGAKFSDAPMKVKKTGSQANKLMRLHNSEVGRQALRASLEMKCKCHGVSGSCSIRTCWKGLQELQDVAADLKTRYLSATKVVHRPMGTRKHLVPKDLDIRPVKDSELVYLQSSPDFCMKNEKVGSHGTQDRQCNKTSNGSDSCDLMCCGRGYNPYTDRVVERCHCKYHWCCYVTCRRCERTVERYVCK

SEQ ID NO: 5614 - protein, 2871 aa, Homo sapiens
MRRGRLLEIALGFTVLLASYTSHGADANLEAGNVKETRASRAKRRGGGGHDALKGPNVCGSRYNAYCCPGWKTLPGGNQCIVPICRHSCGDGFCSRPNMCTCPSGQIAPSCGSRSIQHCNIRCMNGGSCSDDHCLCQKGYIGTHCGQPVCESGCLNGGRCVAPNRCACTYGFTGPQCERDYRTGPCFTVISNQMCQGQLSGIVCTKTLCCATVGRAWGHPCEMCPAQPHPCRRGFIPNIRTGACQDVDECQAIPGLCQGGNCINTVGSFECKCPAGHKLNEVSQKCEDIDECSTIPGICEGGECTNTVSSYFCKCPPGFYTSPDGTRCIDVRPGYCYTALTNGRCSNQLPQSITKMQCCCDAGRCWSPGVTVAPEMCPIRATEDFNKLCSVPMVIPGRPEYPPPPLGPIPPVLPVPPGFPPGPQIPVPRPPVEYLYPSREPPRVLPVNVTDYCQLVRYLCQNGRCIPTPGSYRCECNKGFQLDLRGECIDVDECEKNPCAGGECINNQGSYTCQCRAGYQSTLTRTECRDIDECLQNGRICNNGRCINTDGSFHCVCNAGFHVTRDGKNCEDMDECSIRNMCLNGMCINEDGSFKCICKPGFQLASDGRYCKDINECETPGICMNGRCVNTDGSYRCECFPGLAVGLDGRVCVDTHMRSTCYGGYKRGQCIKPLFGAVTKSECCCASTEYAFGEPCQPCPAQNSAEYQALCSSGPGMTSAGSDINECALDPDICPNGICENLRGTYKCICNSGYEVDSTGKNCVDINECVLNSLLCDNGQCRNTPGSFVCTCPKGFIYKPDLKTCEDIDECESSPCINGVCKNSPGSFICECSSESTLDPTKTICIETIKGTCWQTVIDGRCEININGATLKSQCCSSLGAAWGSPCTLCQVDPICGKGYSRIKGTQCEDIDECEVFPGVCKNGLCVNTRGSFKCQCPSGMTLDATGRICLDIRLETCFLRYEDEECTLPIAGRHRMDACCCSVGAAWGTEECEECPMRNTPEYEELCPRGPGFATKEITNGKPFFKDINECKMIPSLCTHGKCRNTIGSFKCRCDSGFALDSEERNCTDIDECRISPDLCGRGQCVNTPGDFECKCDEGYESGFMMMKNCMDIDECQRDPLLCRGGVCHNTEGSYRCECPPGHQLSPNISACIDINECELSAHLCPNGRCVNLIGKYQCACNPGYHSTPDRLFCVDIDECSIMNGGCETFCTNSEGSYECSCQPGFALMPDQRSCTDIDECEDNPNICDGGQCTNIPGEYRCLCYDGFMASEDMKTCVDVNECDLNPNICLSGTCENTKGSFICHCDMGYSGKKGKTGCTDINECEIGAHNCGKHAVCTNTAGSFKCSCSPGWIGDGIKCTDLDECSNGTHMCSQHADCKNTMGSYRCLCKEGYTGDGFTCTDLDECSENLNLCGNGQCLNAPGGYRCECDMGFVPSADGKACEDIDECSLPNICVFGTCHNLPGLFRCECEIGYELDRSGGNCTDVNECLDPTTCISGNCVNTPGSYICDCPPDFELNPTRVGCVDTRSGNCYLDIRPRGDNGDTACSNEIGVGVSKASCCCSLGKAWGTPCEMCPAVNTSEYKILCPGGEGFRPNPITVILEDIDECQELPGLCQGGKCINTFGSFQCRCPTGYYLNEDTRVCDDVNECETPGICGPGTCYNTVGNYTCICPPDYMQVNGGNNCMDMRRSLCYRNYYADNQTCDGELLFNMTKKMCCCSYNIGRAWNKPCEQCPIPSTDEFATLCGSQRPGFVIDIYTGLPVDIDECREIPGVCENGVCINMVGSFRCECPVGFFYNDKLLVCEDIDECQNGPVCQRNAECINTAGSYRCDCKPGYRFTSTGQCNDRNECQEIPNICSHGQCIDTVGSFYCLCHTGFKTNDDQTMCLDINECERDACGNGTCRNTIGSFNCRCNHGFILSHNNDCIDVDECASGNGNLCRNGQCINTVGSFQCQCNEGYEVAPDGRTCVDINECLLEPRKCAPGTCQNLDGSYRCICPPGYSLQNEKCEDIDECVEEPEICALGTCSNTEGSFKCLCPEGFSLSSSGRRCQDLRMSYCYAKFEGGKCSSPKSRNHSKQECCCALKGEGWGDPCELCPTEPDEAFRQICPYGSGIIVGPDDSAVDMDECKEPDVCKHGQCINTDGSYRCECPFGYILAGNECVDTDECSVGNPCGNGTCKNVIGGFECTCEEGFEPGPMMTCEDINECAQNPLLCAFRCVNTYGSYECKCPVGYVLREDRRMCKDEDECEEGKHDCTEKQMECKNLIGTYMCICGPGYQRRPDGEGCVDENECQTKPGICENGRCLNTRGSYTCECNDGFTASPNQDECLDNREGYCFTEVLQNMCQIGSSNRNPVTKSECCCDGGRGWGPHCEICPFQGTVAFKKLCPHGRGFMTNGADIDECKVIHDVCRNGECVNDRGSYHCICKTGYTPDITGTSCVDLNECNQAPKPCNFICKNTEGSYQCSCPKGYILQEDGRSCKDLDECATKQHNCQFLCVNTIGGFTCKCPPGFTQHHTSCIDNNECTSDINLCGSKGICQNTPGSFTCECQRGFSLDQTGSSCEDVDECEGNHRCQHGCQNIIGGYRCSCPQGYLQHYQWNQCVDENECLSAHICGGASCHNTLGSYKCMCPAGFQYEQFSGGCQDINECGSAQAPCSYGCSNTEGGYLCGCPPGYFRIGQGHCVSGMGMGRGNPEPPVSGEMDDNSLSPEACYECKINGYPKRGRKRRSTNETDASNIEDQSETEANVSLASWDVEKTAIFAFNISHVSNKVRILELLPALTTLTNHNRYLIESGNEDGFFKINQKEGISYLHFTKKKPVAGTYSLQISSTPLYKKKELNQLEDKYDKDYLSGELGDNLKMKIQVLLH

SEQ ID NO: 5615 - protein, 475 aa, Homo sapiens
MAALTTLFKYIDENQDRYIKKLAKWVAIQSVSAWPEKRGEIRRMMEVAAADVKQLGGSVELVDIGKQKLPDGSEIPLPPILLGRLGSDPQKKTVCIYGHLDVQPAALEDGWDSEPFTLVERDGKLYGRGSTDDKGPVAGWINALEAYQKTGQEIPVNVRFCLEGMEESGSEGLDELIFARKDTFFKDVDYVCISDNYWLGKKKPCITYGLRGICYFFIEVECSNKDLHSGVYGGSVHEAMTDLILLMGSLVDKRGNILIPGINEAVAAVTEEEHKLYDDIDFDIEEFAKDVGAQILLHSHKKDILMHRWRYPSLSLHGIEGAFSGSGAKTVIPRKVVGKFSIRLVPNMTPEVVGEQVTSYLTKKFAELRSPNEFKVYMGHGGKPWVSDFSHPHYLAGRRAMKTVFGVEPDLTREGGSIPVTLTFQEATGKNVMLLPVGSADDGAHSQNEKLNRYNYIEGTKMLAAYLYEVSQLKD

SEQ ID NO: 5616 - protein, 78 aa, Homo sapiens
MSESELGRKWDRCLADAVVKIGTGFGLGIVFSLTFFKRRMWPLAFGSGMGLGMAYSNCQHDFQAPYLLHGKYVKEQEQ

SEQ ID NO: 5617 - protein, 134 aa, Homo sapiens
MSPLRPLLLALALASVPCAQGACPASADLKHSDGTRTCAKLYDKSDPYYENCCGGAELSLESGADLPYLPSNWANTASSLVVAPRCELTVWSRQGKAGKTHKFSAGTYPRLEEYRRGILGDWSNAISALYCRCS

SEQ ID NO: 5618 - protein, 708 aa, Homo sapiens
MADREGGCAAGRGRELEPELEPGPGPGSALEPGEEFEIVDRSQLPGPGDLRSATRPRAAEGWSAPILTLARRATGNLSASCGSALRAAAGLGGGDSGDGTARAASKCQMMEERANLMHMMKLSIKVLLQSALSLGRSLDADHAPLQQFFVVMEHCLKHGLKVKKSFIGQNKSFFGPLELVEKLCPEASDIATSVRNLPELKTAVGRGRAWLYLALMQKKLADYLKVLIDNKHLLSEFYEPEALMMEEEGMVIVGLLVGLNVLDANLCLKGEDLDSQVGVIDFSLYLKDVQDLDGGKEHERITDVLDQKNYVEELNRHLSCTVGDLQTKIDGLEKTNSKLQEELSAATDRICSLQEEQQQLREQNELIRERSEKSVEITKQDTKVELETYKQTRQGLDEMYSDVWKQLKEEKKVRLELEKELELQIGMKTEMEIAMKLLEKDTHEKQDTLVALRQQLEEVKAINLQMFHKAQNAESSLQQKNEAITSFEGKTNQVMSSMKQMEERLQHSERARQGAEERSHKLQQELGGRIGALQLQLSQLHEQCSSLEKELKSEKEQRQALQRELQHEKDTSSLLRMELQQVEGLKKELRELQDEKAELQKICEEQEQALQEMGLHLSQSKLKMEDIKEVNQALKGHAWLKDDEATHCRQCEKEFSISRRKHHCRNCGHIFCNTCSSNELALPSYPKPVRVCDSCHTLLLQRCSSTAS

SEQ ID NO: 5619 - protein, 1018 aa, Homo sapiens
MKMWLLVSHLVIISITTCLAEFTWYRRYGHGVSEEDKGFGPIFEEQPINTIYPEESLEGKVSLNCRARASPFPVYKWRMNNGDVDLTSDRYSMVGGNLVINNPDKQKDAGIYYCLASNNYGMVRSTEATLSFGYLDPFPPEERPEVRVKEGKGMVLLCDPPYHFPDDLSYRWLLNEFPVFITMDKRRFVSQTNGNLYIANVEASDKGNYSCFVSSPSITKSVFSKFIPLIPIPERTTKPYPADIVVQFKDVYALMGQNVTLECFALGNPVPDIRWRKVLEPMPSTAEISTSGAVLKIFNIQLEDEGIYECEAENIRGKDKHQARIYVQAFPEWVEHINDTEVDIGSDLYWPCVATGKPIPTIRWLKNGYAYHKGELRLYDVTFENAGMYQCIAENTYGAIYANAELKILALAPTFEMNPMKKKILAAKGGRVIIECKPKAAPKPKFSWSKGTEWLVNSSRILIWEDGSLEINNITRNDGGIYTCFAENNRGKANSTGTLVITDPTRIILAPINADITVGENATMQCAASFDPALDLTFVWSFNGYVIDFNKENIHYQRNFMLDSNGELLIRNAQLKHAGRYTCTAQTIVDNSSASADLVVRGPPGPPGGLRIEDIRATSVALTWSRGSDNHSPISKYTIQTKTILSDDWKDAKTDPPIIEGNMEAARAVDLIPWMEYEFRVVATNTLGRGEPSIPSNRIKTDGAAPNVAPSDVGGGGGRNRELTITWAPLSREYHYGNNFGYIVAFKPFDGEEWKKVTVTNPDTGRYVHKDETMSPSTAFQVKVKAFNNKGDGPYSLVAVINSAQDAPSEAPTEVGVKVLSSSEISVHWEHVLEKIVESYQIRYWAAHDKEEAANRVQVTSQEYSARLENLLPDTQYFIEVGACNSAGCGPPSDMIEAFTKKAPPSQPPRIISSVRSGSRYIITWDHVVALSNESTVTGYKVLYRPDGQHDGKLYSTHKHSIEVPIPRDGEYVVEVRAHSDGGDGVVSQVKISGAPTLSPSLLGLLLPAFGILVYLEF

SEQ ID NO: 5620 - protein, 718 aa, Homo sapiens
MIVDKLLDDSRGGEGLRDAAGGCGLMTSPLNLSYFYGASPPAAAPGACDASCSVLGPSAPGSPGSDSSDFSSASSVSSCGAVESRSRGGARAERQPVEPHMGVGRQQRGPFQGVRVKNSVKELLLHIRSHKQKASGQAVDDFKTQGVNIEQFRELKNTVSYSGKRKGPDSLSDGPACKRPALLHSQFLTPPQTPTPGESMEDVHLNEPKQESSADLLQNIINIKNECSPVSLNTVQVSWLNPVVVPQSSPAEQCQDFHGGQVFSPPQKCQPFQVRGSQQMIDQASLYQYSPQNQHVEQQPHYTHKPTLEYSPFPIPPQSPAYEPNLFDGPESQFCPNQSLVSLLGDQRESENIANPMQTSSSVQQQNDAHLHSFSMMPSSACEAMVGHEMASDSSNTSLPFSNMGNPMNTTQLGKSLFQWQVEQEESKLANISQDQFLSKDADGDTFLHIAVAQGRRALSYVLARKMNALHMLDIKEHNGQSAFQVAVAANQHLIVQDLVNIGAQVNTTDCWGRTPLHVCAEKGHSQVLQAIQKGAVGSNQFVDLEATNYDGLTPLHCAVIAHNAVVHELQRNQQPHSPEVQELLLKNKSLVDTIKCLIQMGAAVEAKDRKSGRTALHLAAEEANLELIRLFLELPSCLSFVNAKAYNGNTALHVAASLQYRLTQLDAVRLLMRKGADPSTRNLENEQPVHLVPDGPVGEQIRRILKGKSIQQRAPPY

SEQ ID NO: 5621 - protein, 577 aa, Homo sapiens
MAEAATGFLEQLKSCIVWSWTYLWTVWFFIVLFLVYILRVPLKINDNLSTVSMFLNTLTPKFYVALTGTSSLISGLILIFEWWYFRKYGTSFIEQVSVSHLRPLLGGVDNNSSNNSNSSNGDSDSNRQSVSECKVWRNPLNLFRGAEYNRYTWVTGREPLTYYDMNLSAQDHQTFFTCDSDHLRPADAIMQKAWRERNPQARISAAHEALEINEIRSRVEVPLIASSTIWEIKLLPKCATAYILLAEEEATTIAEAEKLFKQALKAGDGCYRRSQQLQHHGSQYEAQHRRDTNVLVYIKRRLAMCARRLGRTREAVKMMRDLMKEFPLLSMFNIHENLLEALLELQAYADVQAVLAKYDDISLPKSATICYTAALLKARAVSDKFSPEAASRRGLSTAEMNAVEAIHRAVEFNPHVPKYLLEMKSLILPPEHILKRGDSEAIAYAFFHLAHWKRVEGALNLLHCTWEGTFRMIPYPLEKGHLFYPYPICTETADRELLPSFHEVSVYPKKELPFFILFTAGLCSFTAMLALLTHQFPELMGVFAKAFLSTLFAPLNFVMEKVESILPSSLWHQLTRI

SEQ ID NO: 5622 - protein, 608 aa, Homo sapiens
MAAAAAAVGPGAGGAGSAVPGGAGPCATVSVFPGARLLTIGDANGEIQRHAEQQALRLEVRAGPDSAGIALYSHEDVCVFKCSVSRETECSRVGKQSFIITLGCNSVLIQFATPNDFCSFYNILKTCRGHTLERSVFSERTEESSAVQYFQFYGYLSQQQNMMQDYVRTGTYQRAILQNHTDFKDKIVLDVGCGSGILSFFAAQAGARKIYAVEASTMAQHAEVLVKSNNLTDRIVVIPGKVEEVSLPEQVDIIISEPMGYMLFNERMLESYLHAKKYLKPSGNMFPTIGDVHLAPFTDEQLYMEQFTKANFWYQPSFHGVDLSALRGAAVDEYFRQPVVDTFDIRILMAKSVKYTVNFLEAKEGDLHRIEIPFKFHMLHSGLVHGLAFWFDVAFIGSIMTVWLSTAPTEPLTHWYQVRCLFQSPLFAKAGDTLSGTCLLIANKRQSYDISIVAQVDQTGSKSSNLLDLKNPFFRYTGTTPSPPPGSHYTSPSENMWNTGSTYNLSSGMAVAGMPTAYDLSSVIASGSSVGHNNLIPLANTGIVNHTHSRMGSIMSTGIVQGSSGAQGSGGGSTSAHYAVNSQFTMGGPAISMASPMSIPTNTMHYGS

SEQ ID NO: 5623 - protein, 464 aa, Homo sapiens
MDFSRNLYDIGEQLDSEDLASLKFLSLDYIPQRKQEPIKDALMLFQRLQEKRMLEESNLSFLKELLFRINRLDLLITYLNTRKEEMERELQTPGRAQISAYRVMLYQISEEVSRSELRSFKFLLQEEISKCKLDDDMNLLDIFIEMEKRVILGEGKLDILKRVCAQINKSLLKIINDYEEFSKGEELCGVMTISDSPREQDSESQTLDKVYQMKSKPRGYCLIINNHNFAKAREKVPKLHSIRDRNGTHLDAGALTTTFEELHFEIKPHDDCTVEQIYEILKIYQLMDHSNMDCFICCILSHGDKGIIYGTDGQEAPIYELTSQFTGLKCPSLAGKPKVFFIQACQGDNYQKGIPVETDSEEQPYLEMDLSSPQTRYIPDEADFLLGMATVNNCVSYRNPAEGTWYIQSLCQSLRERCPRGDDILTILTEVNYEVSNKDDKKNMGKQMPQPTFTLRKKLVFPSD

SEQ ID NO: 5624 - protein, 426 aa, Homo sapiens
MAHLRGFANQHSRVDPEELFTKLDRIGKGSFGEVYKGIDNHTKEVVAIKIIDLEEAEDEIEDIQQEITVLSQCDSPYITRYFGSYLKSTKLWIIMEYLGGGSALDLLKPGPLEETYIATILREILKGLDYLHSERKIHRDIKAANVLLSEQGDVKLADFGVAGQLTDTQIKRNTFVGTPFWMAPEVIKQSAYDFKADIWSLGITAIELAKGEPPNSDLHPMRVLFLIPKNSPPTLEGQHSKPFKEFVEACLNKDPRFRPTAKELLKHKFITRYTKKTSFLTELIDRYKRWKSEGHGEESSSEDSDIDGEAEDGEQGPIWTFPPTIRPSPHSKLHKGTALHSSQKPAEPVKRQPRSQCLSTLVRPVFGELKEKHKQSGGSVGALEELENAFSLAEESCPGISDKLMVHLVERVQRFSHNRNHLTSTR

SEQ ID NO: 5625 - protein, 391 aa, Homo sapiens
MAALTTLFKYIDENQDRYIKKLAKWVAIQSVSAWPEKRGEIRRMMEVAAADVKQLGGSVELVDIGKQKEIPVNVRFCLEGMEESGSEGLDELIFARKDTFFKDVDYVCISDNYWLGKKKPCITYGLRGICYFFIEVECSNKDLHSGVYGGSVHEAMTDLILLMGSLVDKRGNILIPGINEAVAAVTEEEHKLYDDIDFDIEEFAKDVGAQILLHSHKKDILMHRWRYPSLSLHGIEGAFSGSGAKTVIPRKVVGKFSIRLVPNMTPEVVGEQVTSYLTKKFAELRSPNEFKVYMGHGGKPWVSDFSHPHYLAGRRAMKTVFGVEPDLTREGGSIPVTLTFQEATGKNVMLLPVGSADDGAHSQNEKLNRYNYIEGTKMLAAYLYEVSQLKD

SEQ ID NO: 5626 - protein, 1117 aa, Homo sapiens
MKKASRSVGSVPKVSAISKTQTAEKIKPENSSSASTGGKLVKPGTAASLSKTKSSDDLLAGMAGGVTVTNGVKGKKSTCPSAAPSASAPAMTTVENKSKISTGTASSTKRSTSTGNKESSSTRERLRERTRLNQSKKLPSAGQGANDMALAKRSRSRTATECDVRMSKSKSDNQISDRAALEAKVKDLLTLAKTKDVEILHLRNELRDMRAQLGINEDHSEGDEKSEKETIMAHQPTDVESTLLQLQEQNTAIREELNQLKNENRMLKDRLNALGFSLEQRLDNSEKLFGYQSLSPEITPGNQSDGGGTLTSSVEGSAPGSVEDLLSQDENTLMDHQHSNSMDNLDSECSEVYQPLTSSDDALDAPSSSESEGIPSIERSRKGSSGNASEVSVACLTERIHQMEENQHSTSEELQATLQELADLQQITQELNSENERLGEEKVILMESLCQQSDKLEHFSRQIEYFRSLLDEHHISYVIDEDVKSGRYMELEQRYMDLAENARFEREQLLGVQQHLSNTLKMAEQDNKEAQEMIGALKERSHHMERIIESEQKGKAALAATLEEYKATVASDQIEMNRLKAQLENEKQKVAELYSIHNSGDKSDIQDLLESVRLDKEKAETLASSLQEDLAHTRNDANRLQDAIAKVEDEYRAFQEEAKKQIEDLNMTLEKLRSDLDEKETERSDMKETIFELEDEVEQHRAVKLHDNLIISDLENTVKKLQDQKHDMEREIKTLHRRLREESAEWRQFQADLQTAVVIANDIKSEAQEEIGDLKRRLHEAQEKNEKLTKELEEIKSRKQEEERGRVYNYMNAVERDLAALRQGMGLSRRSSTSSEPTPTVKTLIKSFDSASQVPNPAAAAIPRTPLSPSPMKTPPAAAVSPMQRHSISGPISTSKPLTALSDKRPNYGEIPVQEHLLRTSSASRPASLPRVPAMESAKTLSVSRRSSEEVKRDISAQEGASPASLMAMGTTSPQLSLSSSPTASVTPTTRSRIREERKDPLSALAREYGGSKRNALLKWCQKKTEGYQNIDITNFSSSWNDGLAFCALLHTYLPAHIPYQELNSQDKRRNFMLAFQAAESVGIKSTLDINEMVRTERPDWQNVMLYVTAIYKYFET

SEQ ID NO: 5627 - protein, 238 aa, Homo sapiens
MLGSPCLLWLLAVTFLVPRAQPLAPQDFEEEEADETETAWPPLPAVPCDYDHCRHLQVPCKELQRVGPAACLCPGLSSPAQPPDPPRMGEVRIAAEEGRAVVHWCAPFSPVLHYWLLLWDGSEAAQKGPPLNATVRRAELKGLKPGGIYVVCVVAANEAGASRVPQAGGEGLEGADIPAFGPCSRLAVPPNPRTLVHAAVGVGTALALLSCAALVWHFCLRDRWGCPRRAAARAAGAL

SEQ ID NO: 5628 - protein, 2357 aa, Homo sapiens
MQPPPQTVPSGMAGPPPAGNPRSVFWASSPYRRRANNNAAVAPTTCPLQPVTDPFAFSRQALQSTPLGSSSKSSPPVLQGPAPAGFSQHPGLLVPHTHARDSSQGPCEPLPGPLTQPRAHASPFSGALTPSAPPGPEMNRSAEVGPSSEPEVQTLPYLPHYIPGVDPETSHGGHPHGNMPGLDRPLSRQNPHDGVVTPAASPSLPQPGLQMPGQWGPVQGGPQPSGQHRSPCPEGPVPSGVPCATSVPHFPTPSILHQGPGHEQHSPLVAPPAALPSDGRDEVSHLQSGSHLANNSDPESTFRQNPRIVNHWASPELRQNPGVKNEHRPASALVNPLARGDSPENRTHHPLGAGAGSGCAPLEADSGASGALAMFFQGGETENEENLSSEKAGLSGQADFDDFCSSPGLGRPPAPTHVGAGSLCQALLPGPSNEAAGDVWGDTASTGVPDASGSQYENVENLEFVQNQEVLPSEPLNLDPSSPSDQFRYGPLPGPAVPRHGAVCHTGAPDATLHTVHPDSVSSSYSSRSHGRLSGSARPQELVGTFIQQEVGKPEDEASGSFFKQIDSSPVGGETDETTVSQNYRGSVSQPSTPSPPKPTGIFQTSANSSFEPVKSHLVGVKPFEADRANVVGEVRETCVRQKQCRPAAALPDASPGNLEQPPDNMETLCAPQVCPLPLNSTTEAVHMLPHAGAPPLDTVYPAPEKRPSARTQGPVKCESPATTLWAQSELPDFGGNVLLAPAAPALYVCAKPQPPVVQPPEEAMSGQQSRNPSSAAPVQSRGGIGASENLENPPKMGEEEALQSQASSGYASLLSSPPTESLQNPPVLIAQPDHSYNLAQPINFSVSLSNSHEKNQSWREALVGDRPAVSSWALGGDSGENTSLSGIPTSSVLSLSLPSSVAQSNFPQGSGASEMVSNQPANLLVQPPSQPVPENLVPESQKDRKAGSALPGFANSPAGSTSVVLVPPAHGTLVPDGNKANHSSHQEDTYGALDFTLSRTLENPVNVYNPSHSDSLASQQSVASHPRQSGPGAPNLDRFYQQVTKDAQGQPGLERAQQELVPPQQQASPPQLPKAMFSELSNPESLPAQGQAQNSAQSPASLVLVDAGQQLPPRPPQSSSVSLVSSGSGQAAVPSEQPWPQPVPALAPGPPPQDLAAYYYYRPLYDAYQPQYSLPYPPEPGAASLYYQDVYSLYEPRYRPYDGAASAYAQNYRYPEPERPSSRASHSSERPPPRQGYPEGYYSSKSGWSSQSDYYASYYSSQYDYGDPGHWDRYHYSARVRDPRTYDRRYWCDAEYDAYRREHSAFGDRPEKRDNNWRYDPRFTGSFDDDPDPHRDPYGEEVDRRSVHSEHSARSLHSAHSLASRRSSLSSHSHQSQIYRSHNVAAGSYEAPLPPGSFHGDFAYGTYRSNFSSGPGFPEYGYPADTVWPAMEQVSSRPTSPEKFSVPHVCARFGPGGQLIKVIPNLPSEGQPALVEVHSMEALLQHTSEQEEMRAFPGPLAKDDTHKVDVINFAQNKAMKCLQNENLIDKESASLLWNFIVLLCRQNGTVVGTDIAELLLRDHRTVWLPGKSPNEANLIDFTNEAVEQVEEEESGEAQLSFLTGGPAAAASSLERETERFRELLLYGRKKDALESAMKNGLWGHALLLASKMDSRTHARVMTRFANSLPINDPLQTVYQLMSGRMPAASTCCGDEKWGDWRPHLAMVLSNLNNNMDVESRTMATMGDTLASRGLLDAAHFCYLMAQAGFGVYTKKTTKLVLIGSNHSLPFLKFATNEAIQRTEAYEYAQSLGAETCPLPSFQVFKFIYSCRLAEMGLATQAFHYCEAIAKSILTQPHLYSPVLISQLVQMASQLRLFDPQLKEKPEEESLAAPTWLVHLQQVERQIKEGAGVWHQDGALPQQCPGTPSSEMEQLDRPGLSQPGALGIANPLLAVPAPSPEHSSPSVRLLPSAPQTLPDGPLASPARVPMFPVPLPPGPLEPGPGCVTPGPALGFLEPSGPGLPPGVPPLQERRHLLQEARSPDPGIVPQEAPVGNSLSELSEENFDGKFANLTPSRTVPDSEAPPGWDRADSGPTQPPLSLSPAPETKRPGQAAKKETKEPKKGESWFFRWLPGKKKTEAYLPDDKNKSIVWDEKKNQWVNLNEPEEEKKAPPPPPTSMPKTVQAAPPALPGPPGAPVNMYSRRAAGTRARYVDVLNPSGTQRSEPALAPADFVAPLAPLPIPSNLFVPTPDAEEPQLPDGTGREGPAAARGLANPEPAPEPKVLSSAASLPGSELPSSRPEGSQGGELSRCSSMSSLSREVSQHFNQAPGDLPAAGGPPSGAMPFYNPAQLAQACATSGSSRLGRIGQRKHLVLN

SEQ ID NO: 5629 - protein, 198 aa, Homo sapiens
MPEQSNDYRVVVFGAGGVGKSSLVLRFVKGTFRDTYIPTIEDTYRQVISCDKSVCTLQITDTTGSHQFPAMQRLSISKGHAFILVFSVTSKQSLEELGPIYKLIVQIKGSVEDIPVMLVGNKCDETQREVDTREAQAVAQEWKCAFMETSAKMNYNVKELFQELLTLETRRNMSLNIDGKRSGKQKRTDRVKGKCTLM

SEQ ID NO: 5630 - protein, 708 aa, Homo sapiens
MSTADALDDENTFKILVATDIHLGFMEKDAVRGNDTFVTLDEILRLAQENEVDFILLGGDLFHENKPSRKTLHTCLELLRKYCMGDRPVQFEILSDQSVNFGFSKFPWVNYQDGNLNISIPVFSIHGNHDDPTGADALCALDILSCAGFVNHFGRSMSVEKIDISPVLLQKGSTKIALYGLGSIPDERLYRMFVNKKVTMLRPKEDENSWFNLFVIHQNRSKHGSTNFIPEQFLDDFIDLVIWGHEHECKIAPTKNEQQLFYISQPGSSVVTSLSPGEAVKKHVGLLRIKGRKMNMHKIPLHTVRQFFMEDIVLANHPDIFNPDNPKVTQAIQSFCLEKIEEMLENAERERLGNSHQPEKPLVRLRVDYSGGFEPFSVLRFSQKFVDRVANPKDIIHFFRHREQKEKTGEEINFGKLITKPSEGTTLRVEDLVKQYFQTAEKNVQLSLLTERGMGEAVQEFVDKEEKDAIEELVKYQLEKTQRFLKERHIDALEDKIDEEVRRFRETRQKNTNEEDDEVREAMTRARALRSQSEESASAFSADDLMSIDLAEQMANDSDDSISAATNKGRGRGRGRRGGRGQNSASRGGSQRGRADTGLETSTRSRNSKTAVSASRNMSIIDAFKSTRQQPSRNVTTKNYSEVIEVDESDVEEDIFPTTSKTDQRWSSTSSSKIMSQSQVSKGVDFESSEDDDDDPFMNTSSLRRNRR

SEQ ID NO: 5631 - protein, 724 aa, Homo sapiens
MPEEVHHGEEEVETFAFQAEIAQLMSLIINTFYSNKEIFLRELISNASDALDKIRYESLTDPSKLDSGKELKIDIIPNPQERTLTLVDTGIGMTKADLINNLGTIAKSGTKAFMEALQAGADISMIGQFGVGFYSAYLVAEKVVVITKHNDDEQYAWESSAGGSFTVRADHGEPIGRGTKVILHLKEDQTEYLEERRVKEVVKKHSQFIGYPITLYLEKEREKEISDDEAEEEKGEKEEEDKDDEEKPKIEDVGSDEEDDSGKDKKKKTKKIKEKYIDQEELNKTKPIWTRNPDDITQEEYGEFYKSLTNDWEDHLAVKHFSVEGQLEFRALLFIPRRAPFDLFENKKKKNNIKLYVRRVFIMDSCDELIPEYLNFIRGVVDSEDLPLNISREMLQQSKILKVIRKNIVKKCLELFSELAEDKENYKKFYEAFSKNLKLGIHEDSTNRRRLSELLRYHTSQSGDEMTSLSEYVSRMKETQKSIYYITGESKEQVANSAFVERVRKRGFEVVYMTEPIDEYCVQQLKEFDGKSLVSVTKEGLELPEDEEEKKKMEESKAKFENLCKLMKEILDKKVEKVTISNRLVSSPCCIVTSTYGWTANMERIMKAQALRDNSTMGYMMAKKHLEINPDHPIVETLRQKAEADKNDKAVKDLVVLLFETALLSSGFSLEDPQTHSNRIYRMIKLGLGIDEDEVAAEEPNAAVPDEIPPLEGDEDASRMEEVD

SEQ ID NO: 5632 - protein, 137 aa, Homo sapiens
MAATALLEAGLARVLFYPTLLYTLFRGKVPGRAHRDWYHRIDPTVLLGALPLRSLTRQLVQDENVRGVITMNEEYETRFLCNSSQVHKWSPEEAVRAIAKIRSYIHIRPGQLDVLKEFHKQITARATKDGTFVISKT

SEQ ID NO: 5633 - protein, 238 aa, Homo sapiens
MSRYGRYGGETKVYVGNLGTGAGKGELERAFSYYGPLRTVWIARNPPGFAFVEFEDPRDAEDAVRGLDGKVICGSRVRVELSTGMPRRSRFDRPPARRPFDPNDRCYECGEKGHYAYDCHRYSRRRRSRSRSRSHSRSRGRRYSRSRSRSRGRRSRSASPRRSRSISLRRSRSASLRRSRSGSIKGSRYFQSPSRSRSRSRSISRPRSSRSKSRSPSPKRSRSPSGSPRRSASPERMD

SEQ ID NO: 5634 - protein, 264 aa, Homo sapiens
MFVPCGESAPDLAGFTLLMPAVSVGNVGQLAMDLIISTLNMSKIGYFYTDCLVPMVGNNPYATTEGNSTELSINAEVYSLPSRKLVALQLRSIFIKYKSKPFCEKLLSWVKSSGCARVIVLSSSHSYQRNDLQLRSTPFRYLLTPSMQKSVQNKIKSLNWEEMEKSRCIPEIDDSEFCIRIPGGGITKTLYDESCSKEIQMAVLLKFVSEGDNIPDALGLVEYLNEWLQILKPLSDDPTVSASRWKIPSSWRLLFGSGLPPALF

SEQ ID NO: 5635 - protein, 690 aa, Homo sapiens [sequence omitted]

SEQ ID NO: 5636 - protein, 537 aa, Homo sapiens
MEPRAVAEAVETGEEDVIMEALRSYNQEHSQSFTFDDAQQEDRKRLAELLVSVLEQGLPPSHRVIWLQSVRILSRDRNCLDPFTSRQSLQALACYADISVSEGSVPESADMDVVLESLKCLCNLVLSSPVAQMLAAEARLVVKLTERVGLYRERSFPHDVQFFDLRLLFLLTALRTDVRQQLFQELKGVRLLTDTLELTLGVTPEGNPPPTLLPSQETERAMEILKVLFNITLDSIKGEVDEEDAALYRHLGTLLRHCVMIATAGDRTEEFHGHAVNLLGNLPLKCLDVLLTLEPHGDSTEFMGVNMDVIRALLIFLEKRLHKTHRLKESVAPVLSVLTECARMHRPARKFLKAQGWPPPQVLPPLRDVRTRPEVGEMLRNKLVRLMTHLDTDVKRVAAEFLFVLCSESVPRFIKYTGYGNAAGLLAARGLMAGGRPEGQYSEDEDTDTDEYKEAKASINPVTGRVEEKPPNPMEGMTEEQKEHEAMKLVTMFDKLSRNRVIQPMGMSPRGHLTSLQDAMCETMEQQLSSDPDSDPD

SEQ ID NO: 5637 - protein, 885 aa, Homo sapiens
MQEAIILLALLGAMSGGEALHLILLPATGNVAENSPPGTSVHKFSVKLSASLSPVIPGFPQIVNSNPLTEAFRVNWLSGTYFEVVTTGMEQLDFETGPNIFDLQIYVKDEVGVTDLQVLTVQVTDVNEPPQFQGNLAEGLHLYIVERANPGFIYQVEAFDPEDTSRNIPLSYFLISPPKSFRMSANGTLFSTTELDFEAGHRSFHLIVEVRDSGGLKASTELQVNIVNLNDEVPRFTSPTRVYTVLEELSPGTIVANITAEDPDDEGFPSHLLYSITTVSKYFMINQLTGTIQVAQRIDRDAGELRQNPTISLEVLVKDRPYGGQENRIQITFIVEDVNDNPATCQKFTFSIMVPERTAKGTLLLDLNKFCFDDDSEAPNNRFNFTMPSGVGSGSRFLQDPAGSGKIVLIGDLDYENPSNLAAGNKYTVIIQVQDVAPPYYKNNVYVYILTSPENEFPLIFDRPSYVFDVSERRPARTRVGQVRATDKDLPQSSLLYSISTGGASLQYPNVFWINPKTGELQLVTKVDCETTPIYILRIQATNNEDTSSVTVTVNILEENDEKPICTPNSYFLALPVDLKVGTNIQNFKLTCTDLDSSPRSFRYSIGPGNVNNHFTFSPNAGSNVTRLLLTSRFDYAGGFDKIWDYKLLVYVTDDNLMSDRKKAEALVETGTVTLSIKVIPHPTTIITTTPRPRVTYQVLRKNVYSPSAWYVPFVITLGSILLLGLLVYLVVLLAKAIHRHCPCKTGKNKEPLTKKGETKTAERDVVVETIQMNTIFDGEAIDPVTGETYEFNSKTGARKWKDPLTQMPKWKESSHQGAAPRRVTAGEGMGSLRSANWEEDELSGKAWAEDAGLGSRNEGGKLGNPKNRNPAFMNRAYPKPHPGK

SEQ ID NO: 5638 - protein, 201 aa, Homo sapiens
MAATALLEAGLARVLFYPTLLYTLFRGKVPGRAHRDWYHRIDPTVLLGALPLRSLTRQLVQDENVRGVITMNEEYETRFLCNSSQEWKRLGVEQLRLSTVDMTGIPTLDNLQKGVQFALKYQSLGQCVYVHCKAGRSRSATMVAAYLIQVHKWSPEEAVRAIAKIRSYIHIRPGQLDVLKEFHKQITARATKDGTFVISKT

SEQ ID NO: 5639 - protein, 1030 aa, Homo sapiens
MGAARGSPARPRRLPLLSVLLLPLLGGTQTAIVFIKQPSSQDALQGRRALLRCEVEAPGPVHVYWLLDGAPVQDTERRFAQGSSLSFAAVDRLQDSGTFQCVARDDVTGEEARSANASFNIKWIEAGPVVLKHPASEAEIQPQTQVTLRCHIDGHPRPTYQWFRDGTPLSDGQSNHTVSSKERNLTLRPAGPEHSGLYSCCAHSAFGQACSSQNFTLSIADESFARVVLAPQDVVVARYEEAMFHCQFSAQPPPSLQWLFEDETPITNRSRPPHLRRATVFANGSLLLTQVRPRNAGIYRCIGQGQRGPPIILEATLHLAEIEDMPLFEPRVFTAGSEERVTCLPPKGLPEPSVWWEHAGVRLPTHGRVYQKGHELVLANIAESDAGVYTCHAANLAGQRRQDVNITVATVPSWLKKPQDSQLEEGKPGYLDCLTQATPKPTVVWYRNQMLISEDSRFEVFKNGTLRINSVEVYDGTWYRCMSSTPAGSIEAQARVQVLDGSSLPEWVTDNAGTLHFARVTRDDAGNYTCIASNGPQGQIRAHVQLTVAVFITFKVEPERTTVYQGHTALLQCEAQGDPKPLIQWKGKDRILDPTKLGPRMHIFQNGSLVIHDVAPEDSGRYTCIAGNSCNIKHTEAPLYVVDKPVPEESEGPGSPPPYKMIQTIGLSVGAAVAYIIAVLGLMFYCKKRCKAKRLQKQPEGEEPEMECLNGGPLQNGQPSAEIQEEVALTSLGSGPAATNKRHSTSDKMHFPRSSLQPITTLGKSEFGEVFLAKAQGLEEGVAETLVLVKSLQSKDEQQQLDFRRELEMFGKLNHANVVRLLGLCREAEPHYMVLEYVDLGDLKQFLRISKSKDEKLKSQPLSTKQKVALCTQVALGMEHLSNNRFVHKDLAARNCLVSAQRQVKVSALGLSKDVYNSEYYHFRQAWVPLRWMSPEAILEGDFSTKSDVWAFGVLMWEVFTHGEMPHGGQADDEVLADLQAGKARLPQPEGCPSKLYRLMQRCWALSPKDRPSFSEIASALGDSTVDSKP

SEQ ID NO: 5640 - protein, 1014 aa, Homo sapiens
MGAARGSPARPRRLPLLSVLLLPLLGGTQTAIVFIKQPSSQDALQGRRALLRCEVEAPGPVHVYWLLDGAPVQDTERRFAQGSSLSFAAVDRLQDSGTFQCVARDDVTGEEARSANASFNIKWIEAGPVVLKHPASEAEIQPQTQVTLRCHIDGHPRPTYQWFRDGTPLSDGQSNHTVSSKERNLTLRPAGPEHSGLYSCCAHSAFGQACSSQNFTLSIADESFARVVLAPQDVVVARYEEAMFHCQFSAQPPPSLQWLFEDETPITNRSRPPHLRRATVFANGSLLLTQVRPRNAGIYRCIGQGQRGPPIILEATLHLAEIEDMPLFEPRVFTAGSEERVTCLPPKGLPEPSVWWEHAGVRLPTHGRVYQKGHELVLANIAESDAGVYTCHAANLAGQRRQDVNITVATVPSWLKKPQDSQLEEGKPGYLDCLTQATPKPTVVWYRNQMLISEDSRFEVFKNGTLRINSVEVYDGTWYRCMSSTPAGSIEAQARVQVLEKLKFTPPPQPQQCMEFDKEATVPCSATGREKPTIKWERADGSSLPEWVTDNAGTLHFARVTRDDAGNYTCIASNGPQGQIRAHVQLTVAVFITFKVEPERTTVYQGHTALLQCEAQGDPKPLIQWKDKPVPEESEGPGSPPPYKMIQTIGLSVGAAVAYIIAVLGLMFYCKKRCKAKRLQKQPEGEEPEMECLNGGPLQNGQPSAEIQEEVALTSLGSGPAATNKRHSTSDKMHFPRSSLQPITTLGKSEFGEVFLAKAQGLEEGVAETLVLVKSLQSKDEQQQLDFRRELEMFGKLNHANVVRLLGLCREAEPHYMVLEYVDLGDLKQFLRISKSKDEKLKSQPLSTKQKVALCTQVALGMEHLSNNRFVHKDLAARNCLVSAQRQVKVSALGLSKDVYNSEYYHFRQAWVPLRWMSPEAILEGDFSTKSDVWAFGVLMWEVFTHGEMPHGGQADDEVLADLQAGKARLPQPEGCPSKLYRLMQRCWALSPKDRPSFSEIASALGDSTVDSKP

SEQ ID NO: 5641 - protein, 341 aa, Homo sapiens
MSDSEKLNLDSIIGRLLEGSRVLTPHCAPVQGSRPGKNVQLTENEIRGLCLKSREIFLSQPILLELEAPLKICGDIHGQYYDLLRLFEYGGFPPESNYLFLGDYVDRGKQSLETICLLLAYKIKYPENFFLLRGNHECASINRIYGFYDECKRRYNIKLWKTFTDCFNCLPIAAIVDEKIFCCHGGLSPDLQSMEQIRRIMRPTDVPDQGLLCDLLWSDPDKDVQGWGENDRGVSFTFGAEVVAKFLHKHDLDLICRAHQVVEDGYEFFAKRQLVTLFSAPNYCGEFDNAGAMMSVDETLMCSFQILKPADKNKGKYGQFSGLNPGGRPITPPRNSAKAKK

SEQ ID NO: 5642 - protein, 57 aa, Homo sapiens
MPTGKQLADIGYKTFSTSMMLLTVYGGYLCSVRVYHYFQWRRAQRQAAEEQKTSGIM

SEQ ID NO: 5643 - protein, 415 aa, Homo sapiens
MGGHPQLRLVKALLLLGLNPVSASLQDQHCESLSLASNISGLQCNASVDLIGTCWPRSPAGQLVVRPCPAFFYGVRYNTTNNGYRECLANGSWAARVNYSECQEILNEEKKSKVHYHVAVIINYLGHCISLVALLVAFVLFLRLRSIRCLRNIIHWNLISAFILRNATWFVVQLTMSPEVHQSNVGWCRLVTAAYNYFHVTNFFWMFGEGCYLHTAIVLTYSTDRLRKWMFICIGWGVPFPIIVAWAIGKLYYDNEKCWFGKRPGVYTDYIYQGPMILVLLINFIFLFNIVRILMTKLRASTTSETIQYRKAVKATLVLLPLLGITYMLFFVNPGEDEVSRVVFIYFNSFLESFQGFFVSVFYCFLNSEVRSAIRKRWHRWQDKHSIRARVARAMSIPTSPTRVSFHSIKQSTAV

SEQ ID NO: 5644 - protein, 507 aa, Homo sapiens
MDGTETRQRRLDSCGKPGELGLPHPLSTGGLPVASEDGALRAPESQSVTPKPLETEPSRETTWSIGLQVTVPFMFAGLGLSWAGMLLDYFQHWPVFVEVKDLLTLVPPLVGLKGNLEMTLASRLSTAANTGQIDDPQEQHRVISSNLALIQVQATVVGLLAAVAALLLGVVSREEVDVAKVELLCASSVLTAFLAAFALGVLMVCIVIGARKLGVNPDNIATPIAASLGDLITLSILALVSSFFYRHKDSRYLTPLVCLSFAALTPVWVLIAKQSPPIVKILKFGWFPIILAMVISSFGGLILSKTVSKQQYKGMAIFTPVICGVGGNLVAIQTSRISTYLHMWSAPGVLPLQMKKFWPNPCSTFCTSEINSMSARVLLLLVVPGHLIFFYIIYLVEGQSVINSQTFVVLYLLAGLIQVTILLYLAEVMVRLTWHQALDPDNHCIPYLTGLGDLLGSSSVGHTAAVPRRCTASPGWGLIQPFICTQHLIVSLLSFYFPFCLLAKTSI

SEQ ID NO: 5645 - protein, 237 aa, Homo sapiens
MAMFRSLVASAQQRQPPAGPAGGDSGLEAQYTCPICLEVYHRPVAIGSCGHTFCGECLQPCLQVPSPLCPLCRLPFDPKKVDKATHVEKQLSSYKAPCRGCNKKVTLAKMRVHISSCLKVQEQMANCPKFVPVVPTSQPIPSNIPNRSTFACPYCGARNLDQQELVKHCVESHRSDPNRVVCPICSAMPWGDPSYKSANFLQHLLHRHKFSYDTFVDYSIDEEAAFQAALALSLSEN

SEQ ID NO: 5646 - protein, 206 aa, Homo sapiens
MEVDINGESRSTLTTLPFPGAEANSPGKAEAEKPRCSSTPCSPMRRTVSGYQILHMDSNYLVGFTTGEELLKLAQKCTGGEESKAEAMPSLRSKQLDAGLARSSRLYKTRSRYYQPYEIPAVNGRRRRRMPSSGDKCTKSLPYEPYKALHGPLPLCLLKGKRAHSKSLDYLNLDKMIKEPADTEVLQYQLQHLTLRGDRVFARNNT

SEQ ID NO: 5647 - protein, 738 aa, Homo sapiens
MTSDQDAKVVAEPQTQRVQEGKDSAHLMNGPISQTTSQTSSIPPLSQVPATKVSELNPNAEVWGAPVLHLEASSAADGVSAAWEEVAGHHADRGPQGSDANGDGDQGHENAALPDPQESDPADMNALALGPSEYDSLPENSETGGNESQPDSQEDPREVLKKTLEFCLSRENLASDMYLISQMDSDQYVPITTVANLDHIKKLSTDVDLIVEVLRSLPLVQVDEKGEKVRPNQNRCIVILREISESTPVEEVEALFKGDNLPKFINCEFAYNDNWFITFETEADAQQAYKYLREEVKTFQGKPIKARIKAKAIAINTFLPKNGFRPLDVSLYAQQRYATSFYFPPMYSPQQQFPLYSLITPQTWSATHSYLDPPLVTPFPNTGFINGFTSPAFKPAASPLTSLRQYPPRSRNPSKSHLRHAIPSAERGPGLLESPSIFNFTADRLINGVRSPQTRQAGQTRTRIQNPSAYAKREAGPGRVEPGSLESSPGLGRGRKNSFGYRKKREEKFTSSQTQSPTPPKPPSPSFELGLSSFPPLPGAAGNLKTEDLFENRLSSLIIGPSKERTLSADASVNTLPVVVSREPSVPASCAVSATYERSPSPAHLPDDPKVAEKQRETHSVDRLPSALTATACKSVQVNGAATELRKPSYAEICQRTSKEPPSSPLQPQKEQKPNTVGCGKEEKKLAEPAERYREPPALKSTPGAPRDQRRPAGGRPSPSAMGKRLSREQSTPPKSPQ

SEQ ID NO: 5648 - protein, 254 aa, Homo sapiens
MATAGNPWGWFLGYLILGVAGSLVSGSCSQIINGEDCSPHSQPWQAALVMENELFCSGVLVHPQWVLSAAHCFQNSYTIGLGLHSLEADQEPGSQMVEASLSVRHPEYNRPLLANDLMLIKLDESVSESDTIRSISIASQCPTAGNSCLVSGWGLLANGRMPTVLQCVNVSVVSEEVCSKLYDPLYHPSMFCAGGGQDQKDSCNGDSGGPLICNGYLQGLVSFGKAPCGQVGVPGVYTNLCKFTEWIEKTVQAS

SEQ ID NO: 5649 - protein, 363 aa, Homo sapiens
MWATCCNWFCLDGQPEEVPPPQGARMQAYSNPGYSSFPSPTGLEPSCKSCGAHFANTARKQTCLDCKKNFCMTCSSQVGNGPRLCLLCQRFRATAFQREELMKMKVKDLRDYLSLHDISTEMCREKEELVLLVLGQQPVISQEDRTRASTLSPDFPEQQAFLTQPHSSMVPPTSPNLPSSSAQATSVPPAQVQENQQANGHVSQDQEEPVYLESVARVPAEDETQSIDSEDSFVPGRRASLSDLTDLEDIEGLTVRQLKEILARNFVNYKGCCEKWELMERVTRLYKDQKGLQHLVSGAEDQNGGAVPSGLEENLCKICMDSPIDCVLLECGHMVTCTKCGKRMNECPICRQYVIRAVHVFRS

SEQ ID NO: 5650 - protein, 1053 aa, Homo sapiens
MSSEESYRAILRYLTNEREPYAPGTEGNVKRKIRKAAACYVVRGGTLYYQRRQRHRKTFAELEVVLQPERRRDLIEAAHLGPGGTHHTRHQTWHYLSKTYWWRGILKQVKDYIKQCSKCQEKLDRSRPISDVSEMLEELGLDLESGEESNESEDDLSNFTSSPTTASKPAKKKPVSKHELVFVDTKGVVKRSSPKHCQAVLKQLNEQRLSNQFCDVTLLIEGEEYKAHKSVLSANSEYFRDLFIEKGAVSSHEAVVDLSGFCKASFLPLLEFAYTSVLSFDFCSMADVAILARHLFMSEVLEICESVHKLMEEKQLTVYKKGEVQTVASTQDLRVQNGGTAPPVASSEGTTTSLPTELGDCEIVLLVNGELPEAEQNGEVGRQPEPQVSSEAESALSSVGCIADSHPEMESVDLITKNNQTELETSNNRENNTVSNIHPKLSKENVISSSPEDSGMGNDISAEDICAEDIPKHRQKVDQPLKDQENLVASTAKTDFGPDDDTYRSRLRQRSVNEGAYIRLHKGMEKKLQKRKAVPKSAVQQVAQKLVQRGKKMKQPKRDAKENTEEASHKCGECGMVFQRRYALIMHKLKHERARDYKCPLCKKQFQYSASLRAHLIRHTRKDAPSSSSSNSTSNEASGTSSEKGRTKREFICSICGRTLPKLYSLRIHMLKHTGVKPHACQVCGKTFIYKHGLKLHQSLHQSQKQFQCELCVKSFVTKRSLQEHMSIHTGESKYLCSVCGKSFHRGSGLSKHFKKHQPKPEVRGYHCTQCEKSFFEARDLRQHMNKHLGVKPFQCQFCDKCYSWKKDWYSHVKSHSVTEPYRCNICGKEFYEKALFRRHVKKATHGKKGRAKQNLERVCEKCGRKFTQLREYRRHMNNHEGVKPFECLTCGVAWADARSLKRHVRTHTGERPYVCPVCSEAYIDARTLRKHMTKFHRDYVPCKIMLEKDTLQFHNQGTQVAHAVSILTAGMQEQESSGPQELETVVVTGETMEALEAVAATEEYPSVSTLSDQSIMQVVNYVLAQQQGQKLSEVAEAIQTVKVEVAHISGGE

SEQ ID NO: 5651 - protein, 278 aa, Homo sapiens
MHKAGLLGLCARAWNSVRMASSGMTRRDPLANKVALVTASTDGIGFAIARRLAQDGAHVVVSSRKQQNVDQAVATLQGEGLSVTGTVCHVGKAEDRERLVATAVKLHGGIDILVSNAAVNPFFGSIMDVTEEVWDKTLDINVKAPALMTKAVVPEMEKRGGGSVVIVSSIAAFSPSPGFSPYNVSKTALLGLTKTLAIELAPRNIRVNCLAPGLIKTSFSRMLWMDKEKEESMKETLRIRRLGEPEDCAGIVSFLCSEDASYITGETVVVGGGTPSRL

SEQ ID NO: 5652 - protein, 914 aa, Homo sapiens
MEAAVKEEISLEDEAVDKNIFRDCNKIAFYRRQKQWLSKKSTYQALLDSVTTDEDSTRFQIINEASKVPLLAEIYGIEGNIFRLKINEETPLKPRFEVPDVLTSKPSTVRLISCSGDTGSLILADGKGDLKCHITANPFKVDLVSEEEVVISINSLGQLYFEHLQILHKQRAAKENEEETSVDTSQENQEDLGLWEEKFGKFVDIKANGPSSIGLDFSLHGFEHLYGIPQHAESHQLKNTGDGDAYRLYNLDVYGYQIYDKMGIYGSVPYLLAHKLGRTIGIFWLNASETLVEINTEPAVEYTLTQMGPVAAKQKVRSRTHVHWMSESGIIDVFLLTGPTPSDVFKQYSHLTGTQAMPPLFSLGYHQCRWNYEDEQDVKAVDAGFDEHDIPYDAMWLDIEHTEGKRYFTWDKNRFPNPKRMQELLRSKKRKLVVISDPHIKIDPDYSVYVKAKDQGFFVKNQEGEDFEGVCWPGLSSYLDFTNPKVREWYSSLFAFPVYQGSTDILFLWNDMNEPSVFRGPEQTMQKNAIHHGNWEHRELHNIYGFYHQMATAEGLIKRSKGKERPFVLTRSFFAGSQKYGAVWTGDNTAEWSNLKISIPMLLTLSITGISFCGADIGGFIGNPETELLVRWYQAGAYQPFFRGHATMNTKRREPWLFGEEHTRLIREAIRERYGLLPYWYSLFYHAHVASQPVMRPLWVEFPDELKTFDMEDEYMLGSALLVHPVTEPKATTVDVFLPGSNEVWYDYKTFAHWEGGCTVKIPVALDTIPVFQRGGSVIPIKTTVGKSTGWMTESSYGLRVALSTKGSSVGELYLDDGHSFQYLHQKQFLHRKFSFCSSVLINSFADQRGHYPSKCVVEKILVLGFRKEPSSVTTHSSDGKDQPVAFTYCAKTSILSLEKLSLNIATDWEVRII

SEQ ID NO: 5653 - protein, 610 aa, Homo sapiens
MQYSHHCEHLLERLNKQREAGFLCDCTIVIGEFQFKAHRNVLASFSEYFGAIYRSTSENNVFLDQSQVKADGFQKLLEFIYTGTLNLDSWNVKEIHQAADYLKVEEVVTKCKIKMEDFAFIANPSSTEISSITGNIELNQQTCLLTLRDYNNREKSEVSTDLIQANPKQGALAKKSSQTKKKKKAFNSPKTGQNKTVQYPSDILENASVELFLDANKLPTPVVEQVAQINDNSELELTSVVENTFPAQDIVHTVTVKRKRGKSQPNCALKEHSMSNIASVKSPYEAENSGEELDQRYSKAKPMCNTCGKVFSEASSLRRHMRIHKGVKPYVCHLCGKAFTQCNQLKTHVRTHTGEKPYKCELCDKGFAQKCQLVFHSRMHHGEEKPYKCDVCNLQFATSSNLKIHARKHSGEKPYVCDRCGQRFAQASTLTYHVRRHTGEKPYVCDTCGKAFAVSSSLITHSRKHTGEKPYICGICGKSFISSGELNKHFRSHTGERPFICELCGNSYTDIKNLKKHKTKVHSGADKTLDSSAEDHTLSEQDSIQKSPLSETMDVKPSDMTLPLALPLGTEDHHMLLPVTDTQSPTSDTLLRSTVNGYSEPQLIFLQQLY

SEQ ID NO: 5654 - protein, 1584 aa, Homo sapiens
MSKQVSLPEMIKDWTKEHVKKWVNEDLKINEQYGQILLSEEVTGLVLQELTEKDLVEMGLPWGPALLIKRSYNKLNSKSPESDNHDPGQLDNSKPSKTEHQKNPKHTKKEEENSMSSNIDYDPREIRDIKQEESILMKENVLDEVANAKHKKKGKLKPEQLTCMPYPFDQFHDSHRYIEHYTLQPETGALNLIDPIHEFKALTNTETATEVDIKMKFSNEVFRFASACMNSRTNGTIHFGVKDKPHGEIVGVKITSKAAFIDHFNVMIKKYFEESEINEAKKCIREPRFVEVLLQNNTPSDRFVIEVDTIPKHSICNDKYFYIQMQICKDKIWKQNQNLSLFVREGASSRDILANSKQRDVDFKAFLQNLKSLVASRKEAEEEYGMKAMKKESEGLKLVKLLIGNRDSLDNSYYDWYILVTNKCHPNQIKHLDFLKEIKWFAVLEFDPESMINGVVKAYKESRVANLHFPNQYEDKTTNMWEKISTLNLYQQPSWIFCNGRSDLKSETYKPLEPHLWQRERASEVRKLILFLTDENIMTRGKFLVVFLLLSSVESPGDPLIETFWAFYQALKGMENMLCISVNSHIYQRWKDLLQTRMKMEDELTNHSISTLNIELVNSTILKLKSVTRSSRRFLPARGSSSVILEKKKEDVLTALEILCENECTETDIEKDKSKFLEFKKSKEEHFYRGGKVSWWNFYFSSENYSSDFVKRDSYEKLKDLIHCWAESPKPIFAKIINLYHHPGCGGTTLAMHVLWDLKKNFRCAVLKNKTTDFAEIAEQVINLVTYRAKSHQDYIPVLLLVDDFEEQENVYFLQNAIHSVLAEKDLRYEKTLVIILNCMRSRNPDESAKLADSIALNYQLSSKEQRAFGAKLKEIEKQHKNCENFYSFMIMKSNFDETYIENVVRNILKGQDVDSKEAQLISFLALLSSYVTDSTISVSQCEIFLGIIYTSTPWEPESLEDKMGTYSTLLIKTEVAEYGRYTGVRIIHPLIALYCLKELERSYHLDKCQIALNILEENLFYDSGIGRDKFQHDVQTLLLTRQRKVYGDETDTLFSPLMEALQNKDIEKVLSAGSRRFPQNAFICQALARHFYIKEKDFNTALDWARQAKMKAPKNSYISDTLGQVYKSEIKWWLDGNKNCRSITVNDLTHLLEAAEKASRAFKESQRQTDSKNYETENWSPQKSQRRYDMYNTACFLGEIEVGLYTIQILQLTPFFHKENELSKKHMVQFLSGKWTIPPDPRNECYLALSKFTSHLKNLQSDLKRCFDFFIDYMVLLKMRYTQKEIAEIMLSKKVSRCFRKYTELFCHLDPCLLQSKESQLLQEENCRKKLEALRADRFAGLLEYLNPNYKDATTMESIVNEYAFLLQQNSKKPMTNEKQNSILANIILSCLKPNSKLIQPLTTLKKQLREVLQFVGLSHQYPGPYFLACLLFWPENQELDQDSKLIEKYVSSLNRSFRGQYKRMCRSKQASTLFYLGKRKGLNSIVHKAKIEQYFDKAQNTNSLWHSGDVWKKNEVKDLLRRLTGQAEGKLISVEYGTEEKIKIPVISVYSGPLRSGRNIERVSFYLGFSIEGPLAYDIEVI

SEQ ID NO: 5655 - protein, 904 aa, Homo sapiens
MDAGFFRGTSAEQDNRFSNKQKKLLKQLKFAECLEKKVDMSKVNLEVIKPWITKRVTEILGFEDDVVIEFIFNQLEVKNPDSKMMQINLTGFLNGKNAREFMGELWPLLLSAQENIAGIPSAFLELKKEEIKQRQIEQEKLASMKKQDEDKDKRDKEEKESSREKRERSRSPRRRKSRSPSPRRRSSPVRRERKRSHSRSPRHRTKSRSPSPAPEKKEKTPELPEPSVKVKEPSVQEATSTSDILKVPKPEPIPEPKEPSPEKNSKKEKEKEKTRPRSRSRSKSRSRTRSRSPSHTRPRRRHRSRSRSYSPRRRPSPRRRPSPRRRTPPRRMPPPPRHRRSRSPVRRRRRSSASLSGSSSSSSSSRSRSPPKKPPKRTSSPPRKTRRLSPSASPPRRRHRPSPPATPPPKTRHSPTPQQSNRTRKSRVSVSPGRTSGKVTKHKGTEKRESPSPAPKPRKVELSESEEDKGGKMAAADSVQQRRQYRRQNQQSSSDSGSSSSSEDERPKRSHVKNGEVGRRRRHSPSRSASPSPRKRQKETSPRGRRRRSPSPPPTRRRRSPSPAPPPRRRRTPTPPPRRRTPSPPPRRRSPSPRRYSPPIQRRYSPSPPPKRRTASPPPPPKRRASPSPPPKRRVSHSPPPKQRSSPVTKRRSPSLSSKHRKGSSPSRSTREARSPQPNKRHSPSPRPRAPQTSSSPPPVRRGASSSPQRRQSPSPSTRPIRRVSRTPEPKKIKKAASPSPQSVRRVSSSRSVSGSPEPAAKKPPAPPSPVQSQSPSTNWSPAVPVKKAKSPTPSPSPPRNSDQEGGGKKKKKKKDKKHKKDKKHKKHKKHKKEKAVAAAAAAAVTPAAIAAATTTLAQEEPVAAPEPKKETESEAEDNLDDLEKHLREKALRSMRKAQVSPQS

SEQ ID NO: 5656 - protein, 301 aa, Homo sapiens
MADQPKPISPLKNLLAGGFGGVCLVFVGHPLDTVKVRLQTQPPSLPGQPPMYSGTFDCFRKTLFREGITGLYRGMAAPIIGVTPMFAVCFFGFGLGKKLQQKHPEDVLSYPQLFAAGMLSGVFTTGIMTPGERIKCLLQIQASSGESKYTGTLDCAKKLYQEFGIRGIYKGTVLTLMRDVPASGMYFMTYEWLKNIFTPEGKRVSELSAPRILVAGGIAGIFNWAVAIPPDVLKSRFQTAPPGKYPNGFRDVLRELIRDEGVTSLYKGFNAVMIRAFPANAACFLGFEVAMKFLNWATPNL

SEQ ID NO: 5657 - protein, 71 aa, Homo sapiens
MTQLLLFLVALLVLGHVPSGRSEFKRCWKGQGACQTYCTRQETYMHLCPDASLCCLSYALKPPPVPKHEYE

SEQ ID NO: 5658 - protein, 1976 aa, Homo sapiens
MGVLKVWLGLALALAEFAVLPHHSEGACVYQDSLLADATIWKPDSCQSCRCHGDIVICKPAVCRNPQCAFEKGEVLQIAANQCCPECVLRTPGSCHHEKKIHEHGTEWASSPCSVCSCNHGEVRCTPQPCPPLSCGHQELAFIPEGSCCPVCVGLGKPCSYEGHVFQDGEDWRLSRCAKCLCRNGVAQCFTAQCQPLFCNQDETVVRVPGKCCPQCSARSCSAAGQVYEHGEQWSENACTTCICDRGEVRCHKQACLPLRCGKGQSRARRHGQCCEECVSPAGSCSYDGVVRYQDEMWKGSACEFCMCDHGQVTCQTGECAKVECARDEELIHLDGKCCPECISRNGYCVYEETGEFMSSNASEVKRIPEGEKWEDGPCKVCECRGAQVTCYEPSCPPCPVGTLALEVKGQCCPDCTSVHCHPDCLTCSQSPDHCDLCQDPTKLLQNGWCVHSCGLGFYQAGSLCLACQPQCSTCTSGLECSSCQPPLLMRHGQCVPTCGDGFYQDRHSCAVCHESCAGCWGPTEKHCLACRDPLHVLRDGGCESSCGKGFYNRQGTCSACDQSCDSCGPSSPRCLTCTEKTVLHDGKCMSECPGGYYADATGRCKVCHNSCASCSGPTPSHCTACSPPKALRQGHCLPRCGEGFYSDHGVCKACHSSCLACMGPAPSHCTGCKKPEEGLQVEQLSDVGIPSGECLAQCRAHFYLESTGICEACHQSCFRCAGKSPHNCTDCGPSHVLLDGQCLSQCPDGYFHQEGSCTECHPTCRQCHGPLESDCISCYPHISLTNGNCRTSCREEQFLNLVGYCADCHHLCQHCAADLHNTGSICLRCQNAHYLLLGDHCVPDCPSGYYAERGACKKCHSSCRTCQGRGPFSCSSCDTNLVLSHTGTCSTTCFPGHYLDDNHVCQPCNTHCGSCDSQASCTSCRDPNKVLLFGECQYESCAPQYYLDFSTNTCKECDWSCSACSGPLKTDCLQCMDGYVLQDGACVEQCLSSFYQDSGLCKNCDSYCLQCQGPHECTRCKGPFLLLEAQCVQECGKGYFADHAKHKCTACPQGCLQCSHRDRCHLCDHGFFLKSGLCVYNCVPGFSVHTSNETCSGKIHTPSLHVNGSLILPIGSIKPLDFSLLNVQDQEGRVEDLLFHVVSTPTNGQLVLSRNGKEVQLDKAGRFSWKDVNEKKVRFVHSKEKLRKGYLFLKISDQQFFSEPQLINIQAFSTQAPYVLRNEVLHISRGERATITTQMLDIRDDDNPQDVVIEIIDPPLHGQLLQTLQSPATPIYQFQLDELSRGLLHYAHDGSDSTSDVAVLQANDGHSFHNILFQVKTVPQNDRGLQLVANSMVWVPEGGMLQITNRILQAEAPGASAEEIIYKITQDYPQFGEVVLLVNMPADSPADEGQHLPDGRTATPTSTFTQQDINEGIVWYRHSGAPAQSDSFRFEVSSASNAQTRLESHMFNIAILPQTPEAPKVSLEASLHMTAREDGLTVIQPHSLSFINSEKPSGKIVYNITLPLHPNQGIIEHRDHPHSPIRYFTQEDINQGKVMYRPPPAAPHLQELMAFSFAGLPESVKFHFTVSDGEHTSPEMVLTIHLLPSDQQLPVFQVTAPRLAVSPGGSTSVGLQVVVRDAETAPKELFFELRRPPQHGVLLKHTAEFRRPMATGDTFTYEDVEKNALQYIHDGSSTREDSMEISVTDGLTVTMLEVRVEVSLSEDRGPRLAAGSSLSITVASKSTAIITRSHLAYVDDSSPDPEIWIQLNYLPSYGTLLRISGSEVEELSEVSNFTMEDINNKKIRYSAVFETDGHLVTDSFYFSVSDMDHNHLDNQIFTIMITPAENPPPVIAFADLITVDEGGRAPLSFHHFFATDDDDNLQRDAIIKLSALPKYGCIENTGTGDRFGPETASDLEASFPIQDVLENYIYYFQSVHESIEPTHDIFSFYVSDGTSRSEIHSINITIEVKTLEVGKVEPLTTIFHTIRELSL

SEQ ID NO: 5659 - protein, 293 aa, Homo sapiens
MFISLWEFFYGHFFRFWMKWLLRQMTGKCELQRIFDTYVGAQRTHRIENSLTYSKNKVLQKATHVVQSEVDKYVDDIMKEKNINPEKDASFKICMKMCLLQITGYKQLYLDVESVRKRPYDSDNLQHEELLMKLWNLLMPTKKLNARISKQWAEIGFQGDDPKTDFRGMGILGLINLVYFSENYTSEAHQILSRSNHPKLGYSYAIVGINLTEMAYSLLKSEALKFHLYNLVPGIPTMEHFHQFYCYLVYEFDKFWFEEEPESIMYFNLYREKFHEKIKGLLLDCNVALTLKV

SEQ ID NO: 5660 - protein, 518 aa, Homo sapiens
MPTVVVMDVSLSMTRPVSIEGSEEYQRKHLAAHGLTMLFEHMATNYKLEFTALVVFSSLWELMVPFTRDYNTLQEALSNMDDYDKTCLESALVGVCNIVQQEWGGAIPCQVVLVTDGCLGIGRGSLRHSLATQNQRSESNRFPLPFPFPSKLYIMCMANLEELQSTDSLECLERLIDLNNGEGQIFTIDGPLCLKNVQSMFGKLIDLAYTPFHAVLKCGHLTADVQVFPRPEPFVVDEEIDPIPKVINTDLEIVGFIDIADISSPPVLSRHLVLPIALNKEGDEVGTGITDDNEDENSANQIAGKIPNFCVLLHGSLKVEGMVAIVQLGPEWHGMLYSQADSKKKSNLMMSLFEPGPEPLPWLGKMAQLGPISDAKENPYGEDDNKSPFPLQPKNKRSYAQNVTVWIKPSGLQTDVQKILRNARKLPEKTQTFYKELNRLRKAALAFGFLDLLKGVADMLERECTLLPETAHPDAAFQLTHAAQQLKLASTGTSEYAAYDQNITPLHTDFSGSSTERI

SEQ ID NO: 5661 - protein, 407 aa, Homo sapiens
MSGGSADYNREHGGPEGMDPDGVIESNWNEIVDNFDDMNLKESLLRGIYAYGFEKPSAIQQRAIIPCIKGYDVIAQAQSGTGKTATFAISILQQLEIEFKETQALVLAPTRELAQQIQKVILALGDYMGATCHACIGGTNVRNEMQKLQAEAPHIVVGTPGRVFDMLNRRYLSPKWIKMFVLDEADEMLSRGFKDQIYEIFQKLNTSIQVVLLSATMPTDVLEVTKKFMRDPIRILVKKEELTLEGIKQFYINVEREEWKLDTLCDLYETLTITQAVIFLNTRRKVDWLTEKMHARDFTVSALHGDMDQKERDVIMREFRSGSSRVLITTDLLARGIDVQQVSLVINYDLPTNRENYIHRIGRGGRFGRKGVAINFVTEEDKRILRDIETFYNTTVEEMPMNVADLI

SEQ ID NO: 5662 - protein, 706 aa, Homo sapiens
MGRKVTVATCALNQWALDFEGNLQRILKSIEIAKNRGARYRLGPELEICGYGCWDHYYESDTLLHSFQVLAALVESPVTQDIICDVGMPVMHRNVRYNCRVIFLNRKILLIRPKMALANEGNYRELRWFTPWSRSRHTEEYFLPRMIQDLTKQETVPFGDAVLVTWDTCIGSEICEELWTPHSPHIDMGLDGVEIITNASGSHQVLRKANTRVDLVTMVTSKNGGIYLLANQKGCDGDRLYYDGCAMIAMNGSVFAQGSQFSLDDVEVLTATLDLEDVRSYRAEISSRNLAASRASPYPRVKVDFALSCHEDLLAPISEPIEWKYHSPEEEISLGPACWLWDFLRRSQQAGFLLPLSGGVDSAATACLIYSMCCQVCEAVRSGNEEVLADVRTIVNQISYTPQDPRDLCGRILTTCYMASKNSSQETCTRARELAQQIGSHHISLNIDPAVKAVMGIFSLVTGKSPLFAAHGGSSRENLALQNVQARIRMVLAYLFAQLSLWSRGVHGGLLVLGSANVDESLLGYLTKYDCSSADINPIGGISKTDLRAFVQFCIQRFQLPALQSILLAPATAELEPLADGQVSQTDEEDMGMTYAELSVYGKLRKVAKMGPYSMFCKLLGMWRHICTPRQVADKVKRFFSKYSMNRHKMTTLTPAYHAENYSPEDNRFDLRPFLYNTSWPWQFRCIENQVLQLERAEPQSLDGVD

SEQ ID NO: 5663 - protein, 238 aa, Homo sapiens
MRALLALCLLLGWLRWGPAGAQQSGEYCHGWVDVQGNYHEGFQCPEDFDTLDATICCGSCALRYCCAAADARLEQGGCTNDRRELEHPGITAQPVYVPFLIVGSIFIAFIILGSVVAIYCCTCLRPKEPSQQPIRFSLRSYQTETLPMILTSTSPRAPSRQSSTATSSSSTGGSIRRFSFARAEPGCLVPSPPPPYTTSHSIHLAQPSGFLVSPQYFAYPLQQEPPLPGKSCPDFSSS

SEQ ID NO: 5664 - protein, 422 aa, Homo sapiens
MSSSCSGLSRVLVAVATALVSASSPCPQAWGPPGVQYGQPGRSVKLCCPGVTAGDPVSWFRDGEPKLLQGPDSGLGHELVLAQADSTDEGTYICQTLDGALGGTVTLQLGYPPARPVVSCQAADYENFSCTWSPSQISGLPTRYLTSYRKKTVLGADSQRRSPSTGPWPCPQDPLGAARCVVHGAEFWSQYRINVTEVNPLGASTRLLDVSLQSILRPDPPQGLRVESVPGYPRRLRASWTYPASWPCQPHFLLKFRLQYRPAQHPAWSTVEPAGLEEVITDAVAGLPHAVRVSARDFLDAGTWSTWSPEAWGTPSTGTIPKEIPAWGQLHTQPEVEPQVDSPAPPRPSLQPHPRLLDHRDSVEQVAVLASLGILSFLGLVAGALALGLWLRLRRGGKDGSPKPGFLASVIPVDRRPGAPNL

SEQ ID NO: 5665 - protein, 341 aa, Homo sapiens
MERAVPLAVPLGQTEVFQALQRLHMTIFSQSVSPCGKFLAAGNNYGQIAIFSLSSALSSEAKEESKKPVVTFQAHDGPVYSMVSTDRHLLSAGDGEVKAWLWAEMLKKGCKELWRRQPPYRTSLEVPEINALLLVPKENSLILAGGDCQLHTMDLETGTFTRVLRGHTDYIHCLALRERSPEVLSGGEDGAVRLWDLRTAKEVQTIEVYKHEECSRPHNGRWIGCLATDSDWMVCGGGPALTLWHLRSSTPTTIFPIRAPQKHVTFYQDLILSAGQGRCVNQWQLSGELKAQVPGSSPGLLSLSLNQQPAAPECKVLTAAGNSCRVDVFTNLGYRAFSLSF

SEQ ID NO: 5666 - protein, 875 aa, Homo sapiens
MHDAFEPVPILEKLPLQIDCLAAWEEWLLVGTKQGHLLLYRIRKDVGCNRFEVTLEKSNKNFSKKIQQIHVVSQFKILVSLLENNIYVHDLLTFQQITTVSKAKGASLFTCDLQHTETGEEVLRMCVAVKKKLQLYFWKDREFHELQGDFSVPDVPKSMAWCENSICVGFKRDYYLIRVDGKGSIKELFPTGKQLEPLVAPLADGKVAVGQDDLTVVLNEEGICTQKCALNWTDIPVAMEHQPPYIIAVLPRYVEIRTFEPRLLVQSIELQRPRFITSGGSNIIYVASNHFVWRLIPVPMATQIQQLLQDKQFELALQLAEMKDDSDSEKQQQIHHIKNLYAFNLFCQKRFDESMQVFAKLGTDPTHVMGLYPDLLPTDYRKQLQYPNPLPVLSGAELEKAHLALIDYLTQKRSQLVKKLNDSDHQSSTSPLMEGTPTIKSKKKLLQIIDTTLLKCYLHTNVALVAPLLRLENNHCHIEESEHVLKKAHKYSELIILYEKKGLHEKALQVLVDQSKKANSPLKGHERTVQYLQHLGTENLHLIFSYSVWVLRDFPEDGLKIFTEDLPEVESLPRDRVLGFLIENFKGLAIPYLEHIIHVWEETGSRFHNCLIQLYCEKVQGLMKEYLLSFPAGKTPVPAGEEEGELGEYRQKLLMFLEISSYYDPGRLICDFPFDGLLEERALLLGRMGKHEQALFIYVHILKDTRMAEEYCHKHYDRNKDGNKDVYLSLLRMYLSPPSIHCLGPIKLELLEPKANLQAALQVLELHHSKLDTTKALNLLPANTQINDIRIFLEKVLEENAQKKRFNQVLKNLLHAEFLRVQEERILHQQVKCIITEEKVCMVCKKKIGNSAFARYPNGVVVHYFCSKEVNPADT

SEQ ID NO: 5667 - protein, 446 aa, Homo sapiens
MLHPETSPGRGHLLAVLLALLGTAWAEVWPPQLQEQAPMAGALNRKESFLLLSLHNRLRSWVQPPAADMRRLDWSDSLAQLAQARAALCGIPTPSLASGLWRTLQVGWNMQLLPAGLASFVEVVSLWFAEGQRYSHAAGECARNATCTHYTQLVWATSSQLGCGRHLCSAGQAAIEAFVCAYSPRGNWEVNGKTIVPYKKGAWCSLCTASVSGCFKAWDHAGGLCEVPRNPCRMSCQNHGRLNISTCHCHCPPGYTGRYCQVRCSLQCVHGRFREEECSCVCDIGYGGAQCATKVHFPFHTCDLRIDGDCFMVSSEADTYYRARMKCQRKGGVLAQIKSQKVQDILAFYLGRLETTNEVIDSDFETRNFWIGLTYKTAKDSFRWATGEHQAFTSFAFGQPDNHGFGNCVELQASAAFNWNNQRCKTRNRYICQFAQEHISRWGPGS

SEQ ID NO: 5668 - protein, 1761 aa, Homo sapiens
MADAAASPVGKRLLLLFADTAASASASAPAAAAASGDPGPALRTRAWRAGTVRAMSGAVPQDLAIFVEFDGCNWKQHSWVKVHAEEVIVLLLEGSLVWAPREDPVLLQGIRVSIAQWPALTFTPLVDKLGLGSVVPVEYLLDRELRFLSDANGLHLFQMGTDSQNQILLEHAALRETVNALISDQKLQEIFSRGPYSVQGHRVKIYQPEGEEGWLYGVVSHQDSITRLMEVSVTESGEIKSVDPRLIHVMLMDNSAPQSEGGTLKAVKSSKGKKKRESIEGKDGRRRKSASDSGCDPASKKLKGDRGEVDSNGSDGGEASRGPWKGGNASGEPGLDQRAKQPPSTFVPQINRNIRFATYTKENGRTLVVQDEPVGGDTPASFTPYSTATGQTPLAPEVGGAENKEAGKTLEQVGQGIVASAAVVTTASSTPNTVRISDTGLAAGTVPEKQKGSRSQASGENSRNSILASSGFGAPLPSSSQPLTFGSGRSQSNGVLATENKPLGFSFGCSSAQEAQKDTDLSKNLFFQCMSQTLPTSNYFTTVSESLADDSSSRDSFKQSLESLSSGLCKGRSVLGTDTKPGSKAGSSVDRKVPAESMPTLTPAFPRSLLNARTPENHENLFLQPPKLSREEPSNPFLAFVEKVEHSPFSSFASQASGSSSSATTVTSKVAPSWPESHSSADSASLAKKKPLFITTDSSKLVSGVLGSALTSGGPSLSAMGNGRSSSPTSSLTQPIEMPTLSSSPTEERPTVGPGQQDNPLLKTFSNVFGRHSGGFLSSPADFSQENKAPFEAVKRFSLDERSLACRQDSDSSTNSDLSDLSDSEEQLQAKTGLKGIPEHLMGKLGPNGERSAELLLGKSKGKQAPKGRPRTAPLKVGQSVLKDVSKVKKLKQSGEPFLQDGSCINVAPHLHKCRECRLERYRKFKEQEQDDSTVACRFFHFRRLIFTRKGVLRVEGFLSPQQSDPDAMNLWIPSSSLAEGIDLETSKYILANVGDQFCQLVMSEKEAMMMVEPHQKVAWKRAVRGVREMCDVCETTLFNIHWVCRKCGFGVCLDCYRLRKSRPRSETEEMGDEEVFSWLKCAKGQSHEPENLMPTQIIPGTALYNIGDMVHAARGKWGIKANCPCISRQNKSVLRPAVTNGMSQLPSINPSASSGNETTFSGGGGPAPVTTPEPDHVPKADSTDIRSEEPLKTDSSASNSNSELKAIRPPCPDTAPPSSALHWLADLATQKAKEETKEAGSLRSVLNKESHSPFGLDSFNSTAKVSPLTPKLFNSLLLGPTASNNKTEGSSLRDLLHSGPGKLPQTPLDTGIPFPPVFSTSSAGVKSKASLPNFLDHIIASVVENKKTSDASKRACNLTDTQKEVKEMVMGLNVLDPHTSHSWLCDGRLLCLHDPSNKNNWKIFRECWKQGQPVLVSGVHKKLKSELWKPEAFSQEFGDQDVDLVNCRNCAIISDVKVRDFWDGFEIICKRLRSEDGQPMVLKLKDWPPGEDFRDMMPTRFEDLMENLPLPEYTKRDGRLNLASRLPSYFVRPDLGPKMYNAYGLITAEDRRVGTTNLHLDVSDAVNVMVYVGIPIGEGAHDEEVLKTIDEGDADEVTKQRIHDGKEKPGALWHIYAAKDAEKIRELLRKVGEEQGQENPPDHDPIHDQSWYLDQTLRKRLYEEYGVQGWAIVQFLGDAVFIPAGAPHQVHNLYSCIKVAEDFVSPEHVKHCFRLTQEFRHLSNTHTNHEDKLQVKNIIYHAVKDAVGTLKAHESKLARS

SEQ ID NO: 5669 - protein, 495 aa, Homo sapiens
MRLTRCQAALAAAITLNLLVLFYVSWLQHQPRNSRARGPRRASAAGPRVTVLVREFEAFDNAVPELVDSFLQQDPAQPVVVAADTLPYPPLALPRIPNVRLALLQPALDRPAAASRPETYVATEFVALVPDGARAEAPGLLERMVEALRAGSARLVAAPVATANPARCLALNVSLREWTARYGAAPAAPRCDALDGDAVVLLRARDLFNLSAPLARPVGTSLFLQTALRGWAVQLLDLTFAAARQPPLATAHARWKAEREGRARRAALLRALGIRLVSWEGGRLEWFGCNKETTRCFGTVVGDTPAYLYEERWTPPCCLRALRETARYVVGVLEAAGVRYWLEGGSLLGAARHGDIIPWDYDVDLGIYLEDVGNCEQLRGAEAGSVVDERGFVWEKAVEGDFFRVQYSESNHLHVDLWPFYPRNGVMTKDTWLDHRQDVEFPEHFLQPLVPLPFAGFVAQAPNNYRRFLELKFGPGVIENPQYPNPALLSLTGSG

SEQ ID NO: 5670 - protein, 268 aa, Homo sapiens
MGLSPSAPAVAVQASNASASPPSGCPMHEGKMKGCPVNTEPSGPTCEKKTYSVPAHQERAYEYVECPIRGTAAENKENLDPSNLMPPPNQTPAPDQPFALSTVREESSIPRADSEKKWVYPSEQMFWNAMLKKGWKWKDEDISQKDMYNIIRIHNQNNEQAWKEILKWEALHAAECPCGPSLIRFGGKAKEYSPRARIRSWMGYELPFDRHDWIINRCGTEVRYVIDYYDGGEVNKDYQFTILDVRPALDSLSAVWDRMKVAWWRWTS

SEQ ID NO: 5671 - protein, 2005 aa, Homo sapiens
MAAADGGGPGGASVGTEEDGGGVGHRTVYLFDRREKESELGDRPLQVGERSDYAGFRACVCQTLGISPEEKFVITTTSRKEITCDNFDETVKDGVTLYLLQSVNQLLLTATKERIDFLPHYDTLVKSGMYEYYASEGQNPLPFALAELIDNSLSATSRNIGVRRIQIKLLFDETQGKPAVAVIDNGRGMTSKQLNNWAVYRLSKFTRQGDFESDHSGYVRPVPVPRSLNSDISYFGVGGKQAVFFVGQSARMISKPADSQDVHELVLSKEDFEKKEKNKEAIYSGYIRNRKPSDSVHITNDDERFLHHLIIEEKEKDSFTAVVITGVQPEHIQYLKNYFHLWTRQLAHIYHYYIHGPKGNEIRTSKEVEPFNNIDIEISMFEKGKVPKIVNLREIQDDMQTLYVNTAADSFEFKAHVEGDGVVEGIIRYHPFLYDRETYPDDPCFPSKLKDEDDEDDCFILEKAARGKRPIFECFWNGRLIPYTSVEDFDWCTPPKKRGLAPIECYNRISGALFTNDKFQVSTNKLTFMDLELKLKDKNTLFTRILNGQEQRMKIDREFALWLKDCHEKYDKQIKFTLFKGVITRPDLPSKKQGPWATYAAIEWDGKIYKAGQLVKTIKTLPLFYGSIVRFFLYGDHDGEVYATGGEVQIAMEPQALYDEVRTVPIAKLDRTVAEKAVKKYVEDEMARLPDRLSVTWPEGDELLPNEVRPAGTPIGALRIEILNKKGEAMQKLPGTSHGGSKKLLVELKVILHSSSGNKEIISHISQHGGKWPYWFKKMENIQKLGNYTLKLQVVLNESNADTYAGRPLPSKAIKFSVKEGKPEKFSFGLLDLPFRVGVPFNIPLEFQDEFGHTSQLVTDIQPVLEASGLSLHYEEITKGPNCVIRGVTAKGPVNSCQGKNYNLKVTLPGLKEDSQILKIRLLPGHPRRLKVKPDSEILVIENGTAFPFQVEVLDESDNITAQPKLIVHCKFSGAPNLPVYVVDCSSSGTSILTGSAIQVQNIKKDQTLKARIEIPSCKDVAPVEKTIKLLPSSHVARLQIFSVEGQKAIQIKHQDEVNWIAGDIMHNLIFQMYDEGEREINITSALAEKIKVNWTPEINKEHLLQGLLPDVQVPTSVKDMRYCQVSFQDDHVSLESAFTVRPLPDEPKHLKCEMKGGKTVQMGQELQGEVVIIITDQYGNQIQAFSPSSLSSLSIAGVGLDSSNLKTTFQENTQSISVRGIKFIPGPPGNKDLCFTWREFSDFIRVQLISGPPAKLLLIDWPELKESIPVINGRDLQNPIIVQLCDQWDNPAPVQHVKISLTKASNLKLMPSNQQHKTDEKGRANLGVFSVFAPRGEHTLQVKAIYNKSIIEGPIIKLMILPDPEKPVRLNVKYDKDASFLAGGLFTDFMISVISEDDSIIKNINPARISMKMWKLSTSGNRPPANAETFSCNKIKDNDKEDGCFYFRDKVIPNKVGTYCIQFGFMMDKTNILNSEQVIVEVLPNQPVKLVPKIKPPTPAVSNVRSVASRTLVRDLHLSITDDYDNHTGIDLVGTIIATIKGSNEEDTDTPLFIGKVRTLEFPFVNGSAEIMSLVLAESSPGRDSTEYFIVFEPRLPLLSRTLEPYILPFMFYNDVKKQQQMAALTKEKDQLSQSIVMYKSLFEASQQLLNEMKCQVEEARLKEAQLRNELKIHNIDIPTTQQVPHIEALLKRKLSEQEELKKKPRRSCTLPNYTKGSGDVLGKIAHLAQIEDDRAAMVISWHLASDMDCVVTLTTDAARRIYDETQGRQQVLPLDSIYKKTLPDWKRSLPHFRNGKLYFKPIGDPVFARDLLTFPDNVEHCETVFGMLLGDTIILDNLDAANHYRKEVVKITHCPTLLTRDGDRIRSNGKFGGLQNKAPPMDKLRGMVFGAPVPKQCLILGEQIDLLQQYRSAVCKLDSVNKDLNSQLEYLRTPDMRKKKQELDEHEKNLKLIEEKLGMTPIRKCNDSLRHSPKVETTDCPVPPKRMRREATRQNRIITKTDV

SEQ ID NO: 5672 - protein, 490 aa, Homo sapiens
MEGQDEVSAREQHFHSQVRESTICFLLFAILYVVSYFIITRYKRKSDEQEDEDAIVNRISLFLSTFTLAVSAGAVLLLPFSIISNEILLSFPQNYYIQWLNGSLIHGLWNLASLFSNLCLFVLMPFAFFFLESEGFAGLKKGIRARILETLVMLLLLALLILGIVWVASALIDNDAASMESLYDLWEFYLPYLYSCISLMGCLLLLLCTPVGLSRMFTVMGQLLVKPTILEDLDEQIYIITLEEEALQRRLNGLSSSVEYNIMELEQELENVKTLKTKLERRKKASAWERNLVYPAVMVLLLIETSISVLLVACNILCLLVDETAMPKGTRGPGIGNASLSTFGFVGAALEIILIFYLMVSSVVGFYSLRFFGNFTPKKDDTTMTKIIGNCVSILVLSSALPVMSRTLGITRFDLLGDFGRFNWLGNFYIVLSYNLLFAIVTTLCLVRKFTSAVREELFKALGLHKLHLPNTSRDSETAKPSVNGHQKAL

SEQ ID NO: 5673 - protein, 700 aa, Homo sapiens [sequence omitted]

SEQ ID NO: 5674 - protein, 581 aa, Homo sapiens
MVLKAFFPTCCVSTDSGLLVGRWVPEQSSAVVLAVLHFPFIPIQVKQLLAQVRQASQVGVAVLGTWCHCRQEPEESLGRFLESLGAVFPHEPWLRLCRERGGTFWSCEATHRQAPTAPGAPGEDQVMLIFYDQRQVLLSQLHLPTVLPDRQAGATTASTGGLAAVFDTVARSEVLFRSDRFDEGPVRLSHWQSEGVEASILAELARRASGPICLLLASLLSLVSAVSACRVFKLWPLSFLGSKLSTCEQLRHRLEHLTLIFSTRKAENPAQLMRKANTVASVLLDVALGLMLLSWLHGRSRIGHLADALVPVADHVAEELQHLLQWLMGAPAGLKMNRALDQVLGRFFLYHIHLWISYIHLMSPFVEHILWHVGLSACLGLTVALSLLSDIIALLTFHIYCFYVYGARLYCLKIHGLSSLWRLFRGKKWNVLRQRVDSCSYDLDQLFIGTLLFTILLFLLPTTALYYLVFTLLRLLVVAVQGLIHLLVDLINSLPLYSLGLRLCRPYRLAAGVKFRVLRHEAGRPLRLLMQINPLPYSRVVHTYRLPSCGCHPKHSWGALCRKLFLGELIYPWRQRGDKQD

SEQ ID NO: 5675 - protein, 318 aa, Homo sapiens
MGNGVKEGPVRLHEDAEAVLSSSVSSKRDHRQVLSSLLSGALAGALAKTAVAPLDRTKIIFQVSSKRFSAKEAFRVLYYTYLNEGFLSLWRGNSATMVRVVPYAAIQFSAHEEYKRILGSYYGFRGEALPPWPRLFAGALAGTTAASLTYPLDLVRARMAVTPKEMYSNIFHVFIRISREEGLKTLYHGFMPTVLGVIPYAGLSFFTYETLKSLHREYSGRRQPYPFERMIFGACAGLIGQSASYPLDVVRRRMQTAGVTGYPRASIARTLRTIVREEGAVRGLYKGLSMNWVKGPIAVGISFTTFDLMQILLRHLQS

SEQ ID NO: 5676 - protein, 170 aa, Homo sapiens
MKEPLDGECGKAVVPQQELLDKIKEEPDNAQEYGCVQQPKTQESKLKIGGVSSVNERPIAQQLNPGFQLSFASSGPSVLLPSVPAVAIKVFCSGCKKMLYKGQTAYHKTGSTQLFCSTRCITRHSSPACLPPPPKKTCTNCSKYKILNIPFYFTFFLVCILFSSNILLIL

SEQ ID NO: 5677 - protein, 610 aa, Homo sapiens
MHFQAFWLCLGLLFISINAEFMDDDVETEDFEENSEEIDVNESELSSEIKYKTPQPIGEVYFAETFDSGRLAGWVLSKAKKDDMDEEISIYDGRWEIEELKENQVPGDRGLVLKSRAKHHAISAVLAKPFIFADKPLIVQYEVNFQDGIDCGGAYIKLLADTDDLILENFYDKTSYIIMFGPDKCGEDYKLHFIFRHKHPKTGVFEEKHAKPPDVDLKKFFTDRKTHLYTLVMNPDDTFEVLVDQTVVNKGSLLEDVVPPIKPPKEIEDPNDKKPEEWDERAKIPDPSAVKPEDWDESEPAQIEDSSVVKPAGWLDDEPKFIPDPNAEKPDDWNEDTDGEWEAPQILNPACRIGCGEWKPPMIDNPKYKGVWRPPLVDNPNYQGIWSPRKIPNPDYFEDDHPFLLTSFSALGLELWSMTSDIYFDNFIICSEKEVADHWAADGWRWKIMIANANKPGVLKQLMAAAEGHPWLWLIYLVTAGVPIALITSFCWPRKVKKKHKDTEYKKTDICIPQTKGVLEQEEKEEKAALEKPMDLEEEKKQNDGEMLEKEEESEPEEKSEEEIEIIEGQEESNQSNKSGSEDEMKEADESTGSGDGPIKSVRKRRVRKD

SEQ ID NO: 5678 - protein, 490 aa, Homo sapiens
MEEEGVKEAGEKPRGAQMVDKAGWIKKSSGGLLGFWKDRYLLLCQAQLLVYENEDDQKCVETVELGSYEKCQDLRALLKRKHRFILLRSPGNKVSDIKFQAPTGEEKESWIKALNEGINRGKNKAFDEVKVDKSCALEHVTRDRVRGGQRRRPPTRVHLKEVASAASDGLLRLDLDVPDSGPPVFAPSNHVSEAQPRETPRPLMPPTKPFLAPETTSPGDRVETPVGERAPTPVSASSEVSPESQEDSETPAEEDSGSEQPPNSVLPDKLKVSWENPSPQEAPAAESAEPSQAPCSETSEAAPREGGKPPTPPPKILSEKLKASMGEMQASGPPAPGTVQVSVNGMDDSPEPAKPSQAEGTPGTPPKDATTSTALPPWDLPPQFHPRCSSLGDLLGEGPRHPLQPRERLYRAQLEVKVASEQTEKLLNKVLGSEPAPVSAETLLSQAVEQLRQATQVLQEMRDLGELSQEAPGLREKRKELVTLYRRSAP

SEQ ID NO: 5679 - protein, 1134 aa, Homo sapiens
MGLLASAGLLLLLVIGHPRSLGLKCGIRMVNMKSKEPAVGSRFFSRISSWRNSTVTGHPWQVSLKSDEHHFCGGSLIQEDRVVTAAHCLDSLSEKQLKNITVTSGEYSLFQKDKQEQNIPVSKIITHPEYNSREYMSPDIALLYLKHKVKFGNAVQPICLPDSDDKVEPGILCLSSGWGKISKTSEYSNVLQEMELPIMDDRACNTVLKSMNLPPLGRTMLCAGFPDWGMDACQGDSGGPLVCRRGGGIWILAGITSWVAGCAGGSVPVRNNHVKASLGIFSKVSELMDFITQNLFTGLDRGQPLSKVGSRYITKALSSVQEVNGSQRGKGILDMEKQVGCDHDYVSLRSSSGVLFNQRSLMEDDGKQNKRVCGKILPSPLLAETSEAMVPFVSDTEDSGSGFELTVTAVQKSEAGSGCGSLAILVEEGTNHSAKYPDLYPSNTRCHWFICAPEKHIIKLTFEDFAVKFSPNCIYDAVVIYGDSEEKHKLAKLCGMLTITSIFSSSNMTVIYFKSDGKNRLQGFKARFTILPSESLNKFEPKLPPQNNPVSTVKAILHDVCGIPPFSPQWLSRRIAGGEEACPHCWPWQVGLRFLGDYQCGGAIINPVWILTAAHCVQLKNNPLSWTIIAGDHDRNLKESTEQVRRAKHIIVHEDFNTLSYDSDIALIQLSSPLEYNSVVRPVCLPHSAEPLFSSEICAVTGWGSISADGGLASRLQQIQVHVLEREVCEHTYYSAHPGGITEKMICAGFAASGEKDFCQGDSGGPLVCRHENGPFVLYGIVSWGAGCVQPWKPGVFARVMIFLDWIQSKINGPASLQTNNKCKTLKQQLPPPTPSPDSASWPGCCSEAELEKPRGFFPTPRYLLDYRGRLECSWVLRVSASSMAKFTIEYLSLLGSPVCQDSVLIIYEERHSKRKTAGGLHGRRLYSMTFMSPGPLVRVTFHALVRGAFGISYIVLKVLGPKDSKITRLSQSSNREHLVPCEDVLLTKPEGIMQIPRNSHRTTMGCQWRLVAPLNHIIQLNIINFPMKPTTFVCHGHLRVYEGFGPGKKLIASFAGTLAMILTKDILKREKLNFINTYIMHIWENSVYDNVRSVGKRKQKKFASNLSYSMEAEKSRIQVPADLVPAKGSLSGS

SEQ ID NO: 5680 - protein, 575 aa, Homo sapiens
MSRSPDAKEDPVECPLCMEPLEIDDINFFPCTCGYQICRFCWHRIRTDENGLCPACRKPYPEDPAVYKPLSQEELQRIKNEKKQKQNERKQKISENRKHLASVRVVQKNLVFVVGLSQRLADPEVLKRPEYFGKFGKIHKVVINNSTSYAGSQGPSASAYVTYIRSEDALRAIQCVNNVVVDGRTLKASLGTTKYCSYFLKNMQCPKPDCMYLHELGDEAASFTKEEMQAGKHQEYEQKLLQELYKLNPNFLQLSTGSVDKNKNKVTPLQRYDTPIDKPSDSLSIGNGDNSQQISNSDTPSPPPGLSKSNPVIPISSSNHSARSPFEGAVTESQSLFSDNFRHPNPIPSGLPPFPSSPQTSSDWPTAPEPQSLFTSETIPVSSSTDWQAAFGFGSSKQPEDDLGFDPFDVTRKALADLIEKELSVQDQPSLSPTSLQNSSSHTTTAKGPGSGFLHPAAATNANSLNSTFSVLPQRFPQFQQHRAVYNSFSFPGQAARYPWMAFPRNSIMHLNHTANPTSNSNFLDLNLPPQHNTGLGGIPVAGEEEVKVSTMPLSTSSHSLQQGQQPTSLHTTVA

SEQ ID NO: 5681 - protein, 129 aa, Homo sapiens
MARGSLRRLLRLLVLGLWLALLRSVAGEQAPGTAPCSRGSSWSADLDKCMDCASCRARPHSDFCLGCAAAPPAPFRLLWPILGGALSLTFVLGLLSGFLVWRRCRRREKFTTPIEETGGEGCPAVALIQ

SEQ ID NO: 5682 - protein, 929 aa, Homo sapiens
MSQPIMVQRRSGQGFHGNSEVNAILSPRSESGGLGVSMVEYVLSSSPADKLDSRFRKGNFGTRDAETDGPEKGDQKGKASPFEEDQNRDLKQGDDDDSKINGRGLPNGMDADCKDFNRTPGSRQASPTEVVERLGPNTNPSEGLGPLPNPTANKPLVEEFSNPETQNLDAMEQVGLESLQFDYPGNQVPMDSSGATVGLFDYNSQQQLFQRTNALTVQQLTAAQQQQYALAAAQQPHIAGVFSAGLAPAAFVPNPYIISAAPPGTDPYTAAGLAAAATLAGPAVVPPQYYGVPWGVYPANLFQQQAAAAANNTASQQAASQAQPGQQQVLRAGAGQRPLTPNQGQQGQQAESLAAAAAANPTLAFGQGLATGMPGYQVLAPTAYYDQTGALVVGPGARTGLGAPVRLMAPTPVLISSAAAQAAAAAAAGGTASSLTGSTNGLFRPIGTQPPQQQQQQPSTNLQSNSFYGSSSLTNSSQSSSLFSHGPGQPGSTSLGFGSGNSLGAAIGSALSGFGSSGGLTNGSGRYISAAPGAEAKYRSASSTSSLFSSSSQLFPPSRLRYNRSDIMPSGRSRLLEDFRNNRFPNLQLRDLIGHIVEFSQDQHGSRFIQQKLERATPAERQMVFNEILQAAYQLMTDVFGNYVIQKFFEFGSLDQKLALATRIRGHVLPLALQMYGCRVIQKALESISSDQQSEMVKELDGHVLKCVKDQNGNHVVQKCIECVQPQSLQFIIDAFKGQVFVLSTHPYGCRVIQRILEHCTAEQTLPILEELHQHTEQLVQDQYGNYVIQHVLEHGRPEDKSKIVSEIRGKVLALSQHKFASNVVEKCVTHASRAERALLIDEVCCQNDGPHSALYTMMKDQYANYVVQKMIDMAEPAQRKIIMHKIRPHITTLRKYTYGKHILAKLEKYYLKNSPDLGPIGGPPNGML

SEQ ID NO: 5683 - protein, 1119 aa, Homo sapiens
MSAPSLRARAAGLGLLLCAVLGRAGRSDSGGRGELGQPSGVAAERPCPTTCRCLGDLLDCSRKRLARLPEPLPSWVARLDLSHNRLSFIKASSMSHLQSLREVKLNNNELETIPNLGPVSANITLLSLAGNRIVEILPEHLKEFQSLETLDLSSNNISELQTAFPALQLKYLYLNSNRVTSMEPGYFDNLANTLLVLKLNRNRISAIPPKMFKLPQLQHLELNRNKIKNVDGLTFQGLGALKSLKMQRNGVTKLMDGAFWGLSNMEILQLDHNNLTEITKGWLYGLLMLQELHLSQNAINRISPDAWEFCQKLSELDLTFNHLSRLDDSSFLGLSLLNTLHIGNNRVSYIADCAFRGLSSLKTLDLKNNEISWTIEDMNGAFSGLDKLRRLILQGNRIRSITKKAFTGLDALEHLDLSDNAIMSLQGNAFSQMKKLQQLHLNTSSLLCDCQLKWLPQWVAENNFQSFVNASCAHPQLLKGRSIFAVSPDGFVCDDFPKPQITVQPETQSAIKGSNLSFICSAASSSDSPMTFAWKKDNELLHDAEMENYAHLRAQGGEVMEYTTILRLREVEFASEGKYQCVISNHFGSSYSVKAKLTVNMLPSFTKTPMDLTIRAGAMARLECAAVGHPAPQIAWQKDGGTDFPAARERRMHVMPEDDVFFIVDVKIEDIGVYSCTAQNSAGSISANATLTVLETPSFLRPLLDRTVTKGETAVLQCIAGGSPPPKLNWTKDDSPLVVTERHFFAAGNQLLIIVDSDVSDAGKYTCEMSNTLGTERGNVRLSVIPTPTCDSPQMTAPSLDDDGWATVGVVIIAVVCCVVGTSLVWVVIIYHTRRRNEDCSITNTDETNLPADIPSYLSSQGTLADRQDGYVSSESGSHHQFVTSSGAGFFLPQHDSSGTCHIDNSSEADVEAATDLFLCPFLGSTGPMYLKGNVYGSDPFETYHTGCSPDPRTVLMDHYEPSYIKKKECYPCSHPSEESCERSFSNISWPSHVRKLLNTSYSHNEGPGMKNLCLNKSSLDFSANPEPASVASSNSFMGTFGKALRRPHLDAYSSFGQPSDCQPRAFYLKAHSSPDLDSGSEEDGKERTDFQEENHICTFKQTLENYRTPNFQSYDLDT

SEQ ID NO: 5684 - protein, 234 aa, Homo sapiens
MEQRPRGCAAVAAALLLVLLGARAQGGTRSPRCDCAGDFHKKIGLFCCRGCPADEAGMEALTPPPATHLSPLDSAHTLLAPPDSSEKICTVQLVGNSWTPGYPETQEALCPQVTWSWDQLPSRALGPAAAPTLSPESPAGSPAMMLQPGPQLYDVMDAVPARRWKEFVRTLGLREAEIEAVEVEIGRFRDQQYEMLKRWRQQQPAGLGAVYAALERMGLDGCVEDLRSRLQRGP

SEQ ID NO: 5685 - protein, 747 aa, Homo sapiens
MVPGSEGPARAGSVVADVVFVIEGTANLGPYFEGLRKHYLLPAIEYFNGGPPAETDFGGDYGGTQYSLVVFNTVDCAPESYVQCHAPTSSAYEFVTWLDGIKFMGGGGESCSLIAEGLSTALQLFDDFKKMREQIGQTHRVCLLICNSPPYLLPAVESTTYSGCTTENLVQQIGERGIHFSIVSPRKLPALRLLFEKAAPPALLEPLQPPTDVSQDPRHMVLVRGLVLPVGGGSAPGPLQSKQPVPLPPAAPSGATLSAAPQQPLPPVPPQYQVPGNLSAAQVAAQNAVEAAKNQKAGLGPRFSPITPLQQAAPGVGPPFSQAPAPQLPPGPPGAPKPPPASQPSLVSTVAPGSGLAPTAQPGAPSMAGTVAPGGVSGPSPAQLGAPALGGQQSVSNKLLAWSGVLEWQEKPKPASVDANTKLTRSLPCQVYVNHGENLKTEQWPQKLIMQLIPQQLLTTLGPLFRNSRMVQFHFTNKDLESLKGLYRIMGNGFAGCVHFPHTAPCEVRVLMLLYSSKKKIFMGLIPYDQSGFVNGIRQVITNHKQVQQQKLEQQQRGMGGQQAPPGLGPILEDQARPSQNLLQLRPPQPQPQGTVGASGATGQPQPQGTAQPPPGAPQGPPGAASGPPPPGPILRPQNPGANPQLRSLLLNPPPPQTGVPPPQASLHHLQPPGAPALLPPPHQGLGQPQLGPPLLHPPPAQSWPAQLPPRAPLPGQMLLSGGPRGPVPQPGLQPSVMEDDILMDLI

SEQ ID NO: 5686 - protein, 776 aa, Homo sapiens
MSSTRSQNPHGLKQIGLDQIWDDLRAGIQQVYTRQSMAKSRYMELYTHVYNYCTSVHQSNQARGAGVPPSKSKKGQTPGGAQFVGLELYKRLKEFLKNYLTNLLKDGEDLMDESVLKFYTQQWEDYRFSSKVLNGICAYLNRHWVRRECDEGRKGIYEIYSLALVTWRDCLFRPLNKQVTNAVLKLIEKERNGETINTRLISGVVQSYVELGLNEDDAFAKGPTLTVYKESFESQFLADTERFYTRESTEFLQQNPVTEYMKKAEARLLEEQRRVQVYLHESTQDELARKCEQVLIEKHLEIFHTEFQNLLDADKNEDLGRMYNLVSRIQDGLGELKKLLETHIHNQGLAAIEKCGEAALNDPKMYVQTVLDVHKKYNALVMSAFNNDAGFVAALDKACGRFINNNAVTKMAQSSSKSPELLARYCDSLLKKSSKNPEEAELEDTLNQVMVVFKYIEDKDVFQKFYAKMLAKRLVHQNSASDDAEASMISKLKQACGFEYTSKLQRMFQDIGVSKDLNEQFKKHLTNSEPLDLDFSIQVLSSGSWPFQQSCTFALPSELERSYQRFTAFYASRHSGRKLTWLYQLSKGELVTNCFKNRYTLQASTFQMAILLQYNTEDAYTVQQLTDSTQIKMDILAQVLQILLKSKLLVLEDENANVDEVELKPDTLIKLYLGYKNKKLRVNINVPMKTEQKQEQETTHKNIEEDRKLLIQAAIVRIMKMRKVLKHQQLLGEVLTQLSSRFKPRVPVIKKCIDILIEKEYLERVDGEKDTYSYLA

SEQ ID NO: 5687 - protein, 156 aa, Homo sapiens
MSGGLLKALRSDSYVELSQYRDQHFRGDNEEQEKLLKKSCTLYVGNLSFYTTEEQIYELFSKSGDIKKIIMGLDKMKKTACGFCFVEYYSRADAENAMRYINGTRLDDRIIRTDWDAGFKEGRQYGRGRSGGQVRDEYRQDYDAGRGGYGKLAQNQ

SEQ ID NO: 5688 - protein, 348 aa, Homo sapiens
MFGPAKGRHFGVHPAPGFPGGVSQQAAGTKAGPAGAWPVGSRTDTMWRLRCKAKDGTHVLQGLSSRTRVRELQGQIAAITGIAPGGQRILVGYPPECLDLSNGDTILEDLPIQSGDMLIIEEDQTRPRSSPAFTKRGASSYVRETLPVLTRTVVPADNSCLFTSVYYVVEGGVLNPACAPEMRRLIAQIVASDPDFYSEAILGKTNQEYCDWIKRDDTWGGAIEISILSKFYQCEICVVDTQTVRIDRFGEDAGYTKRVLLIYDGIHYDPLQRNFPDPDTPPLTIFSSNDDIVLVQALELADEARRRRQFTDVNRFTLRCMVCQKGLTGQAEAREHAKETGHTNFGEV

SEQ ID NO: 5689 - protein, 239 aa, Homo sapiens
MGNSALRAHVETAQKTGVFQLKDRGLTEFPADLQKLTSNLRTIDLSNNKIESLPPLLIGKFTLLKSLSLNNNKLTVLPDEICNLKKLETLSLNNNHLRELPSTFGQLSALKTLSLSGNQLGALPPQLCSLRHLDVMDLSKNQIRSIPDSVGELQVIELNLNQNQISQISVKISCCPRLKILRLEENCLELSMLPQSILSDSQICLLAVEGNLFEIKKLRELEGYDKYMERFTATKKKFA

SEQ ID NO: 5690 - protein, 484 aa, Homo sapiens
MRHSKRTYCPDWDDKDWDYGKWRSSSSHKRRKRSHSSAQENKRCKYNHSKMCDSHYLESRSINEKDYHSRRYIDEYRNDYTQGCEPGHRQRDHESRYQNHSSKSSGRSGRSSYKSKHRIHHSTSHRRSHGKSHRRKRTRSVEDDEEGHLICQSGDVLSARYEIVDTLGEGAFGKVVECIDHKAGGRHVAVKIVKNVDRYCEAARSEIQVLEHLNTTDPNSTFRCVQMLEWFEHHGHICIVFELLGLSTYDFIKENGFLPFRLDHIRKMAYQICKSVNFLHSNKLTHTDLKPENILFVQSDYTEAYNPKIKRDERTLINPDIKVVDFGSATYDDEHHSTLVSTRHYRAPEVILALGWSQPCDVWSIGCILIEYYLGFTVFPTHDSKEHLAMMERILGPLPKHMIQKTRKRKYFHHDRLDWDEHSSAGRYVSRRCKPLKEFMLSQDVEHERLFDLIQKMLEYDPAKRITLREALKHPFFDLLKKSI

SEQ ID NO: 5691 - protein, 455 aa, Homo sapiens
MAQHFSLAACDVVGFDLDHTLCRYNLPESAPLIYNSFAQFLVKEKGYDKELLNVTPEDWDFCCKGLALDLEDGNFLKLANNGTVLRASHGTKMMTPEVLAEAYGKKEWKHFLSDTGMACRSGKYYFYDNYFDLPGALLCARVVDYLTKLNNGQKTFDFWKDIVAAIQHNYKMSAFKENCGIYFPEIKRDPGRYLHSCPESVKKWLRQLKNAGKILLLITSSHSDYCRLLCEYILGNDFTDLFDIVITNALKPGFFSHLPSQRPFRTLENDEEQEALPSLDKPGWYSQGNAVHLYELLKKMTGKPEPKVVYFGDSMHSDIFPARHYSNWETVLILEELRGDEGTRSQRPEESEPLEKKGKYEGPKAKPLNTSSKKWGSFFIDSVLGLENTEDSLVYTWSCKRISTYSTIAIPSIEAIAELPLDYKFTRFSSSNSKTAGYYPNPPLVLSSDETLISK

SEQ ID NO: 5692 - protein, 427 aa, Homo sapiens
MSLMVVSMACVGLFLVQRAGPHMGGQDKPFLSAWPSAVVPRGGHVTLRCHYRHRFNNFMLYKEDRIHIPIFHGRIFQESFNMSPVTTAHAGNYTCRGSHPHSPTGWSAPSNPVVIMVTGNHRKPSLLAHPGPLVKSGERVILQCWSDIMFEHFFLHKEGISKDPSRLVGQIHDGVSKANFSIGPMMLALAGTYRCYGSVTHTPYQLSAPSDPLDIVVTGPYEKPSLSAQPGPKVQAGESVTLSCSSRSSYDMYHLSREGGAHERRLPAVRKVNRTFQADFPLGPATHGGTYRCFGSFRHSPYEWSDPSDPLLVSVTGNPRHLHILIGTSVVIILFILLLFFLLHLWCSNKKNAAVMDQEPAGNRTANSEDSDEQDPEEVTYAQLDHCVFTQRKITRPSQRPKTPPTDTILYTELPNAKPRSKVVSCP

SEQ ID NO: 5693 - protein, 153 aa, Homo sapiens
MNVGVAHSEVNPNTRVMNSRGMWLTYALGVGLLHIVLLSIPFFSVPVAWTLTNIIHNLGMYVFLHAVKGTPFETPDQGKARLLTHWEQLDYGVQFTSSRKFFTISPIILYFLASFYTKYDPTHFILNTASLLSVLIPKMPQLHGVRIFGINKY

SEQ ID NO: 5694 - protein, 442 aa, Homo sapiens
MSDSAGGRAGLRRYPKLPVWVVEDHQEVLPFIYRAIGSKHLPASNVSFLHFDSHPDLLIPVNMPADTVFDKETLFGELSIENWIMPAVYAGHFSHVIWFHPTWAQQIREGRHHFLVGKDTSTTTIRVTSTDHYFLSDGLYVPEDQLENQKPLQLDVIMVKPYKLCNNQEENDAVSSAKKPKLALEDSENTASTNCDSSSEGLEKDTATQRSDQTCLEPSCSCSSENQECQTAASTGEILEILKKGKAFVLDIDLDFFSVKNPFKEMFTQEEYKILQELYQFKKPGTNLTEEDLVDIVDTRIHQLEDLEATFADLCDGDDEETVQRWASNPGMESLVPLVQSLKKRMEVPDYEMVHQAGLTCDYSELPHHISTEQEIECLIQSVHYLLKNLPNPTLVTIARSSLDDYCPSDQVDTIQEKVLNMLRALYGNLDLQVYAAESPPS

SEQ ID NO: 5695 - protein, 236 aa, Homo sapiens
MAAFSKYLTARNSSLAGAAFLLLCLLHKRRRALGLHGKKSGKPPLQNNEKEGKKERAVVDKVFFSRLIQILKIMVPRTFCKETGYLVLIAVMLVSRTYCDVWMIQNGTLIESGIIGRSRKDFKRYLLNFIAAMPLISLVNNFLKYGLNELKLCFRVRLTKYLYEEYLQAFTYYKMGNLDNRIANPDQLLTQDVEKFCNSVVDLYSNLSKPFLDIVLYIFKLTSAIGAQVLGKILWH

SEQ ID NO: 5696 - protein, 1913 aa, Homo sapiens
MRELEAKATKDVERNLSRDLVQEEEQLMEEKKKKKDDKKKKEAAQKKATEQKIKVPEQIKPSVSQPQPANSNNGTSTATSTNNNAKRATANNQQPQQQQQQQQPQQQQPQQQPQPQPQQQQPQQQPQALPRYPREVPPRFRHQEHKQLLKRGQHFPVIAANLGSAVKVLNSQSESSALTNQQPQNNGEVQNSKNQSDINHSTSGSHYENSQRGPVSSTSDSSTNCKNAVVSDLSEKEAWPSAPGSDPELASECMDADSASSSESERNITIMASGNTGGEKDGLRNSTGLGSQNKFVVGSSSNNVGHGSSTGPWGFSHGAIISTCQVSVDAPESKSESSNNRMNAWGTVSSSSNGGLNPSTLNSASNHGAWPVLENNGLALKGPVGSGSSGINIQCSTIGQMPNNQSINSKVSGGSTHGTWGSLQETCESEVSGTQKVSFSGQPQNITTEMTGPNNTTNFMTSSLPNSGSVQNNELPSSNTGAWRVSTMNHPQMQAPSGMNGTSLSHLSNGESKSGGSYGTTWGAYGSNYSGDKCSGPNGQANGDTVNATLMQPGVNGPMGTNFQVNTNKGGGVWESGAANSQSTSWGSGNGANSGGSRRGWGTPAQNTGTNLPSVEWNKLPSNQHSNDSANGNGKTFTNGWKSTEEEDQGSATSQTNEQSSVWAKTGGTVESDGSTESTGRLEEKGTGESQSRDRRKIDQHTLLQSIVNRTDLDPRVLSNSGWGQTPIKQNTAWDTETSPRGERKTDNGTEAWGSSATQTFNSGACIDKTSPNGNDTSSVSGWGDPKPALRWGDSKGSNCQGGWEDDSAATGMVKSNQWGNCKEEKAAWNDSQKNKQGWGDGQKSSQGWSVSASDNWGETSRNNHWGEANKKSSSGGSDSDRSVSGWNELGKTSSFTWGNNINPNNSSGWDESSKPTPSQGWGDPPKSNQSLGWGDSSKPVSSPDWNKQQDIVGSWGIPPATGKPPGTGWLGGPIPAPAKEEEPTGWEEPSPESIRRKMEIDDGTSAWGDPSKYNYKNVNMWNKNVPNGNSRSDQQAQVHQLLTPASAISNKEASSGSGWGEPWGEPSTPATTVDNGTSAWGKPIDSGPSWGEPIAAASSTSTWGSSSVGPQALSKSGPKSMQDGWCGDDMPLPGNRPTGWEEEEDVEIGMWNSNSSQELNSSLNWPPYTKKMSSKGLSGKKRRRERGMMKGGNKQEEAWINPFVKQFSNISFSRDSPEENVQSNKMDLSGGMLQDKRMEIDKHSLNIGDYNRTVGKGPGSRPQISKESSMERNPYFDKNGNPSMFGVGNTAAQPRGMQQPPAQPLSSSQPNLRAQVPPPLLSPQVPVSLLKYAPNNGGLNPLFGPQQVAMLNQLSQLNQLSQISQLQRLLAQQQRAQSQRSVPSGNRPQQDQQGRPLSVQQQMMQQSRQLDPNLLVKQQTPPSQQQPLHQPAMKSFLDNVMPHTTPELQKGPSPINAFSNFPIGLNSNLNVNMDMNSIKEPQSRLRKWTTVDSISVNTSLDQNSSKHGAISSGFRLEESPFVPYDFMNSSTSPASPPGSIGDGWPRAKSPNGSSSVNWPPEFRPGEPWKGYPNIDPETDPYVTPGSVINNLSINTVREVDHLRDRNSGSSSSLNTTLPSTSAWSSIRASNYNVPLSSTAQSTSARNSDSKLTWSPGSVTNTSLAHELWKVPLPPKNITAPSRPPPGLTGQKPPLSTWDNSPLRIGGGWGNSDARYTPGSSWGESSSGRITNWLVLKNLTPQIDGSTLRTLCMQHGPLITFHLNLPHGNALVRYSSKEEVVKAQKSLHMCVLGNTTILAEFASEEEISRFFAQSQSLTPSPGWQSLGSSQSRLGSLDCSHSFSSRTDLNHWNGAGLSGTNCGDLHGTSLWGTPHYSTSLWGPPSSSDPRGISSPSPINAFLSVDHLGGGGESM

SEQ ID NO: 5697 - protein, 329 aa, Homo sapiens
MGRTSKDKRDVYYRLAKENGWRARSAFKLLQLDKEFQLFQGVTRAVDLCAAPGSWSQVLSQKIGGQGSGHVVAVDLQAMAPLPGVVQIQGDITQLSTAKEIIQHFKGCPADLVVCDGAPDVTGLHDVDEYMQAQLLLAALNIATHVLKPGGCFVAKIFRGRDVTLLYSQLQVFFSSVLCAKPRSSRNSSIEAFAVCQGYDPPEGFIPDLSKPLLDHSYDPDFNQLDGPTRIIVPFVTCGDLSSYDSDRSYPLDLEGGSEYKYTPPTQPPISPPYQEACTLKRKGQLAKEIRPQDCPISRVDTFPQPLAAPQCHTLLAPEMEDNEMSCSP

SEQ ID NO: 5698 - protein, 437 aa, Homo sapiens
MAEAEEDCHSDTVRADDDEENESPAETDLQAQLQMFRAQWMFELAPGVSSSNLENRPCRAARGSLQKTSADTKGKQEQAKEEKARELFLKAVEEEQNGALYEAIKFYRRAMQLVPDIEFKITYTRSPDGDGVGNSYIEDNDDDSKMADLLSYFQQQLTFQESVLKLCQPELESSQIHISVLPMEVLMYIFRWVVSSDLDLRSLEQLSLVCRGFYICARDPEIWRLACLKVWGRSCIKLVPYTSWREMFLERPRVRFDGVYISKTTYIRQGEQSLDGFYRAWHQVEYYRYIRFFPDGHVMMLTTPEEPQSIVPRLRTRNTRTDAILLGHYRLSQDTDNQTKVFAVITKKKEEKPLDYKYRYFRRVPVQEADQSFHVGLQLCSSGHQRFNKLIWIHHSCHITYKSTGETAVSAFEIDKMYTPLFFARVRSYTAFSERPL

SEQ ID NO: 5699 - protein, 184 aa, Homo sapiens
MVRKLKFHEQKLLKQVDFLNWEVTDHNLHELRVLRRYRLQRREDYTRYNQLSRAVRELARRLRDLPERDQFRVRASAALLDKLYALGLVPTRGSLELCDFVTASSFCRRRLPTVLLKLRMAQHLQAAVAFVEQGHVRVGPDVVTDPAFLVTRSMEDFVTWVDSSKIKRHVLEYNEERDDFDLEA

SEQ ID NO: 5700 - protein, 705 aa, Homo sapiens
MTIEDLPDFPLEGNPLFGRYPFIFSASDTPVIFSISAAPMPSDCEFSFFDPNDASCQEILFDPKTSVSELFAILRQWVPQVQQNIDIIGNEILKRGCNVNDRDGLTDMTLLHYTCKSGAHGIGDVETAVKFATQLIDLGADISLRSRWTNMNALHYAAYFDVPELIRVILKTSKPKDVDATCSDFNFGTALHIAAYNLCAGAVKCLLEQGANPAFRNDKGQIPADVVPDPVDMPLEMADAAATAKEIKQMLLDAVPLSCNISKAMLPNYDHVTGKAMLTSLGLKLGDRVVIAGQKVGTLRFCGTTEFASGQWAGIELDEPEGKNNGSVGKVQYFKCAPKYGIFAPLSKISKAKGRRKNITHTPSTKAAVPLIRSQKIDVAHVTSKVNTGLMTSKKDSASESTLSLPPGEELKTVTEKDVALLGSVSSCSSTSSLEHRQSYPKKQNAISSNKKTMSKSPSLSSRASAGLNSSATSTANNSRCEGELRLGERVLVVGQRLGTIRFFGTTNFAPGYWYGIELEKPHGKNDGSVGGVQYFSCSPRYGIFAPPSRVQRVTDSLDTLSEISSNKQNHSYPGFRRSFSTTSASSQKEINRRNAFSKSKAALRRSWSSTPTAGGIEGSVKLHEGSQVLLTSSNEMGTVRYVGPTDFASGIWLGLELRSAKGKNDGSVGDKRYFTCKPNHGVLVRPSRVTYRGINGSKLVDENC

SEQ ID NO: 5701 - protein, 620 aa, Homo sapiens
MSPPSPGRRREQRRPRAAATMATPLPGRAGGPATPLSPTRLSRLQEKEELRELNDRLAHYIDRVRALELENDRLLLKISEKEEVTTREVSGIKALYESELADARRVLDETARERARLQIEIGKLRAELDEVNKSAKKREGELTVAQGRVKDLESLFHRSEVELAAALSDKRGLESDVAELRAQLAKAEDGHAVAKKQLEKETLMRVDLENRCQSLQEELDFRKSVFEEEVRETRRRHERRLVEVDSSRQQEYDFKMAQALEELRSQHDEQVRLYKLELEQTYQAKLDSAKLSSDQNDKAASAAREELKEARMRLESLSYQLSGLQKQASAAEDRIRELEEAMAGERDKFRKMLDAKEQEMTEMRDVMQQQLAEYQELLDVKLALDMEINAYRKLLEGEEERLKLSPSPSSRVTVSRATSSSSGSLSATGRLGRSKRKRLEVEEPLGSGPSVLGTGTGGSGGFHLAQQASASGSVSIEEIDLEGKFVQLKNNSDKDQSLGNWRIKRQVLEGEEIAYKFTPKYILRAGQMVTVWAAGAGVAHSPPSTLVWKGQSSWGTGESFRTVLVNADGEEVAMRTVKKSSVMRENENGEEEEEEAEFGEEDLFHQQGDPRTTSRGCYVM

SEQ ID NO: 5702 - protein, 338 aa, Homo sapiens
MLSALARPASAALRRSFSTSAQNNAKVAVLGASGGIGQPLSLLLKNSPLVSRLTLYDIAHTPGVAADLSHIETKAAVKGYLGPEQLPDCLKGCDVVVIPAGVPRKPGMTRDDLFNTNATIVATLTAACAQHCPEAMICVIANPVNSTIPITAEVFKKHGVYNPNKIFGVTTLDIVRANTFVAELKGLDPARVNVPVIGGHAGKTIIPLISQCTPKVDFPQDQLTALTGRIQEAGTEVVKAKAGAGSATLSMAYAGARFVFSLVDAMNGKEGVVECSFVKSQETECTYFSTPLLLGKKGIEKNLGIGKVSSFEEKMISDAIPELKASIKKGEDFVKTLK

SEQ ID NO: 5703 - protein, 450 aa, Homo sapiens
MSDFSEELKGPVTDDEEVETSVLSGAGMHFPWLQTYVETVAIGGKRRKDFAQTTSACLSFIQEALLKHQWQQAAEYMYSYFQTLEDSDSYKRQAAPEIIWKLGSEILFYHPKSNMESFNTFANRMKNIGVMNYLKISLQHALYLLHHGMLKDAKRNLSEAETWRHGENTSSREILINLIQAYKGLLQYYTWSEKKMELSKLDKDDYAYNAVAQDVFNHSWKTSANISALIKIPGVWDPFVKSYVEMLEFYGDRDGAQEVLTNYAYDEKFPSNPNAHIYLYNFLKRQKAPRSKLISVLKILYQIVPSHKLMLEFHTLLRKSEKEEHRKLGLEVLFGVLDFAGCTKNITAWKYLAKYLKNILMGNHLAWVQEEWNSRKNWWPGFHFSYFWAKSDWKEDTALACEKAFVAGLLLGKGCRYFRYILKQDHQILGKKIKRMKRSVKKYSIVNPRL

SEQ ID NO: 5704 - protein, 290 aa, Homo sapiens
MPLLTLYLLLFWLSGYSIVTQITGPTTVNGLERGSLTVQCVYRSGWETYLKWWCRGAIWRDCKILVKTSGSEQEVKRDRVSIKDNQKNRTFTVTMEDLMKTDADTYWCGIEKTGNDLGVTVQVTIDPAPVTQEETSSSPTLTGHHLDNRHKLLKLSVLLPLIFTILLLLLVAASLLAWRMMKYQQKAAGMSPEQVLQPLEGDLCYADLTLQLAGTSPQKATTKLSSAQVDQVEVEYVTMASLPKEDISYASLTLGAEDQEPTYCNMGHLSSHLPGRGPEEPTEYSTISRP

SEQ ID NO: 5705 - protein, 2024 aa, Homo sapiens
MATGGGPFEDGMNDQDLPNWSNENVDDRLNNMDWGAQQKKANRSSEKNKKKFGVESDKRVTNDISPESSPGVGRRRTKTPHTFPHSRYMSQMSVPEQAELEKLKQRINFSDLDQRSIGSDSQGRATAANNKRQLSENRKPFNFLPMQINTNKSKDASTNPPNRETIGSAQCKELFASALSNDLLQNCQVSEEDGRGEPAMESSQIVSRLVQIRDYITKASSMREDLVEKNERSANVERLTHLIDHLKEQEKSYMKFLKKILARDPQQEPMEEIENLKKQHDLLKRMLQQQEQLRALQGRQAALLALQHKAEQAIAVMDDSVVAETAGSLSGVSITSELNEELNDLIQRFHNQLRDSQPPAVPDNRRQAESLSLTREVSQSRKPSASERLPDEKVELFSKMRVLQEKKQKMDKLLGELHTLRDQHLNNSSSSPQRSVDQRSTSAPSASVGLAPVVNGESNSLTSSVPYPTASLVSQNESENEGHLNPSEKLQKLNEVRKRLNELRELVHYYEQTSDMMTDAVNENRKDEETEESEYDSEHENSEPVTNIRNPQVASTWNEVNSHSNAQCVSNNRDGRTVNSNCEINNRSAANIRALNMPPSLDCRYNREGEQEIHVAQGEDDEEEEEEAEEEGVSGASLSSHRSSLVDEHPEDAEFEQKINRLMAAKQKLRQLQDLVAMVQDDDAAQGVISASASNLDDFYPAEEDTKQNSNNTRGNANKTQKDTGVNEKAREKFYEAKLQQQQRELKQLQEERKKLIDIQEKIQALQTACPDLQLSAASVGNCPTKKYMPAVTSTPTVNQHETSTSKSVFEPEDSSIVDNELWSEMRRHEMLREELRQRRKQLEALMAEHQRRQGLAETASPVAVSLRSDGSENLCTPQQSRTEKTMATWGGSTQCALDEEGDEDGYLSEGIVRTDEEEEEEQDASSNDNFSVCPSNSVNHNSYNGKETKNRWKNNCPFSADENYRPLAKTRQQNISMQRQENLRWVSELSYVEEKEQWQEQINQLKKQLDFSVSICQTLMQDQQTLSCLLQTLLTGPYSVMPSNVASPQVHFIMHQLNQCYTQLTWQQNNVQRLKQMLNELMRQQNQHPEKPGGKERGSSASHPPSPSLFCPFSFPTQPVNLFNIPGFTNFSSFAPGMNFSPLFPSNFGDFSQNISTPSEQQQPLAQNSSGKTEYMAFPKPFESSSSIGAEKPRNKKLPEEEVESSRTPWLYEQEGEVEKPFIKTGFSVSVEKSTSSNRKNQLDTNGRRRQFDEESLESFSSMPDPVDPTTVTKTFKTRKASAQASLASKDKTPKSKSKKRNSTQLKSRVKNIRYESASMSSTCEPCKSRNRHSAQTEEPVQAKVFSRKNHEQLEKIIKCNRSTEISSETGSDFSMFEALRDTIYSEVATLISQNESRPHFLIELFHELQLLNTDYLRQRALYALQDIVSRHISESHEKGENVKSVNSGTWIASNSELTPSESLATTDDETFEKNFERETHKISEQNDADNASVLSVSSNFEPFATDDLGNTVIHLDQALARMREYERMKTEAESNSNMRCTCRIIEDGDGAGAGTTVNNLEETPVIENRSSQQPVSEVSTIPCPRIDTQQLDRQIKAIMKEVIPFLKEHMDEVCSSQLLTSVRRMVLTLTQQNDESKEFVKFFHKQLGSILQDSLAKFAGRKLKDCGEDLLVEISEVLFNELAFFKLMQDLDNNSITVKQRCKRKIEATGVIQSCAKEAKRILEDHGSPAGEIDDEDKDKDETETVKQTQTSEVYDGPKNVRSDISDQEEDEESEGCPVSINLSKAETQALTNYGSGEDENEDEEMEEFEEGPVDVQTSLQANTEATEENEHDEQVLQRDFKKTAESKNVPLEREATSKNDQNNCPVKPCYLNILEDEQPLNSAAHKESPPTVDSTQQPNPLPLRLPEMEPLVPRVKEVKSAQETPESSLAGSPDTESPVLVNDYEAESGNISQKSDEEDFVKVEDLPLKLTIYSEADLRKKMVEEEQKNHLSGEICEMQTEELAGNSETLKEPETVGAQSI

SEQ ID NO: 5706 - protein, 535 aa, Homo sapiens
MFSWLGTDDRRRKDPEVFQTVSEGLKKLYKSKLLPLEEHYRFHEFHSPALEDADFDNKPMVLLVGQYSTGKTTFIRYLLEQDFPGMRIGPEPTTDSFIAVMQGDMEGIIPGNALVVDPKKPFRKLNAFGNAFLNRFVCAQLPNPVLESISVIDTPGILSGEKQRISRGYDFAAVLEWFAERVDRIILLFDAHKLDISDEFSEVIKALKNHEDKMRVVLNKADQIETQQLMRVYGALMWSLGKIVNTPEVIRVYIGSFWSHPLLIPDNRKLFEAEEQDLFRDIQSLPRNAALRKLNDLIKRARLAKVHAYIISSLKKEMPSVFGKDNKKKELVNNLAEIYGRIEREHQISPGDFPNLKRMQDQLQAQDFSKFQPLKSKLLEVVDDMLAHDIAQLMVLVRQEESQRPIQMVKGGAFEGTLHGPFGHGYGEGAGEGIDDAEWVVARDKPMYDEIFYTLSPVDGKITGANAKKEMVRSKLPNSVLGKIWKLADIDKDGMLDDDEFALANHLIKVKLEGHELPNELPAHLLPPSKRKVAE

SEQ ID NO: 5707 - protein, 463 aa, Homo sapiens
MAGAGERKGKKDDNGIGTAIDFVLSNARLVLGVGGAAMLGIATLAVKRMYDRAISAPTSPTRLSHSGKRSWEEPNWMGSPRLLNRDMKTGLSRSLQTLPTDSSTFDTDTFCPPRPKPVARKGQVDLKKSRLRMSLQEKLLTYYRNRAAIPAGEQARAKQAAVDICAELRSFLRAKLPDMPLRDMYLSGSLYDDLQVVTADHIQLIVPLVLEQNLWSCIPGEDTIMNVPGFFLVRRENPEYFPRGSSYWDRCVVGGYLSPKTVADTFEKVVAGSINWPAIGSLLDYVIRPAPPPEALTLEVQYERDKHLFIDFLPSVTLGDTVLVAKPHRLAQYDNLWRLSLRPAETARLRALDQADSGCRSLCLKILKAICKSTPALGHLTASQLTNVILHLAQEEADWSPDMLADRFLQALRGLISYLEAGVLPSALNPKVNLFAELTPEEIDELGYTLYCSLSEPEVLLQT

SEQ ID NO: 5708 - protein, 2725 aa, Homo sapiens
MMNNSGYSDAGLGLGDETDEMPSTEKDLAEDAPWKKIQQNTFTRWCNEHLKCVGKRLTDLQRDLSDGLRLIALLEVLSQKRMYRKFHPRPNFRQMKLENVSVALEFLEREHIKLVSIDSKAIVDGNLKLILGLIWTLILHYSISMPMWEDEDDEDARKQTPKQRLLGWIQNKVPQLPITNFNRDWQDGKALGALVDNCAPGLCPDWEAWDPNQPVENAREAMQQADDWLGVPQVIAPEEIVDPNVDEHSVMTYLSQFPKAKLKPGAPVRSKQLNPKKAIAYGPGIEPQGNTVLQPAHFTVQTVDAGVGEVLVYIEDPEGHTEEAKVVPNNDKDRTYAVSYVPKVAGLHKVTVLFAGQNIERSPFEVNVGMALGDANKVSARGPGLEPVGNVANKPTYFDIYTAGAGTGDVAVVIVDPQGRRDTVEVALEDKGDSTFRCTYRPAMEGPHTVHVAFAGAPITRSPFPVHVSEACNPNACRASGRGLQPKGVRVKEVADFKVFTKGAGSGELKVTVKGPKGTEEPVKVREAGDGVFECEYYPVVPGKYVVTITWGGYAIPRSPFEVQVSPEAGVQKVRAWGPGLETGQVGKSADFVVEAIGTEVGTLGFSIEGPSQAKIECDDKGDGSCDVRYWPTEPGEYAVHVICDDEDIRDSPFIAHILPAPPDCFPDKVKAFGPGLEPTGCIVDKPAEFTIDARAAGKGDLKLYAQDADGCPIDIKVIPNGDGTFRCSYVPTKPIKHTIIISWGGVNVPKSPFRVNVGEGSHPERVKVYGPGVEKTGLKANEPTYFTVDCSEAGQGDVSIGIKCAPGVVGPAEADIDFDIIKNDNDTFTVKYTPPGAGRYTIMVLFANQEIPASPFHIKVDPSHDASKVKAEGPGLNRTGVEVGKPTHFTVLTKGAGKAKLDVQFAGTAKGEVVRDFEIIDNHDYSYTVKYTAVQQGNMAVTVTYGGDPVPKSPFVVNVAPPLDLSKIKVQGLNSKVAVGQEQAFSVNTRGAGGQGQLDVRMTSPSRRPIPCKLEPGGGAEAQAVRYMPPEEGPYKVDITYDGHPVPGSPFAVEGVLPPDPSKVCAYGPGLKGGLVGTPAPFSIDTKGAGTGGLGLTVEGPCEAKIECQDNGDGSCAVSYLPTEPGEYTINILFAEAHIPGSPFKATIRPVFDPSKVRASGPGLERGKVGEAATFTVDCSEAGEAELTIEILSDAGVKAEVLIHNNADGTYHITYSPAFPGTYTITIKYGGHPVPKFPTRVHVQPAVDTSGVKVSGPGVEPHGVLREVTTEFTVDARSLTATGGNHVTARVLNPSGAKTDTYVTDNGDGTYRVQYTAYEEGVHLVEVLYDEVAVPKSPFRVGVTEGCDPTRVRAFGPGLEGGLVNKANRFTVETRGAGTGGLGLAIEGPSEAKMSCKDNKDGSCTVEYIPFTPGDYDVNITFGGRPIPGSPFRVPVKDVVDPGKVKCSGPGLGAGVRARVPQTFTVDCSQAGRAPLQVAVLGPTGVAEPVEVRDNGDGTHTVHYTPATDGPYTVAVKYADQEVPRSPFKIKVLPAHDASKVRASGPGLNASGIPASLPVEFTIDARDAGEGLLTVQILDPEGKPKKANIRDNGDGTYTVSYLPDMSGRYTITIKYGGDEIPYSPFRIHALPTGDASKCLVTVSIGGHGLGACLGPRIQIGQETVITVDAKAAGEGKVTCTVSTPDGAELDVDVVENHDGTFDIYYTAPEPGKYVITIRFGGEHIPNSPFHVLACDPLPHEEEPSEVPQLRQPYAPPRPGARPTHWATEEPVVPVEPMESMLRPFNLVIPFAVQKGELTGEVRMPSGKTARPNITDNKDGTITVRYAPTEKGLHQMGIKYDGNHIPGSPLQFYVDAINSRHVSAYGPGLSHGMVNKPATFTIVTKDAGEGGLSLAVEGPSKAEITCKDNKDGTCTVSYLPTAPGDYSIIVRFDDKHIPGSPFTAKITGDDSMRTSQLNVGTSTDVSLKITESDLSQLTASIRAPSGNEEPCLLKRLPNRHIGISFTPKEVGEHVVSVRKSGKHVTNSPFKILVGPSEIGDASKVRVWGKGLSEGHTFQVAEFIVDTRNAGYGGLGLSIEGPSKVDINCEDMEDGTCKVTYCPTEPGTYIINIKFADKHVPGSPFTVKVTGEGRMKESITRRRQAPSIATIGSTCDLNLKIPGNWFQMVSAQERLTRTFTRSSHTYTRTERTEISKTRGGETKREVRVEESTQVGGDPFPAVFGDFLGRERLGSFGSITRQQEGEASSQDMTAQVTSPSGKVEAAEIVEGEDSAYSVRFVPQEMGPHTVAVKYRGQHVPGSPFQFTVGPLGEGGAHKVRAGGTGLERGVAGVPAEFSIWTREAGAGGLSIAVEGPSKAEIAFEDRKDGSCGVSYVVQEPGDYEVSIKFNDEHIPDSPFVVPVASLSDDARRLTVTSLQETGLKVNQPASFAVQLNGARGVIDARVHTPSGAVEECYVSELDSDKHTIRFIPHENGVHSIDVKFNGAHIPGSPFKIRVGEQSQAGDPGLVSAYGPGLEGGTTGVSSEFIVNTLNAGSGALSVTIDGPSKVQLDCRECPEGHVVTYTPMAPGNYLIAIKYGGPQHIVGSPFKAKVTGPRLSGGHSLHETSTVLVETVTKSSSSRGSSYSSIPKFSSDASKVVTRGPGLSQAFVGQKNSFTVDCSKAGTNMMMVGVHGPKTPCEEVYVKHMGNRVYNVTYTVKEKGDYILIVKWGDESVPGSPFKVKVP

SEQ ID NO: 5709 - protein, 686 aa, Homo sapiens
MGEFKVHRVRFFNYVPSGIRCVAYNNQSNRLAVSRTDGTVEIYNLSANYFQEKFFPGHESRATEALCWAEGQRLFSAGLNGEIMEYDLQALNIKYAMDAFGGPIWSMAASPSGSQLLVGCEDGSVKLFQITPDKIQFERNFDRQKSRILSLSWHPSGTHIAAGSIDYISVFDVKSGSAVHKMIVDRQYMGVSKRKCIVWGVAFLSDGTIISVDSAGKVQFWDSATGTLVKSHLIANADVQSIAVADQEDSFVVGTAEGTVFHFQLVPVTSNSSEKQWVRTKPFQHHTHDVRTVAHSPTALISGGTDTHLVFRPLMEKVEVKNYDAALRKITFPHRCLISCSKKRQLLLFQFAHHLELWRLGSTVATGKNGDTLPLSKNADHLLHLKTKGPENIICSCISPCGSWIAYSTVSRFFLYRLNYEHDNISLKRVSKMPAFLRSALQILFSEDSTKLFVASNQGALHIVQLSGGSFKHLHAFQPQSGTVEAMCLLAVSPDGNWLAASGTSAGVHVYNVKQLKLHCTVPAYNFPVTAMAIAPNTNNLVIAHSDQQVFEYSIPDKQYTDWSRTVQKQGFHHLWLQRDTPITHISFHPKRPMHILLHDAYMFCIIDKSLPLPNDKTLLYNPFPPTNESDVIRRRTAHAFKISKIYKPLLFMDLLDERTLVAVERPLDDIIAQLPPPIKKKKFGT

SEQ ID NO: 5710 - protein, 1158 aa, Homo sapiens
MTHGEELGSDVHQDSIVLTYLEGLLMHQAAGGSGTAVDKKSAGHNEEDQNFNISGSAFPTCQSNGPVLNTHTYQGSGMLHLKKARLLQSSEDWNAAKRKRLSDSIMNLNVKKEALLAGMVDSVPKGKQDSTLLASLLQSFSSRLQTVALSQQIRQSLKEQGYALSHDSLKVEKDLRCYGVASSHLKTLLKKSKVKDQKPDTNLPDVTKNLIRDRFAESPHHVGQSGTKVMSEPLSCAARLQAVASMVEKRASPATSPKPSVACSQLALLLSSEAHLQQYSREHALKTQNANQAASERLAAMARLQENGQKDVGSYQLPKGMSSHLNGQARTSSSKLMASKSSATVFQNPMGIIPSSPKNAGYKNSLERNNIKQAANNSLLLHLLKSQTIPKPMNGHSHSERGSIFEESSTPTTIDEYSDNNPSFTDDSSGDESSYSNCVPIDLSCKHRTEKSESDQPVSLDNFTQSLLNTWDPKVPDVDIKEDQDTSKNSKLNSHQKVTLLQLLLGHKNEENVEKNTSPQGVHNDVSKFNTQNYARTSVIESPSTNRTTPVSTPPLLTSSKAGSPINLSQHSLVIKWNSPPYVCSTQSEKLTNTASNHSMDLTKSKDPPGEKPAQNEGAQNSATFSASKLLQNLAQCGMQSSMSVEEQRPSKQLLTGNTDKPIGMIDRLNSPLLSNKTNAVEENKAFSSQPTGPEPGLSGSEIENLLERRTVLQLLLGNPNKGKSEKKEKTPLRDESTQEHSERALSEQILMVKIKSEPCDDLQIPNTNVHLSHDAKSAPFLGMAPAVQRSAPALPVSEDFKSEPVSPQDFSFSKNGLLSRLLRQNQDSYLADDSDRSHRNNEMALLESKNLCMVPKKRKLYTEPLENPFKKMKNNIVDAANNHSAPEVLYGSLLNQEELKFSRNDLEFKYPAGHGSASESEHRSWARESKSFNVLKQLLLSENCVRDLSPHRSNSVADSKKKGHKNNVTNSKPEFSISSLNGLMYSSTQPSSCMDNRTFSYPGVVKTPVSPTFPEHLGCAGSRPESGLLNGCSMPSEKGPIKWVITDAEKNEYEKDSPRLTKTNPILYYMLQKGGNSVTSRETQDKDIWREASSAESVSQVTAKEELLPTAETKASFFNLRSPYNSHMGNNASRPHSANGEVYGLLGSVLTIKKESE

SEQ ID NO: 5711 - protein, 731 aa, Homo sapiens
MWSWKCLLFWAVLVTATLCTARPSPTLPEQDALPSSEDDDDDDDSSSEEKETDNTKPNPVAPYWTSPEKMEKKLHAVPAAKTVKFKCPSSGTPNPTLRWLKNGKEFKPDHRIGGYKVRYATWSIIMDSVVPSDKGNYTCIVENEYGSINHTYQLDVVERSPHRPILQAGLPANKTVALGSNVEFMCKVYSDPQPHIQWLKHIEVNGSKIGPDNLPYVQILKTAGVNTTDKEMEVLHLRNVSFEDAGEYTCLAGNSIGLSHHSAWLTVLEALEERPAVMTSPLYLEIIIYCTGAFLISCMVGSVIVYKMKSGTKKSDFHSQMAVHKLAKSIPLRRQVTVSADSSASMNSGVLLVRPSRLSSSGTPMLAGVSEYELPEDPRWELPRDRLVLGKPLGEGCFGQVVLAEAIGLDKDKPNRVTKVAVKMLKSDATEKDLSDLISEMEMMKMIGKHKNIINLLGACTQDGPLYVIVEYASKGNLREYLQARRPPGLEYCYNPSHNPEEQLSSKDLVSCAYQVARGMEYLASKKCIHRDLAARNVLVTEDNVMKIADFGLARDIHHIDYYKKTTNGRLPVKWMAPEALFDRIYTHQSDVWSFGVLLWEIFTLGGSPYPGVPVEELFKLLKEGHRMDKPSNCTNELYMMMRDCWHAVPSQRPTFKQLVEDLDRIVALTSNQEYLDLSMPLDQYSPSFPDTRSSTCSSGEDSVFSHEPLPEEPCLPRHPAQLANGGLKRR

SEQ ID NO: 5712 - protein, 457 aa, Homo sapiens
MRPPSPLPARWLCVLAGALAWALGPAGGQAARLQEECDYVQMIEVQHKQCLEEAQLENETIGCSKMWDNLTCWPATPRGQVVVLACPLIFKLFSSIQGRNVSRSCTDEGWTHLEPGPYPIACGLDDKAASLDEQQTMFYGSVKTGYTIGYGLSLATLLVATAILSLFRKLHCTRNYIHMHLFISFILRAAAVFIKDLALFDSGESDQCSEGSVGCKAAMVFFQYCVMANFFWLLVEGLYLYTLLAVSFFSERKYFWGYILIGWGVPSTFTMVWTIARIHFEDYGCWDTINSSLWWIIKGPILTSILVNFILFICIIRILLQKLRPPDIRKSDSSPYSRLARSTLLLIPLFGVHYIMFAFFPDNFKPEVKMVFELVVGSFQGFVVAILYCFLNGEVQAELRRKWRRWHLQGVLGWNPKYRHPSGGSNGATCSTQVSMLTRVSPGARRSSSFQAEVSLV

SEQ ID NO: 5713 - protein, 249 aa, Homo sapiens
MFFSAALRARAAGLTAHWGRHVRNLHKTVMQNGAGGALFVHRDTPENNPDTPFDFTPENYKRIEAIVKNYPEGHKAAAVLPVLDLAQRQNGWLPISAMNKVAEVLQVPPMRVYEVATFYTMYNRKPVGKYHIQVCTTTPCMLRNSDSILEAIQKKLGIKVGETTPDKLFTLIEVECLGACVNAPMVQINDNYYEDLTAKDIEEIIDELKAGKIPKPGPRSGRFSCEPAGGLTSLTEPPKGPGFGVQAGL

SEQ ID NO: 5714 - protein, 1188 aa, Homo sapiens
MDLPRGLVVAWALSLWPGFTDTFNMDTRKPRVIPGSRTAFFGYTVQQHDISGNKWLVVGAPLETNGYQKTGDVYKCPVIHGNCTKLNLGRVTLSNVSERKDNMRLGLSLATNPKDNSFLACSPLWSHECGSSYYTTGMCSRVNSNFRFSKTVAPALQRCQTYMDIVIVLDGSNSIYPWVEVQHFLINILKKFYIGPGQIQVGVVQYGEDVVHEFHLNDYRSVKDVVEAASHIEQRGGTETRTAFGIEFARSEAFQKGGRKGAKKVMIVITDGESHDSPDLEKVIQQSERDNVTRYAVAVLGYYNRRGINPETFLNEIKYIASDPDDKHFFNVTDEAALKDIVDALGDRIFSLEGTNKNETSFGLEMSQTGFSSHVVEDGVLLGAVGAYDWNGAVLKETSAGKVIPLRESYLKEFPEELKNHGAYLGYTVTSVVSSRQGRVYVAGAPRFNHTGKVILFTMHNNRSLTIHQAMRGQQIGSYFGSEITSVDIDGDGVTDVLLVGAPMYFNEGRERGKVYVYELRQNLFVYNGTLKDSHSYQNARFGSSIASVRDLNQDSYNDVVVGAPLEDNHAGAIYIFHGFRGSILKTPKQRITASELATGLQYFGCSIHGQLDLNEDGLIDLAVGALGNAVILWSRPVVQINASLHFEPSKINIFHRDCKRSGRDATCLAAFLCFTPIFLAPHFQTTTVGIRYNATMDERRYTPRAHLDEGGDRFTNRAVLLSSGQELCERINFHVLDTADYVKPVTFSVEYSLEDPDHGPMLDDGWPTTLRVSVPFWNGCNEDEHCVPDLVLDARSDLPTAMEYCQRVLRKPAQDCSAYTLSFDTTVFIIESTRQRVAVEATLENRGENAYSTVLNISQSANLQFASLIQKEDSDGSIECVNEERRLQKQVCNVSYPFFRAKAKVAFRLDFEFSKSIFLHHLEIELAAGSDSNERDSTKEDNVAPLRFHLKYEADVLFTRSSSLSHYEVKPNSSLERYDGIGPPFSCIFRIQNLGLFPIHGMMMKITIPIATRSGNRLLKLRDFLTDEANTSCNIWGNSTEYRPTPVEEDLRRAPQLNHSNSDVVSINCNIRLVPNQEINFHLLGNLWLRSLKALKYKSMKIMVNAALQRQFHSPFIFREEDPSRQIVFEISKQEDWQVPIWIIVGSTLGGLLLLALLVLALWKLGFFRSARRRREPGLDPTPKVLE

SEQ ID NO: 5715 - protein, 335 aa, Homo sapiens
MAAAAAQGGGGGEPRRTEGVGPGVPGEVEMVKGQPFDVGPRYTQLQYIGEGAYGMVSSAYDHVRKTRVAIKKISPFEHQTYCQRTLREIQILLRFRHENVIGIRDILRASTLEAMRDVYIVQDLMETDLYKLLKSQQLSNDHICYFLYQILRGLKYIHSANVLHRDLKPSNLLINTTCDLKICDFGLARIADPEHDHTGFLTEYVATRWYRAPEIMLNSKGYTKSIDIWSVGCILAEMLSNRPIFPGKHYLDQLNHILALDLLDRMLTFNPNKRITVEEALAHPYLEQYYDPTDEPVAEEPFTFAMELDDLPKERLKELIFQETARFQPGVLEAP

SEQ ID NO: 5716 - protein, 484 aa, Homo sapiens
MWYVSTRGVAPRVNFEGALFSGYAPDGGLFMPEELPQLDRGTLCQWSTLSYPGLVKELCALFIGSELLPKDELNDLIDRAFSRFRHREVVHLSRLRNGLNVLELWHGVTYAFKDLSLSCTTQFLQYFLEKREKHVTVVVGTSGDTGSAAIESVQGAKNMDIIVLLPKGHCTKIQELQMTTVLKQNVHVFGVEGNSDELDEPIKTVFADVAFVKKHNLMSLNSINWSRVLVQMAHHFFAYFQCTPSLDTHPLPLVEVVVPTGAAGNLAAGYIAQKIGLPIRLVVAVNRNDIIHRTVQQGDFSLSEAVKSTLASAMDIQVPYNMERVFWLLSGSDSQVTRALMEQFERTQSVNLPKELHSKLSEAVTSVSVSDEAITQTMGRCWDENQYLLCPHSAVAVNYHYQQIDRQQPSTPRCCLAPASAAKFPEAVLAAGLTPETPAEIVALEHKETRCTLMRRGDNWMLMLRDTIEDLSRQWRSHALNTSQ

SEQ ID NO: 5717 - protein, 368 aa, Homo sapiens
MWPLWRLVSLLALSQALPFEQRGFWDFTLDDGPFMMNDEEASGADTSGVLDPDSVTPTYSAMCPFGCHCHLRVVQCSDLGLKSVPKEISPDTTLLDLQNNDISELRKDDFKGLQHLYALVLVNNKISKIHEKAFSPLRKLQKLYISKNHLVEIPPNLPSSLVELRIHDNRIRKVPKGVFSGLRNMNCIEMGGNPLENSGFEPGAFDGLKLNYLRISEAKLTGIPKDLPETLNELHLDHNKIQAIELEDLLRYSKLYRLGLGHNQIRMIENGSLSFLPTLRELHLDNNKLARVPSGLPDLKLLQVVYLHSNNITKVGVNDFCPMGFGVKRAYYNGISLFNNPVPYWEVQPATFRCVTDRLAIQFGNYKK

SEQ ID NO: 5718 - protein, 611 aa, Homo sapiens
MNDISQKAEIKEMLASDDEEDVSSKVEKAYVPKLTGTVKGRFAEMEKQRQEEQRKRTEEERKRRIEQDMLEKRKIQRELAKRAEQIEDINNTGTESASEEGDDSLLITVVPVKSYKTSGKMKKNFEDLEKEREEKERIKYEEDKRIRYEEQRPSLKEAKCLSLVMDDEIESEAKKESLSPGKLKLTFEELERQRQENRKKQAEEEARKRLEEEKRAFEEARRQMVNEDEENQDTAKIFKGYRPGKLKLSFEEMERQRREDEKRKAEEEARRRIEEEKKAFAEARRNMVVDDDSPEMYKTISQEFLTPGKLEINFEELLKQKMEEEKRRTEEERKHKLEMEKQEFEQLRQEMGEEEEENETFGLSREYEELIKLKRSGSIQAKNLKSKFEKIGQLSEKEIQKKIEEERARRRAIDLEIKEREAENFHEEDDVDVRPARKSEAPFTHKVNMKARFEQMAKAREEEEQRRIEEQKLLRMQFEQREIDAALQKKREEEEEEEGSIMNGSTAEDEEQTRSGAPWFKKPLKNTSVVDSEPVRFTVKVTGEPKPEITWWFEGEILQDGEDYQYIERGETYCLYLPETFPEDGGEYMCKAVNNKGSAASTCILTIESKN

SEQ ID NO: 5719 - protein, 282 aa, Homo sapiens
MGLGLRGWGRPLLTVATALMLPVKPPGSWGAQIIGGHEVTPHSRPYMASVRFGGQHHCGGFLLRARWVVSAAHCFSHRDLRTGLVVLGAHVLSTAEPTQQVFGIDALTTHPDYHPMTHANDICLLRLNGSAVLGPAVGLLRPPGRRARPPTAGTRCRVAGWGFVSDFEELPPGLMEAKVRVLDPDVCNSSWKGHLTLTMLCTRSGDSHRRGFCSADSGGPLVCRNRAHGLVSFSGLWCGDPKTPDVYTQVSAFVAWIWDVVRRSSPQPGPLPGTTRPPGEAA

SEQ ID NO: 5720 - protein, 594 aa, Homo sapiens
MGKKSRVKTQKSGTGATATVSPKEILNLTSELLQKCSSPAPGPGKEWEEYVQIRTLVEKIRKKQKGLSVTFDGKREDYFPDLMKWASENGASVEGFEMVNFKEEGFGLRATRDIKAEELFLWVPRKLLMTVESAKNSVLGPLYSQDRILQAMGNIALAFHLLCERASPNSFWQPYIQTLPSEYDTPLYFEEDEVRYLQSTQAIHDVFSQYKNTARQYAYFYKVIQTHPHANKLPLKDSFTYEDYRWAVSSVMTRQNQIPTEDGSRVTLALIPLWDMCNHTNGLITTGYNLEDDRCECVALQDFRAGEQIYIFYGTRSNAEFVIHSGFFFDNNSHDRVKIKLGVSKSDRLYAMKAEVLARAGIPTSSVFALHFTEPPISAQLLAFLRVFCMTEEELKEHLLGDSAIDRIFTLGNSEFPVSWDNEVKLWTFLEDRASLLLKTYKTTIEEDKSVLKNHDLSVRAKMAIKLRLGEKEILEKAVKSAAVNREYYRQQMEEKAPLPKYEESNLGLLESSVGDSRLPLVLRNLEEEAGVQDALNIREAISKAKATENGLVNGENSIPNGTRSENESLNQESKRAVEDAKGSSSDSTAGVKE

SEQ ID NO: 5721 - protein, 402 aa, Homo sapiens
MAARPGPLWLLGLTLCALGGGGPGLRPPPGCPQRRLGARERRDVQREILAVLGLPGRPRPRAPPAASRLPASAPLFMLDLYHAMAGDDDEDGAPAEQRLGRADLVMSFVNMVERDRALGHQEPHWKEFRFDLTQIPAGEAVTAAEFRIYKVPSIHLLNRTLHVSMFQVVQEQSNRESDLFFLDLQTLRAGDEGWLVLDVTAASDCWLLKRHKDLGLRLYVETEDGHSVDPGLAGLLGQRAPRSQQPFVVTFFRASPSPIRTPRAVRPLRRRQPKKSNELPQANRLPGIFDDVRGSHGRQVCRRHELYVSFQDLGWLDWVIAPQGYSAYYCEGECSFPLDSCMNATNHAILQSLVHLMKPNAVPKACCAPTKLSATSVLYYDSSNNVILRKHRNMVVKACGCH

SEQ ID NO: 5722 - protein, 354 aa, Homo sapiens
MSAGGGRAFAWQVFPPMPTCRVYGTVAHQDGHLLVLGGCGRAGLPLDTAETLDMASHTWLALAPLPTARAGAAAVVLGKQVLVVGGVDEVQSPVAAVEAFLMDEGRWERRATLPQAAMGVATVERDGMVYALGGMGPDTAPQAQVRVYEPRRDCWLSLPSMPTPCYGASTFLHGNKIYVLGGRQGKLPVTAFEAFDLEARTWTRHPSLPSRRAFAGCAMAEGSVFSLGGLQQPGPHNFYSRPHFVNTVEMFDLEHGSWTKLPRSLRMRDKRADFVVGSLGGHIVAIGGLGNQPCPLGSVESFSLARRRWEALPAMPTARCSCSSLQAGPRLFVIGGVAQGPSQAVEALCLRDGV

SEQ ID NO: 5723 - protein, 554 aa, Homo sapiens
MTAPGAAGRCPPTTWLGSLLLLVCLLASRSITEEVSEYCSHMIGSGHLQSLQRLIDSQMETSCQITFEFVDQEQLKDPVCYLKKAFLLVQDIMEDTMRFRDNTPNAIAIVQLQELSLRLKSCFTKDYEEHDKACVRTFYETPLQLLEKVKNVFNETKNLLDKDWNIFSKNCNNSFAECSSQDVVTKPDCNCLYPKAIPSSDPASVSPHQPLAPSMAPVAGLTWEDSEGTEGSSLLPGEQPLHTVDPGSAKQRPPRSTCQSFEPPETPVVKDSTIGGSPQPRPSVGAFNPGMEDILDSAMGTNWVPEEASGEASEIPVPQGTELSPSRPGGGSMQTEPARPSNFLSASSPLPASAKGQQPADVTGTALPRVGPVRPTGQDWNHTPQKTDHPSALLRDPPEPGSPRISSLRPQGLSNPSTLSAQPQLSRSHSSGSVLPLGELEGRRSTRDRRSPAEPEGGPASEGAARPLPRFNSVPLTDTGHERQSEGSFSPQLQESVFHLLVPSVILVLLAVGGLLFYRWRRRSHQEPQRADSPLEQPEGSPLTQDDRQVELPV

SEQ ID NO: 5724 - protein, 468 aa, Homo sapiens
MGALARALLLPLLAQWLLRAAPELAPAPFTLPLRVAAATNRVVAPTPGPGTPAERHADGLALALEPALASPAGAANFLAMVDNLQGDSGRGYYLEMLIGTPPQKLQILVDTGSSNFAVAGTPHSYIDTYFDTERSSTYRSKGFDVTVKYTQGSWTGFVGEDLVTIPKGFNTSFLVNIATIFESENFFLPGIKWNGILGLAYATLAKPSSSLETFFDSLVTQANIPNVFSMQMCGAGLPVAGSGTNGGSLVLGGIEPSLYKGDIWYTPIKEEWYYQIEILKLEIGGQSLNLDCREYNADKAIVDSGTTLLRLPQKVFDAVVEAVARASLLYIQPMMGAGLNYECYRFGISPSTNALVIGATVMEGFYVIFDRAQKRVGFAASPCAEIAGAAVSEISGPFSTEDVASNCVPAQSLSEPILWIVSYALMSVCGAILLVLIVLLLLPFRCQRRPRDPEVVNDESSLVRHRWK

SEQ ID NO: 5725 - protein, 212 aa, Homo sapiens
MLSSVVFWGLIALIGTSRGSYPFSHSMKPHLHPRLYHGCYGDIMTMKTSGATCDANSVMNCGIRGSEMFAEMDLRAIKPYQTLIKEVGQRHCVDPAVIAAIISRESHGGSVLQDGWDHRGLKFGLMQLDKQTYHPVGAWDSKEHLSQATGILTERIKAIQKKFPTWSVAQHLKGGLSAFKSGIEAIATPSDIDNDFVNDIIARAKFYKRQSF

SEQ ID NO: 5726 - protein, 1439 aa, Homo sapiens
MSLLMFTQLLLCGFLYVRVDGSRLRQEDFPPRIVEHPSDVIVSKGEPTTLNCKAEGRPTPTIEWYKDGERVETDKDDPRSHRMLLPSGSLFFLRIVHGRRSKPDEGSYVCVARNYLGEAVSRNASLEVALLRDDFRQNPTDVVVAAGEPAILECQPPRGHPEPTIYWKKDKVRIDDKEERISIRGGKLMISNTRKSDAGMYTCVGTNMVGERDSDPAELTVFERPTFLRRPINQVVLEEEAVEFRCQVQGDPQPTVRWKKDDADLPRGRYDIKDDYTLRIKKTMSTDEGTYMCIAENRVGKMEASATLTVRAPPQFVVRPRDQIVAQGRTVTFPCETKGNPQPAVFWQKEGSQNLLFPNQPQQPNSRCSVSPTGDLTITNIQRSDAGYYICQALTVAGSILAKAQLEVTDVLTDRPPPIILQGPANQTLAVDGTALLKCKATGDPLPVISWLKEGFTFPGRDPRATIQEQGTLQIKNLRISDTGTYTCVATSSSGETSWSAVLDVTESGATISKNYDLSDLPGPPSKPQVTDVTKNSVTLSWQPGTPGTLPASAYIIEAFSQSVSNSWQTVANHVKTTLYTVRGLRPNTIYLFMVRAINPQGLSDPSPMSDPVRTQDISPPAQGVDHRQVQKELGDVLVRLHNPVVLTPTTVQVTWTVDRQPQFIQGYRVMYRQTSGLQATSSWQNLDAKVPTERSAVLVNLKKGVTYEIKVRPYFNEFQGMDSESKTVRTTEEAPSAPPQSVTVLTVGSYNSTSISVSWDPPPPDHQNGIIQEYKIWCLGNETRFHINKTVDAAIRSVIIGGLFPGIQYRVEVAASTSAGVGVKSEPQPIIIGRRNEVVITENNNSITEQITDVVKQPAFIAGIGGACWVILMGFSIWLYWRRKKRKGLSNYAVTFQRGDGGLMSNGSRPGLLNAGDPSYPWLADSWPATSLPVNNSNSGPNEIGNFGRGDVLPPVPGQGDKTATMLSDGAIYSSIDFTTKTSYNSSSQITQATPYATTQILHSNSIHELAVDLPDPQWKSSIQQKTDLMGFGYSLPDQNKGNNGGKGGKKKKNKNSSKPQKNNGSTWANVPLPPPPVQPLPGTELEHYAVEQQENGYDSDSWCPPLPVQTYLHQGLEDELEEDDDRVPTPPVRGVASSPAISFGQQSTATLTPSPREEMQPMLQAHLDELTRAYQFDIAKQTWHIQSNNQPPQPPVPPLGYVSGALISDLETDVADDDADDEEEALEIPRPLRALDQTPGSSMDNLDSSVTGSMVNGWGSASDEDRNFSSHRSSVGSSSDGSIFASGSFAQALVAAADKAGFRLDGTSLTRTGKAFTSSQRPRPTSPFSTDSNTSAALSQSQRPRPTKKHKGGRMDQQPALPHRREGMTDEEALVPYSKPSFPSPGGHSSSGTASSKGSTGPRKTEVLRAGHQRNASDLLDIGYMGSNSQGQFTGEL

SEQ ID NO: 5727 - protein, 472 aa, Homo sapiens
MMLGTEGGEGFVVKVRGLPWSCSADEVQRFFSDCKIQNGAQGIRFIYTREGRPSGEAFVELESEDEVKLALKKDRETMGHRYVEVFKSNNVEMDWVLKHTGPNSPDTANDGFVRLRGLPFGCSKEEIVQFFSGLEIVPNGITLPVDFQGRSTGEAFVQFASQEIAEKALKKHKERIGHRYIEIFKSSRAEVRTHYDPPRKLMAMQRPGPYDRPGAGRGYNSIGRGAGFERMRRGAYGGGYGGYDDYNGYNDGYGFGSDRFGRDLNYCFSGMSDHRYGDGGSTFQSTTGHCVHMRGLPYRATENDIYNFFSPLNPVRVHIEIGPDGRVTGEADVEFATHEDAVAAMSKDKANMQHRYVELFLNSTAGASGGAYEHRYVELFLNSTAGASGGAYGSQMMGGMGLSNQSSYGGPASQQLSGGYGGGYGGQSSMSGYGNQGAVNSSYYSSGSRASMGVNGMGGLSSMSSMSGGWGM

SEQ ID NO: 5728 - protein, 400 aa, Homo sapiens
MTTKNLETKVTVTSSPIRGAGDGMETEEPPKSVEVTSGVQSRKHHSLQSPWKKAVPSESPGVLQLGKMLTEKAMEVKAVRILVPKAAITHDIPNKNTKVKSLGHHKGEFLGQSEGVIEPNKELSEVKNVLEKLKNSERRLLQDKEGLSNQLRVQTEVNRELKKLLVASVGDDLQYHFERLAREKNQLILENEALGRNTAQLSEQLERMSIQCDVWRSKFLASRVMADELTNSRAALQRQNRDAHGAIQDLLSEREQFRQEMIATQKLLEELLVSLQWGREQTYSPSVQPHSTAELALTNHKLAKAVNSHLLGNVGINNQKKIPSTVEFCSTPAEKMAETVLRILDPVTCKESSPDNPFFESSPTTLLATKKNIGRFHPYTRYENITFNCCNHCRGELIAL

SEQ ID NO: 5729 - protein, 438 aa, Homo sapiens
MHPLPGYWSCYCLLLLFSLGVQGSLGAPSAAPEQVHLSYPGEPGSMTVTWTTWVPTRSEVQFGLQPSGPLPLRAQGTFVPFVDGGILRRKLYIHRVTLRKLLPGVQYVYRCGSAQGWSRRFRFRALKNGAHWSPRLAVFGDLGADNPKAVPRLRRDTQQGMYDAVLHVGDFAYNLDQDNARVGDRFMRLIEPVAASLPYMTCPGNHEERYNFSNYKARFSMPGDNEGLWYSWDLGPAHIISFSTEVYFFLHYGRHLVQRQFRWLESDLQKANKNRAARPWIITMGHRPMYCSNADLDDCTRHESKVRKGLQGKLYGLEDLFYKYGVDLQLWAHEHSYERLWPIYNYQVFNGSREMPYTNPRGPVHIITGSAGCEERLTPFAVFPRPWSAVRVKEYGYTRLHILNGTHIHIQQVSDDQDGKIVDDVWVVRPLFGRRMYL

SEQ ID NO: 5730 - protein, 201 aa, Homo sapiens
MAAAKDTHEDHDTSTENTDESNHDPQFEPIVSLPEQEIKTLEEDEEELFKMRAKLFRFASENDLPEWKERGTGDVKLLKHKEKGAIRLLMRRDKTLKICANHYITPMMELKPNAGSDRAWVWNTHADFADECPKPELLAIRFLNAENAQKFKTKFEECRKEIEEREKKAGSGKNDHAEKVAEKLEALSVKEETKEDAEEKQ

SEQ ID NO: 5731 - protein, 221 aa, Homo sapiens
MAGGVLPLRGLRALCRVLLFLSQFCILSGGESTEIPPYVMKCPSNGLCSRLPADCIDCTTNFSCTYGKPVTFDCAVKPSVTCVDQDFKSQKNFIINMTCRFCWQLPETDYECTNSTSCMTVSCPRQRYPANCTVRDHVHCLGNRTFPKMLYCNWTGGYKWSTALALSITLGGFGADRFYLGQWREGLGKLFSFGGLGIWTLIDVLLIGVGYVGPADGSLYI

SEQ ID NO: 5732 - protein, 471 aa, Homo sapiens
MDSAPLFPRPHLFQNLLLFLWALLNCGLGVSAQGPGEWTPWVSWTRCSSSCGRGVSVRSRRCLRLPGEEPCWGDSHEYRLCQLPDCPPGAVPFRDLQCALYNGRPVLGTQKTYQWVPFHGAPNQCDLNCLAEGHAFYHSFGRVLDGTACSPGAQGVCVAGRCLSAGCDGLLGSGALEDRCGRCGGANDSCLFVQRVFRDAGAFAGYWNVTLIPEGARHIRVEHRSRNHLALMGGDGRYVLNGHWVVSPPGTYEAAGTHVVYTRDTGPQETLQAAGPTSHDLLLQVLLQEPNPGIEFEFWLPRERYSPFQARVQALGWPLRQPQPRGVEPQPPAAPAVTPAQTPTLAPDPCPPCPDTRGRAHRLLHYCGSDFVFQARVLGHHHQAQETRYEVRIQLVYKNRSPLRAREYVWAPGHCPCPMLAPHRDYLMAVQRLVSPDGTQDQLLLPHAGYARPWSPAEDSRIRLTARRCPG

SEQ ID NO: 5733 - protein, 73 aa, Homo sapiens
MAPQTLLLVLVLCVLLLQAQGGYRDKMRMQRIKVCEKRPSIDLCIHHCSYFQKCETNKICCSAFCGNICMSIL

SEQ ID NO: 5734 - protein, 199 aa, Homo sapiens
MEARDKQVLRSLRLELGAEVLVEGLVLQYLYQEGILTENHIQEINAQTTGLRKTMLLLDILPSRGPKAFDTFLDSLQEFPWVREKLKKAREEAMTDLPAGDRLTGIPSHILNSSPSDRQINQLAQRLGPEWEPMVLSLGLSQTDIYRCKANHPHNVQSQVVEAFIRWRQRFGKQATFQSLHNGLRAVEVDPSLLLHMLE

SEQ ID NO: 5735 - protein, 617 aa, Homo sapiens
MAFPHRPDAPELPDFSMLKRLARDQLIYLLEQLPGKKDLFIEADLMSPLDRIANVSILKQHEVDKLYKVENKPALSSNEQLCFLVRPRIKNMRYIASLVNADKLAGRTRKYKVIFSPQKFYACEMVLEEEGIYGDVSCDEWAFSLLPLDVDLLSMELPEFFRDYFLEGDQRWINTVAQALHLLSTLYGPFPNCYGIGRCAKMAYELWRNLEEEEDGETKGRRPEIGHIFLLDRDVDFVTALCSQVVYEGLVDDTFRIKCGSVDFGPEVTSSDKSLKVLLNAEDKVFNEIRNEHFSNVFGFLSQKARNLQAQYDRRRGMDIKQMKNFVSQELKGLKQEHRLLSLHIGACESIMKKKTKQDFQELIKTEHALLEGFNIRESTSYIEEHIDRQVSPIESLRLMCLLSITENGLIPKDYRSLKTQYLQSYGPEHLLTFSNLRRAGLLTEQAPGDTLTAVESKVSKLVTDKAAGKITDAFSSLAKRSNFRAISKKLNLIPRVDGEYDLKVPRDMAYVFGGAYVPLSCRIIEQVLERRSWQGLDEVVRLLNCSDFAFTDMTKEDKASSESLRLILVVFLGGCTFSEISALRFLGREKGYRFIFLTTAVTNSARLMEAMSEVKA

SEQ ID NO: 5736 - protein, 940 aa, Homo sapiens
MPAVSKGDGMRGLAVFISDIRNCKSKEAEIKRINKELANIRSKFKGDKALDGYSKKKYVCKLLFIFLLGHDIDFGHMEAVNLLSSNRYTEKQIGYLFISVLVNSNSELIRLINNAIKNDLASRNPTFMGLALHCIASVGSREMAEAFAGEIPKVLVAGDTMDSVKQSAALCLLRLYRTSPDLVPMGDWTSRVVHLLNDQHLGVVTAATSLITTLAQKNPEEFKTSVSLAVSRLSRIVTSASTDLQDYTYYFVPAPWLSVKLLRLLQCYPPPEDPAVRGRLTECLETILNKAQEPPKSKKVQHSNAKNAVLFEAISLIIHHDSEPNLLVRACNQLGQFLQHRETNLRYLALESMCTLASSEFSHEAVKTHIETVINALKTERDVSVRQRAVDLLYAMCDRSNAPQIVAEMLSYLETADYSIREEIVLKVAILAEKYAVDYTWYVDTILNLIRIAGDYVSEEVWYRVIQIVINRDDVQGYAAKTVFEALQAPACHENLVKVGGYILGEFGNLIAGDPRSSPLIQFHLLHSKFHLCSVPTRALLLSTYIKFVNLFPEVKPTIQDVLRSDSQLRNADVELQQRAVEYLRLSTVASTDILATVLEEMPPFPERESSILAKLKKKKGPSTVTDLEDTKRDRSVDVNGGPEPAPASTSAVSTPSPSADLLGLGAAPPAPAGPPPSSGGSGLLVDVFSDSASVVAPLAPGSEDNFARFVCKNNGVLFENQLLQIGLKSEFRQNLGRMFIFYGNKTSTQFLNFTPTLICSDDLQPNLNLQTKPVDPTVEGGAQVQQVVNIECVSDFTEAPVLNIQFRYGGTFQNVSVQLPITLNKFFQPTEMASQDFFQRWKQLSNPQQEVQNIFKAKHPMDTEVTKAKIIGFGSALLEEVDPNPANFVGAGIIHTKTTQIGCLLRLEPNLQAQMYRLTLRTSKEAVSQRLCELLSAQF

SEQ ID NO: 5737 - protein, 271 aa, Homo sapiens
MAGLEVLFASAAPAITCRQDALVCFLHWEVVTHGYFGLGVGDQPGPNDKKSELLPAGWNNNKDLYVLRYEYKDGSRKLLVKAITVESSMILNVLEYGSQQVADLTLNLDDYIDAEHLGDFHRTYKNSEELRSRIVSGIITPIHEQWEKANVSSPHREFPPATAREVDPLRIPPHHPHTSRQPPWCDPLGPFVVGGEDLDPFGPRRGGMIVDPLRSGFPRALIDPSSGLPNRLPPGAVPPGARFDPFGPIGTSPPGPNPDHLPPPGYDDMYL

SEQ ID NO: 5738 - protein, 1785 aa, Homo sapiens
MGISTVILEMCLLWGQVLSTGGWIPRTTDYASLIPSEVPLDPTVAEGSPFPSESTLESTVAEGSPISLESTLESTVAEGSLIPSESTLESTVAEGSDSGLALRLVNGDGRCQGRVEILYRGSWGTVCDDSWDTNDANVVCRQLGCGWAMSAPGNAWFGQGSGPIALDDVRCSGHESYLWSCPHNGWLSHNCGHGEDAGVICSAAQPQSTLRPESWPVRISPPVPTEGSESSLALRLVNGGDRCRGRVEVLYRGSWGTVCDDYWDTNDANVVCRQLGCGWAMSAPGNAQFGQGSGPIVLDDVRCSGHESYLWSCPHNGWLTHNCGHSEDAGVICSAPQSRPTPSPDTWPTSHASTAGPESSLALRLVNGGDRCQGRVEVLYRGSWGTVCDDSWDTSDANVVCRQLGCGWATSAPGNARFGQGSGPIVLDDVRCSGYESYLWSCPHNGWLSHNCQHSEDAGVICSAAHSWSTPSPDTLPTITLPASTVGSESSLALRLVNGGDRCQGRVEVLYQGSWGTVCDDSWDTNDANVVCRQLGCGWAMSAPGNARFGQGSGPIVLDDVRCSGHESYLWSCPHNGWLSHNCGHSEDAGVICSASQSRPTPSPDTWPTSHASTAGSESSLALRLVNGGDRCQGRVEVLYRGSWGTVCDDYWDTNDANVVCRQLGCGWAMSAPGNARFGQGSGPIVLDDVRCSGHESYLWSCPHNGWLSHNCGHHEDAGVICSASQSQPTPSPDTWPTSHASTAGSESSLALRLVNGGDRCQGRVEVLYRGSWGTVCDDYWDTNDANVVCRQLGCGWATSAPGNARFGQGSGPIVLDDVRCSGHESYLWSCPHNGWLSHNCGHHEDAGVICSASQSQPTPSPDTWPTSRASTAGSESTLALRLVNGGDRCRGRVEVLYQGSWGTVCDDYWDTNDANVVCRQLGCGWAMSAPGNAQFGQGSGPIVLDDVRCSGHESYLWSCPHNGWLSHNCGHHEDAGVICSAAQSQSTPRPDTWLTTNLPALTVGSESSLALRLVNGGDRCRGRVEVLYRGSWGTVCDDSWDTNDANVVCRQLGCGWAMSAPGNARFGQGSGPIVLDDVRCSGNESYLWSCPHKGWLTHNCGHHEDAGVICSATQINSTTTDWWHPTTTTTARPSSNCGGFLFYASGTFSSPSYPAYYPNNAKCVWEIEVNSGYRINLGFSNLKLEAHHNCSFDYVEIFDGSLNSSLLLGKICNDTRQIFTSSYNRMTIHFRSDISFQNTGFLAWYNSFPSDATLRLVNLNSSYGLCAGRVEIYHGGTWGTVCDDSWTIQEAEVVCRQLGCGRAVSALGNAYFGSGSGPITLDDVECSGTESTLWQCRNRGWFSHNCNHREDAGVICSGNHLSTPAPFLNITRPNTDYSCGGFLSQPSGDFSSPFYPGNYPNNAKCVWDIEVQNNYRVTVIFRDVQLEGGCNYDYIEVFDGPYRSSPLIARVCDGARGSFTSSSNFMSIRFISDHSITRRGFRAEYYSSPSNDSTNLLCLPNHMQASVSRSYLQSLGFSASDLVISTWNGYYECRPQITPNLVIFTIPYSGCGTFKQADNDTIDYSNFLTAAVSGGIIKRRTDLRIHVSCRMLQNTWVDTMYIANDTIHVANNTIQVEEVQYGNFDVNISFYTSSSFLYPVTSRPYYVDLNQDLYVQAEILHSDAVLTLFVDTCVASPYSNDFTSLTYDLIRSGCVRDDTYGPYSSPSLRIARFRFRAFHFLNRFPSVYLRCKMVVCRAYDPSSRCYRGCVLRSKRDVGSYQEKVDVVLGPIQLQTPPRREEEPR

SEQ ID NO: 5739 - protein, 350 aa, Homo sapiens
MGPHFTLLCAALAGCLLPAEGCVICDPSVVLALKSLEKDYLPGHLDAKHHKAMMERVENAVKDFQELSLNEDAYMGVVDEATLQKGSWSLLKDLKRITDSDVKGDLFVKELFWMLHLQKETFATYVARFQKEAYCPNKCGVMLQTLIWCKNCKKEVHACRKSYDCGERNVEVPQMEDMILDCELNWHQASEGLTDYSFYRVWGNNTETLVSKGKEATLTKPMVGPEDAGSYRCELGSVNSSPATIINFHVTVLPKMIKEEKPSPNIVTPGEATTESSISLQPLQPEKMLASRLLGLLICGSLALITGLTFAIFRRRKVIDFIKSSLFGLGSGAAEQTQVPKEKATDSRQQ

SEQ ID NO: 5740 - protein, 157 aa, Homo sapiens
MATPPKRRAVEATGEKVLRYETFISDVLQRDLRKVLDHRDKVYEQLAKYLQLRNVIERLQEAKHSELYMQVDLGCNFFVDTVVPDTSRIYVALGYGFFLELTLAEALKFIDRKSSLLTELSNSLTKDSMNIKAHIHMLLEGLRELQGLQNFPEKPHH

SEQ ID NO: 5741 - protein, 508 aa, Homo sapiens
MLRRALLCLAVAALVRADAPEEEDHVLVLRKSNFAEALAAHKYLLVEFYAPWCGHCKALAPEYAKAAGKLKAEGSEIRLAKVDATEESDLAQQYGVRGYPTIKFFRNGDTASPKEYTAGREADDIVNWLKKRTGPAATTLPDGAAAESLVESSEVAVIGFFKDVESDSAKQFLQAAEAIDDIPFGITSNSDVFSKYQLDKDGVVLFKKFDEGRNNFEGEVTKENLLDFIKHNQLPLVIEFTEQTAPKIFGGEIKTHILLFLPKSVSDYDGKLSNFKTAAESFKGKILFIFIDSDHTDNQRILEFFGLKKEECPAVRLITLEEEMTKYKPESEELTAERITEFCHRFLEGKIKPHLMSQELPEDWDKQPVKVLVGKNFEDVAFDEKKNVFVEFYAPWCGHCKQLAPIWDKLGETYKDHENIVIAKMDSTANEVEAVKVHSFPTLKFFPASADRTVIDYNGERTLDGFKKFLESGGQDGAGDDDDLEDLEEAEEPDMEEDDDQKAVKDEL

SEQ ID NO: 5742 - protein, 962 aa, Homo sapiens
MDEQALLGLNPNADSDFRQRALAYFEQLKISPDAWQVCAEALAQRTYSDDHVKFFCFQVLEHQVKYKYSELTTVQQQLIRETLISWLQAQMLNPQPEKTFIRNKAAQVFALLFVTEYLTKWPKFFFDILSVVDLNPRGVDLYLRILMAIDSELVDRDVVHTSEEARRNTLIKDTMREQCIPNLVESWYQILQNYQFTNSEVTCQCLEVVGAYVSWIDLSLIANDRFINMLLGHMSIEVLREEACDCLFEVVNKGMDPVDKMKLVESLCQVLQSAGFFSIDQEEDVDFLARFSKLVNGMGQSLIVSWSKLIKNGDIKNAQEALQAIETKVALMLQLLIHEDDDISSNIIGFCYDYLHILKQLTVLSDQQKANVEAIMLAVMKKLTYDEEYNFENEGEDEAMFVEYRKQLKLLLDRLAQVSPELLLASVRRVFSSTLQNWQTTRFMEVEVAIRLLYMLAEALPVSHGAHFSGDVSKASALQDMMRTLVTSGVSSYQHTSVTLEFFETVVRYEKFFTVEPQHIPCVLMAFLDHRGLRHSSAKVRSRTAYLFSRFVKSLNKQMNPFIEDILNRIQDLLELSPPENGHQSLLSSDDQLFIYETAGVLIVNSEYPAERKQALMRNLLTPLMEKFKILLEKLMLAQDEERQASLADCLNHAVGFASRTSKAFSNKQTVKQCGCSEVYLDCLQTFLPALSCPLQKDILRSGVRTFLHRMIICLEEEVLPFIPSASEHMLKDCEAKDLQEFIPLINQITAKFKIQVSPFLQQMFMPLLHAIFEVLLRPAEENDQSAALEKQMLRRSYFAFLQTVTGSGMSEVIANQGAENVERVLVTVIQGAVEYPDPIAQKTCFIILSKLVELWGGKDGPVGFADFVYKHIVPACFLAPLKQTFDLADAQTVLALSECAVTLKTIHLKRGPECVQYLQQEYLPSLQVAPEIIQEFCQALQQPDAKVFKNYLKVFFQRAKP

SEQ ID NO: 5743 - protein, 520 aa, Homo sapiens
MAGPERWGPLLLCLLQAAPGRPRLAPPQNVTLLSQNFSVYLTWLPGLGNPQDVTYFVAYQSSPTRRRWREVEECAGTKELLCSMMCLKKQDLYNKFKGRVRTVSPSSKSPWVESEYLDYLFEVEPAPPVLVLTQTEEILSANATYQLPPCMPPLDLKYEVAFWKEGAGNKTLFPVTPHGQPVQITLQPAASEHHCLSARTIYTFSVPKYSKFSKPTCFLLEVPEANWAFLVLPSLLILLLVIAAGGVIWKTLMGNPWFQRAKMPRALDFSGHTHPVATFQPSRPESVNDLFLCPQKELTRGVRPTPRVRAPATQQTRWKKDLAEDEEEEDEEDTEDGVSFQPYIEPPSFLGQEHQAPGHSEAGGVDSGRPRAPLVPSEGSSAWDSSDRSWASTVDSSWDRAGSSGYLAEKGPGQGPGGDGHQESLPPPEFSKDSGFLEELPEDNLSSWATWGTLPPEPNLVPGGPPVSLQTLTFCWESSPEEEEEARESEIEDSDAGSWGAESTQRTEDRGRTLGHYMAR

SEQ ID NO: 5744 - protein, 409 aa, Homo sapiens
MWLTWPFCFLTITLREEGVCHLESVDLQQQIMTIIDELGKASAKAQNLSAPITSASRMQSNRHVVYILKDSSARPAGKGAIIGFIKVGYKKLFVLDDREAHNEVEPLCILDFYIHESVQRHGHGRELFQYMLQKERVEPHQLAIDRPSQKLLKFLNKHYNLETTVPQVNNFVIFEGFFAHQHRPPAPSLRATRHSRAAAVDPTPAAPARKLPPKRAEGDIKPYSSSDREFLKVAVEPPWPLNRAPRRATPPAHPPPRSSSLGNSPERGPLRPFVPEQELLRSLRLCPPHPTARLLLAADPGGSPAQRRRTRGTPPGLVAQSCCYSRHGGVNSSSPNTGNQDSKQGEQETKNRSASEEQALSQDGSGEKPMHTAPPQAPAPPAQSWTVGGDILNARFIRNLQERRSTRPW

SEQ ID NO: 5745 - protein, 930 aa, Homo sapiens
MTGLEDQEFDFEFLFEFNQRDEGAAAAAPEHYGYASSNVSPALPLPTAHSTLPAPCHNLQTSTPGIIPPADHPSGYGAALDGGPAGYFLSSGHTRPDGAPALESPRIEITSCLGLYHNNNQFFHDVEVEDVLPSSKRSPSTATLSLPSLEAYRDPSCLSPASSLSSRSCNSEASSYESNYSYPYASPQTSPWQSPCVSPKTTDPEEGFPRGLGACTLLGSPRHSPSTSPRASVTEESWLGARSSRPASPCNKRKYSLNGRQPPYSPHHSPTPSPHGSPRVSVTDDSWLGNTTQYTSSAIVAAINALTTDSSLDLGDGVPVKSRKTTLEQPPSVALKVEPVGEDLGSPPPPADFAPEDYSSFQHIRKGGFCDQYLAVPQHPYQWAKPKPLSPTSYMSPTLPALDWQLPSHSGPYELRIEVQPKSHHRAHYETEGSRGAVKASAGGHPIVQLHGYLENEPLMLQLFIGTADDRLLRPHAFYQVHRITGKTVSTTSHEAILSNTKVLEIPLLPENSMRAVIDCAGILKLRNSDIELRKGETDIGRKNTRVRLVFRVHVPQPSGRTLSLQVASNPIECSQRSAQELPLVEKQSTDSYPVVGGKKMVLSGHNFLQDSKVIFVEKAPDGHHVWEMEAKTDRDLCKPNSLVVEIPPFRNQRITSPVHVSFYVCNGKRKRSQYQRFTYLPANVPIIKTEPTDDYEPAPTCGPVSQGLSPLPRPYYSQQLAMPPDPSSCLVAGFPPCPQRSTLMPAAPGVSPKLHDLSPAAYTKGVASPGHCHLGLPQPAGEAPAVQDVPRPVATHPGSPGQPPPALLPQQVSAPPSSSCPPGLEHSLCPSSPSPPLPPATQEPTCLQPCSPACPPATGRPQHLPSTVRRDESPTAGPRLLPEVHEDGSPNLAPIPVTVKREPEELDQLYLDDVNEIIRNDLSSTSTHS

SEQ ID NO: 5746 - protein, 525 aa, Homo sapiens
MECCRRATPGTLLLFLAFLLLSSRTARSEEDRDGLWDAWGPWSECSRTCGGGASYSLRRCLSSKSCEGRNIRYRTCSNVDCPPEAGDFRAQQCSAHNDVKHHGQFYEWLPVSNDPDNPCSLKCQAKGTTLVVELAPKVLDGTRCYTESLDMCISGLCQIVGCDHQLGSTVKEDNCGVCNGDGSTCRLVRGQYKSQLSATKSDDTVVAIPYGSRHIRLVLKGPDHLYLETKTLQGTKGENSLSSTGTFLVDNSSVDFQKFPDKEILRMAGPLTADFIVKIRNSGSADSTVQFIFYQPIIHRWRETDFFPCSATCGGGYQLTSAECYDLRSNRVVADQYCHYYPENIKPKPKLQECNLDPCPASDGYKQIMPYDLYHPLPRWEATPWTACSSSCGGGIQSRAVSCVEEDIQGHVTSVEEWKCMYTPKMPIAQPCNIFDCPKWLAQEWSPCTVTCGQGLRYRVVLCIDHRGMHTGGCSPKTKPHIKEECIVPTPCYKPKEKLPVEAKLPWFKQAQELEEGAAVSEEPS

SEQ ID NO: 5747 - protein, 1019 aa, Homo sapiens
MSALCDPPGAPGPPGPAPATHGPAPLSAQELSQEIKAFLTGVDPILGHQLSAREHARCGLLLLRSLPPARAAVLDHLRGVFDESVRAHLAALDETPVAGPPHLRPPPPSHVPAGGPGLEDVVQEVQQVLSEFIRANPKAWAPVISAWSIDLMGQLSSTYSGQHQRVPHATGALNELLQLWMGCRATRTLMDIYVQCLSALIGSCPDACVDALLDTSVQHSPHFDWVVAHIGSSFPGTIISRVLSCGLKDFCVHGGAGGGAGSSGGSSSQTPSTDPFPGSPAIPAEKRVPKIASVVGILGHLASRHGDSIRRELLRMFHDSLAGGSGGRSGDPSLQATVPFLLQLAVMSPALLGTVSGELVDCLKPPAVLSQLQQHLQGFPREELDNMLNLAVHLVSQASGAGAYRLLQFLVDTAMPASVITTQGLAVPDTVREACDRLIQLLLLHLQKLVHHRGGSPGEGVLGPPPPPRLVPFLDALKNHVGELCGETLRLERKRFLWQHQLLGLLSVYTRPSCGPEALGHLLSRARSPEELSLATQLYAGLVVSLSGLLPLAFRSCLARVHAGTLQPPFTARFLRNLALLVGWEQQGGEGPAALGAHFGESASAHLSDLAPLLLHPEEEVAEAAASLLAICPFPSEALSPSQLLGLVRAGVHRFFASLRLHGPPGVASACQLLTRLSQTSPAGLKAVLQLLVEGALHRGNTELFGGQVDGDNETLSVVSASLASASLLDTNRRHTAAVPGPGGIWSVFHAGVIGRGLKPPKFVQSRNQQEVIYNTQSLLSLLVHCCSAPGGTECGECWGAPILSPEAAKAVAVTLVESVCPDAAGAELAWPPEEHARATVERDLRIGRRFREQPLLFELLKLVAAAPPALCYCSVLLRGLLAALLGHWEASRHPDTTHSPWHLEASCTLVAVMAEGSLLPPALGNMHEVFSQLAPFEVRLLLLSVWGFLREHGPLPQKFIFQSERGRFIRDFSREGGGEGGPHLAVLHSVLHRNIDRLGLFSGRFQAPSPSTLLRQGT

SEQ ID NO: 5748 - protein, 378 aa, Homo sapiens
MVLLWLTLLLIALPCLLQTKEDPNPPITNLRMKAKAQQLTWDLNRNVTDIECVKDADYSMPAVNNSYCQFGAISLCEVTNYTVRVANPPFSTWILFPENSGKPWAGAENLTCWIHDVDFLSCSWAVGPGAPADVQYDLYLNVANRRQQYECLHYKTDAQGTRIGCRFDDISRLSSGSQSSHILVRGRSAAFGIPCTDKFVVFSQIEILTPPNMTAKCNKTHSFMHWKMRSHFNRKFRYELQIQKRMQPVITEQVRDRTSFQLLNPGTYTVQIRARERVYEFLSAWSTPQRFECDQEEGANTRAWRTSLLIALGTLLALVCVFVICRRYLVMQRLFPRIPHMKDPIGDSFQNDKLVVWEAGKAGLEECLVTEVQVVQKT

SEQ ID NO: 5749 - protein, 216 aa, Homo sapiens
MRIQDPGKVFFGNVDSSGIKHNIFNPPIIARYIRLHPTHYSIRSTLRMELMGCDLNSCSMPLGMESKAISDAQITASSYFTNMFATWSPSKARLHLQGRSNAWRPQVNNPKEWLQVDFQKTMKVTGVTTQGVKSLLTSMYVKEFLISSSQDGHQWTLFFQNGKVKVFQGNQDSFTPVVNSLDPPLLTRYLRIHPQSWVHQIALRMEVLGCEAQDLY

SEQ ID NO: 5750 - protein, 401 aa, Homo sapiens
MVLAQSRVSAGVGSPHCSGSGGGGSDSFPWPASHPGNPQCSFSTAFLASPRLSRGTLAYLPPAPWSSLATPSALLGSSCAPPPPPARCPQPRALSPELGTKAGPRRPHRWELPRSPSQGAQGPAPRRRLLETMKGIVAASGSETEDEDSMDIPLDLSSSAGSGKRRRRGNLPKESVQILRDWLYEHRYNAYPSEQEKALLSQQTHLSTLQVCNWFINARRRLLPDMLRKDGKDPNQFTISRRGAKISETSSVESVMGIKNFMPALEETPFHSCTAGPNPTLGRPLSPKPSSPGSVLARPSVICHTTVTALKDVPFSLCQSVGVGQNTDIQQIAAKNFTDTSLMYPEDTCKSGPSTNTQSGLFNTPPPTPPDLNQDFSGFQLLVDVALKRAAEMELQAKLTA

SEQ ID NO: 5751 - protein, 312 aa, Homo sapiens
MGVMAMLMLPLLLLGISGLLFIYQEVSRLWSKSAVQNKVVVITDAISGLGKECARVFHTGGARLVLCGKNWERLENLYDALISVADPSKQTFTPKLVLLDLSDISCVPDVAKEVLDCYGCVDILINNASVKVKGPAHKISLELDKKIMDANYFGPITLTKALLPNMISRRTGQIVLVNNIQGKFGIPFRTTYAASKHAALGFFDCLRAEVEEYDVVISTVSPTFIRSYHVYPEQGNWEASIWKFFFRKLTYGVHPVEVAEEVMRTVRRKKQEVFMANPIPKAAVYVRTFFPEFFFAVVACGVKEKLNVPEEG

SEQ ID NO: 5752 - protein, 204 aa, Homo sapiens
MGDKKSPTRPKRQPKPSSDEGYWDCSVCTFRNSAEAFKCMMCDVRKGTSTRSTLFEVIVSASRTKEPLKFPISGRKPRPVSQLVAQQVTQQFVPPTQSKKEKKDKVEKEKSEKETTSKKNSHKKTRPRLKNVDRSSAQHLEVTVGDLTVIITDFKEKTKSPPASSAASADQHSQSGSSSDNTERGMSRSSSPRGEASSLNGESH

SEQ ID NO: 5753 - protein, 638 aa, Homo sapiens
MLDFFTIFSKGGLVLWCFQGVSDSCTGPVNALIRSVLLQERGGNNSFTHEALTLKYKLDNQFELVFVVGFQKILTLTYVDKLIDDVHRLFRDKYRTEIQQQSALSLLNGTFDFQNDFLRLLREAEESSKIRAPTTMKKFEDSEKAKKPVRSMIETRGEKPKEKAKNSKKKGAKKEGSDGPLATSKPVPAEKSGLPVGPENGVELSKEELIRRKREEFIQKHGRGMEKSNKSTKSDAPKEKGKKAPRVWELGGCANKEVLDYSTPTTNGTPEAALSEDINLIRGTGSGGQLQDLDCSSSDDEGAAQNSTKPSATKGTLGGMFGMLKGLVGSKSLSREDMESVLDKMRDHLIAKNVAADIAVQLCESVANKLEGKVMGTFSTVTSTVKQALQESLVQILQPQRRVDMLRDIMDAQRRQRPYVVTFCGVNGVGKSTNLAKISFWLLENGFSVLIAACDTFRAGAVEQLRTHTRRLSALHPPEKHGGRTMVQLFEKGYGKDAAGIAMEAIAFARNQGFDVVLVDTAGRMQDNAPLMTALAKLITVNTPDLVLFVGEALVGNEAVDQLVKFNRALADHSMAQTPRLIDGIVLTKFDTIDDKVGAAISMTYITSKPIVFVGTGQTYCDLRSLNAKAVVAALMKA

SEQ ID NO: 5754 - protein, 1173 aa, Homo sapiens
MAVETLSPDWEFDRVDDGSQKIHAEVQLKNYGKFLEEYTSQLRRIEDALDDSIGDVWDFNLDPIALKLLPYEQSSLLELIKTENKVLNKVITVYAALCCEIKKLKYEAETKFYNGLLFYGEGATDASMVEGDCQIQMGRFISFLQELSCFVTRCYEVVMNVVHQLAALYISNKIAPKIIETTGVHFQTMYEHLGELLTVLLTLDEIIDNHITLKDHWTMYKRLLKSVHHNPSKFGIQEEKLKPFEKFLLKLEGQLLDGMIFQACIEQQFDSLNGGVSVSKNSTFAEEFAHSIRSIFANVEAKLGEPSEIDQRDKYVGICGLFVLHFQIFRTIDKKFYKSLLDICKKVPAITLTANIIWFPDNFLIQKIPAAAKLLDRKSLQAIKIHRDTFLQQKAQSLTKDVQSYYVFVSSWMMKMESILSKEQRMDKFAEDLTNRCNVFIQGFLYAYSISTIIKTTMNLYMSMQKPMTKTSVKALCRLVELLKAIEHMFYRRSMVVADSVSHITQHLQHQALHSISVAKKRVISDKKYSEQRLDVLSALVLAENTLNGPSTKQRRLIVSLALSVGTQMKTFKDEELFPLQVVMKKLDLISELRERVQTQCDCCFLYWHRAVFPIYLDDVYENAVDAARLHYMFSALRDCVPAMMHARHLESYEILLDCYDKEIMEILNEHLLDKLCKEIEKDLRLSVHTHLKLDDRNPFKVGMKDLALFFSLNPIRFFNRFIDIRAYVTHYLDKTFYNLTTVALHDWATYSEMRNLATQRYGLVMTEAHLPSQTLEQGLDVLEIMRNIHIFVSRYLYNLNNQIFIERTSNNKHLNTINIRHIANSIRTHGTGIMNTTVNFTYQFLKKKFYIFSQFMYDEHIKSRLIKDIRFFREIKDQNDHKYPFDRAEKFNRGIRKLGVTPEGQSYLDQFRQLISQIGNAMGYVRMIRSGGLHCSSNAIRFVPDLEDIVNFEELVKEEGLAEETLKAARHLDSVLSDHTRNSAEGTEYFKMLVDVFAPEFRRPKNIHLRNFYIIVPPLTLNFVEHSISCKEKLNKKNKIGAAFTDDGFAMGVAYILKLLDQYREFDSLHWFQSVREKYLKEIRAVAKQQNVQSASQDEKLLQTMNLTQKRLDVYLQEFELLYFSLSSARIFFRADKTAAEENQEKKEKEEETKTSNGDLSDSTVSADPVVK

SEQ ID NO: 5755 - protein, 330 aa, Homo sapiens
MAFLPSWVCVLVGSFSASLAGTSNLSETEPPLWKESPGQLSDYRVENSMYIINPWVYLERMGMYKIILNQTARYFAKFAPDNEQNILWGLPLQYGWQYRTGRLADPTRRTNCGYESGDHMCISVDSWWADLNYFLSSLPFLAAVDSGVMGISSDQVRLLPPPKNERKFCYDVSSCRSSFPETMNKWNTFYQYLQSPFSKFDDLLKYLWAAHTSTLADNIKSFEDRYDYYSKAEAHFERSWVLAVDHLAAVLFPTTLIRSYKFQKGMPPRILLNTDVAPFISDFTAFQNVVLVLLNMLDNVDKSIGYLCTEKSNVYRDHSESSSRSYGNNS

SEQ ID NO: 5756 - protein, 340 aa, Homo sapiens
MATGGYRTSSGLGGSTTDFLEEWKAKREKMRAKQNPPGPAPPGGGSSDAAGKPPAGALGTPAAAAANELNNNLPGGAPAAPAVPGPGGVNCAVGSAMLTRAAPGPRRSEDEPPAASASAAPPPQRDEEEPDGVPEKGKSSGPSARKGKGQIEKRKLREKRRSTGVVNIPAAECLDEYEDDEAGQKERKREDAITQQNTIQNEAVNLLDPGSSYLLQEPPRTVSGRYKSTTSVSEEDVSSRYSRTDRSGFPRYNRDANVSGTLVSSSTLEKKIEDLEKEVVRERQENLRLVRLMQDKEEMIGKLKEEIDLLNRDLDDIEDENEQLKQENKTLLKVVGQLTR

SEQ ID NO: 5757 - protein, 311 aa, Homo sapiens
MQTFTMVLEEIWTSLFMWFFYALIPCLLTDEVAILPAPQNLSVLSTNMKHLLMWSPVIAPGETVYYSVEYQGEYESLYTSHIWIPSSWCSLTEGPECDVTDDITATVPYNLRVRATLGSQTSAWSILKHPFNRNSTILTRPGMEITKDGFHLVIELEDLGPQFEFLVAYWRREPGAEEHVKMVRSGGIPVHLETMEPGAAYCVKAQTFVKAIGRYSAFSQTECVEVQGEAIPLVLALFAFVGFMLILVVVPLFVWKMGRLLQYSCCPVVVLPDTLKITNSPQKLISCRREEVDACATAVMSPEELLRAWIS

SEQ ID NO: 5758 - protein, 1238 aa, Homo sapiens
MRAQGRGRLPRRLLLLLALWVQAARPMGYFELQLSALRNVNGELLSGACCDGDGRTTRAGGCGHDECDTYVRVCLKEYQAKVTPTGPCSYGHGATPVLGGNSFYLPPAGAAGDRARARARAGGDQDPGLVVIPFQFAWPRSFTLIVEAWDWDNDTTPNEELLIERVSHAGMINPEDRWKSLHFSGHVAHLELQIRVRCDENYYSATCNKFCRPRNDFFGHYTCDQYGNKACMDGWMGKECKEAVCKQGCNLLHGGCTVPGECRCSYGWQGRFCDECVPYPGCVHGSCVEPWQCNCETNWGGLLCDKDLNYCGSHHPCTNGGTCINAEPDQYRCTCPDGYSGRNCEKAEHACTSNPCANGGSCHEVPSGFECHCPSGWSGPTCALDIDECASNPCAAGGTCVDQVDGFECICPEQWVGATCQLDANECEGKPCLNAFSCKNLIGGYYCDCIPGWKGINCHINVNDCRGQCQHGGTCKDLVNGYQCVCPRGFGGRHCELERDECASSPCHSGGLCEDLADGFHCHCPQGFSGPLCEVDVDLCEPSPCRNGARCYNLEGDYYCACPDDFGGKNCSVPREPCPGGACRVIDGCGSDAGPGMPGTAASGVCGPHGRCVSQPGGNFSCICDSGFTGTYCHENIDDCLGQPCRNGGTCIDEVDAFRCFCPSGWEGELCDTNPNDCLPDPCHSRGRCYDLVNDFYCACDDGWKGKTCHSREFQCDAYTCSNGGTCYDSGDTFRCACPPGWKGSTCAVAKNSSCLPNPCVNGGTCVGSGASFSCICRDGWEGRTCTHNTNDCNPLPCYNGGICVDGVNWFRCECAPGFAGPDCRINIDECQSSPCAYGATCVDEINGYRCSCPPGRAGPRCQEVIGFGRSCWSRGTPFPHGSSWVEDCNSCRCLDGRRDCSKVWCGWKPCLLAGQPEALSAQCPLGQRCLEKAPGQCLRPPCEAWGECGAEEPPSTPCLPRSGHLDNNCARLTLHFNRDHVPQGTTVGAICSGIRSLPATRAVARDRLLVLLCDRASSGASAVEVAVSFSPARDLPDSSLIQGAAHAIVAAITQRGNSSLLLAVTEVKVETVVTGGSSTGLLVPVLCGAFSVLWLACVVLCVWWTRKRRKERERSRLPREESANNQWAPLNPIRNPIERPGGHKDVLYQCKNFTPPPRRADEALPGPAGHAAVREDEEDEDLGRGEEDSLEAEKFLSHKFTKDPGRSPGRPAHWASGPKVDNRAVRSINEARYAGKE

SEQ ID NO: 5759 - protein, 688 aa, Homo sapiens
MWCIVLFSLLAWVYAEPTMYGEILSPNYPQAYPSEVEKSWDIEVPEGYGIHLYFTHLDIELSENCAYDSVQIISGDTEEGRLCGQRSSNNPHSPIVEEFQVPYNKLQVIFKSDFSNEERFTGFAAYYVATDINECTDFVDVPCSHFCNNFIGGYFCSCPPEYFLHDDMKNCGVNCSGDVFTALIGEIASPNYPKPYPENSRCEYQIRLEKGFQVVVTLRREDFDVEAADSAGNCLDSLVFVAGDRQFGPYCGHGFPGPLNIETKSNALDIIFQTDLTGQKKGWKLRYHGDPMPCPKEDTPNSVWEPAKAKYVFRDVVQITCLDGFEVVEGRVGATSFYSTCQSNGKWSNSKLKCQPVDCGIPESIENGKVEDPESTLFGSVIRYTCEEPYYYMENGGGGEYHCAGNGSWVNEVLGPELPKCVPVCGVPREPFEEKQRIIGGSDADIKNFPWQVFFDNPWAGGALINEYWVLTAAHVVEGNREPTMYVGSTSVQTSRLAKSKMLTPEHVFIHPGWKLLEVPEGRTNFDNDIALVRLKDPVKMGPTVSPICLPGTSSDYNLMDGDLGLISGWGRTEKRDRAVRLKAARLPVAPLRKCKEVKVEKPTADAEAYVFTPNMICAGGEKGMDSCKGDSGGAFAVQDPNDKTKFYAAGLVSWGPQCGTYGLYTRVKNYVDWIMKTMQENSTPRED

SEQ ID NO: 5760 - protein, 232 aa, Homo sapiens
MERCPSLGVTLYALVVVLGLRATPAGGQHYLHIRPAPSDNLPLVDLIEHPDPIFDPKEKDLNETLLRSLLGGHYDPGFMATSPPEDRPGGGGGAAGGAEDLAELDQLLRQRPSGAMPSEIKGLEFSEGLAQGKKQRLSKKLRRKLQMWLWSQTFCPVLYAWNDLGSRFWPRYVKVGSCFSKRSCSVPEGMVCKPSKSVHLTVLRWRCQRRGGQRCGWIPIQYPIISECKCSC

SEQ ID NO: 5761 - protein, 286 aa, Homo sapiens
MNPASDGGTSESIFDLDYASWGIRSTLMVAGFVFYLGVFVVCHQLSSSLNATYRSLVAREKVFWDLAATRAVFGVQSTAAGLWALLGDPVLHADKARGQQNWCWFHITTATGFFCFENVAVHLSNLIFRTFDLFLVIHHLFAFLGFLGCLVNLQAGHYLAMTTLLLEMSTPFTCVSWMLLKAGWSESLFWKLNQWLMIHMFHCRMVLTYHMWWVCFWHWDGLVSSLYLPHLTLFLVGLALLTLIINPYWTHKKTQQLLNPVDWNFAQPEAKSRPEGNGQLLRKKRP

SEQ ID NO: 5762 - protein, 255 aa, Homo sapiens
MAQHGAMGAFRALCGLALLCALSLGQRPTGGPGCGPGRLLLGTGTDARCCRVHTTRCCRDYPGEECCSEWDCMCVQPEFHCGDPCCTTCRHHPCPPGQGVQSQGKFSFGFQCIDCASGTFSGGHEGHCKPWTDCCWRCRRRPKTPEAASSPRKSGASDRQRRRGGWETCGCEPGRPPGPPTAASPSPGAPQAAGALRSALGRALLPWQQKWVQEGGSDQRPGPCSSAAAAGPCRRERETQSWPPSSLAGPDGVGS

SEQ ID NO: 5763 - protein, 465 aa, Homo sapiens
MPKKAKPTGSGKEEGPAPCKQMKLEAAGGPSALNFDSPSSLFESLISPIKTETFFKEFWEQKPLLIQRDDPALATYYGSLFKLTDLKSLCSRGMYYGRDVNVCRCVNGKKKVLNKDGKAHFLQLRKDFDQKRATIQFHQPQRFKDELWRIQEKLECYFGSLVGSNVYITPAGSQGLPPHYDDVEVFILQLEGEKHWRLYHPTVPLAREYSVEAEERIGRPVHEFMLKPGDLLYFPRGTIHQADTPAGLAHSTHVTISTYQNNSWGDFLLDTISGLVFDTAKEDVELRTGIPRQLLLQVESTTVATRRLSGFLRTLADRLEGTKELLSSDMKKDFIMHRLPPYSAGDGAELSTPGGKLPRLDSVVRLQFKDHIVLTVLPDQDQSDEAQEKMVYIYHSLKNSRETHMMGNEEETEFHGLRFPLSHLDALKQIWNSPAISVKDLKLTTDEEKESLVLSLWTECLIQVV

SEQ ID NO: 5764 - protein, 317 aa, Homo sapiens
MSHGPKQPGAAAAPAGGKAPGQHGGFVVTVKQERGEGPRAGEKGSHEEEPVKKRGWPKGKKRKKILPNGPKAPVTGYVRFLNERREQIRTRHPDLPFPEITKMLGAEWSKLQPTEKQRYLDEAEREKQQYMKELRAYQQSEAYKMCTEKIQEKKIKKEDSSSGLMNTLLNGHKGGDCDGFSTFDVPIFTEEFLDQNKAREAELRRLRKMNVAFEEQNAVLQRHTQSMSSARERLEQELALEERRTLALQQQLQAVRQALTASFASLPVPGTGETPTLGTLDFYMARLHGAIERDPAQHEKLIVRIKEILAQVASEHL

SEQ ID NO: 5765 - protein, 1314 aa, Homo sapiens
MASKGAGMSFSRKSYRLTSDAEKSRVTGIVQEKLLNDYLNRIFSSSEHAPPAATSRKPLNFQNLPEHLDQLLQVDNEEEESQGQVEGRLGPSTVVLDHTGGFEGLLLVDDDLLGVIGHSNFGTIRSTTCVYKGKWLYEVLISSQGLMQIGWCTISCRFNQEEGVGDTHNSYAYDGNRVRKWNVTTTNYGKAWAAGDIVSCLIDLDDGTLSFCLNGVSLGTAFENLSRGLGMAYFPAISLSFKESVAFNFGSRPLRYPVAGYRPLQDPPSADLVRAQRLLGCFRAVLSVELDPVEGRLLDKESSKWRLRGQPTVLLTLAHIFHHFAPLLRKVYLVEAVLMSFLLGIVEKGTPTQAQSVVHQVLDLLWLFMEDYEVQDCLKQLMMSLLRLYRFSPIVPDLGLQIHYLRLTIAILRHEKSRKFLLSNVLFDVLRSVVFFYIKSPLRVEEAGLQELIPTTWWPHCSSREGKESTEMKEETAEERLRRRAYERGCQRLRKRIEVVEELQVQILKLLLDNKDDNGGEASRYIFLTKFRKFLQENASGRGNMPMLCPPEYMVCFLHRLISALRYYWDEYKASNPHASFSEEAYIPPQVFYNGKVDYFDLQRLGGLLSHLRKTLKDDLASKANIVIDPLELQSTAMDDLDEDEEPAPAMAQRPMQALAVGGPLPLPRPGWLSSPTLGRANRFLSTAAVSLMTPRRPLSTSEKVKVRTLSVEQRTREDIEGSHWNEGLLLGRPPEEPEQPLTENSLLEVLDGAVMMYNLSVHQQLGKMVGVSDDVNEYAMALRDTEDKLRRCPKRRKDILAELTKSQKVFSEKLDHLSRRLAWVHATVYSQEKMLDIYWLLRVCLRTIEHGDRTGSLFAFMPEFYLSVAINSYSALKNYFGPVHSMEELPGYEETLTRLAAILAKHFADARIVGTDIRDSLMQALASYVCYPHSLRAVERIPEEQRIAMVRNLLAPYEQRPWAQTNWILVRLWRGCGFGYRYTRLPHLLKTKLEDANLPSLQKPCPSTLLQQHMADLLQQGPDVAPSFLNSVLNQLNWAFSEFIGMIQEIQQAAERLERNFVDSRQLKVCATCFDLSVSLLRVLEMTITLVPEIFLDWTRPTSEMLLRRLAQLLNQVLNRVTAERNLFDRVVTLRLPGLESVDHYPILVAVTGILVQLLVRGPASEREQATSVLLADPCFQLRSICYLLGQPEPPAPGTALPAPDRKRFSLQSYADYISADELAQVEQMLAHLTSASAQAAAASLPTSEEDLCPICYAHPISAVFQPCGHKSCKACINQHLMNNKDCFFCKTTIVSVEDWEKGANTSTTSSAA

SEQ ID NO: 5766 - protein, 180 aa, Homo sapiens
MAPGVARGPTPYWRLRLGGAALLLLLIPVAAAQEPPGAACSQNTNKTCEECLKNVSCLWCNTNKACLDYPVTSVLPPASLCKLSSARWGVCWVNFEALIITMSVVGGTLLLGIAICCCCCCRRKRSRKPDRSEEKAMREREERRIRQEERRAEMKTRHDEIRKKYGLFKEENPYARFENN

SEQ ID NO: 5767 - protein, 1860 aa, Homo sapiens
MATGGGPFEDGMNDQDLPNWSNENVDDRLNNMDWGAQQKKANRSSEKNKKKFGVESDKRVTNDISPESSPGVGRRRTKTPHTFPHSRYMSQMSVPEQAELEKLKQRINFSDLDQRSIGSDSQGRATAANNKRQLSENRKPFNFLPMQINTNKSKDASTNPPNRETIGSAQCKELFASALSNDLLQNCQVSEEDGRGEPAMESSQIVSRLVQIRDYITKASSMREDLVEKNERSANVERLTHLIDHLKEQEKSYMKFLKKILARDPQQEPMEEIENLKKQHDLLKRMLQQQEQLRALQGRQAALLALQHKAEQAIAVMDDSVVAETAGSLSGVSITSELNEELNDLIQRFHNQLRDSQPPAVPDNRRQAESLSLTREVSQSRKPSASERLPDEKVELFSKMRVLQEKKQKMDKLLGELHTLRDQHLNNSSSSPQRSVDQRSTSAPSASVGLAPVVNGESNSLTSSVPYPTASLVSQNESENEGHLNPSEKLQKLNEVRKRLNELRELVHYYEQTSDMMTDAVNENRKDEETEESEYDSEHENSEPVTNIRNPQVASTWNEVNSHSNAQCVSNNRDGRTVNSNCEINNRSAANIRALNMPPSLADCRYNREGEQEIHVAQGEDDEEEEEEAEEEGVSGASLSSHRSSLVDEHPEDAEFEQKINRLMAAKQKLRQLQDLVAMVQDDDAAQGVISASASNLDDFYPAEEDTKQNSNNTRGNANKTQKDTGVNEKAREKFYEAKLQQQQRELKQLQEERKKLIDIQEKIQALQTACPDLQLSAASVGNCPTKKYMPAVTSTPTVNQHETSTSKSVFEPEDSSIVDNELWSEMRRHEMLREELRQRRKQLEALMAEHQRRQGLAETASPVAVSLRSDGSENLCTPQQSRTEKTMATWGGSTQCALDEEGDEDGYLSEGIVRTDEEEEEEQDASSNDNFSVCPSNSVNHNSYNGKETKNRWKNNCPFSADENYRPLAKTRQQNISMQRQENLRWVSELSYVEEKEQWQEQINQLKKQLDFSVSICQTLMQDQQTLSCLLQTLLTGPYSVMPSNVASPQVHFIMHQLNQCYTQLTWQQNNVQRLKQMLNELMRQQNQHPEKPGGKERGSSASHPPSPSLFCPFSFPTQPVNLFNIPGFTNFSSFAPGMNFSPLFPSNFGDFSQNISTPSEQQQPLAQNSSGKTEYMAFPKPFESSSSIGAEKPRNKKLPEEEVESSRTPWLYEQEGEVEKPFIKTGFSVSVEKSTSSNRKNQLDTNGRRRQFDEESLESFSSMPDPVDPTTVTKTFKTRKASAQASLASKDKTPKSKSKKRNSTQLKSRVKNIKTGSDFSMFEALRDTIYSEVATLISQNESRPHFLIELFHELQLLNTDYLRQRALYALQDIVSRHISESHEKGENVKSVNSGTWIASNSELTPSESLATTDDETFEKNFERETHKISEQNDADNASVLSVSSNFEPFATDDLGNTVIHLDQALARMREYERMKTEAESNSNMRCTCRIIEDGDGAGAGTTVNNLEETPVIENRSSQQPVSEVSTIPCPRIDTQQLDRQIKAIMKEVIPFLKEHMDEVCSSQLLTSVRRMVLTLTQQNDESKEFVKFFHKQLGSILQDSLAKFAGRKLKDCGEDLLVEISEVLFNELAFFKLMQDLDNNSITVKQRCKRKIEATGVIQSCAKEAKRILEDHGSPAGEIDDEDKDKDETETVKQTQTSEVYDGPKNVRSDISDQEEDEESEGCPVSINLSKAETQALTNYGSGEDENEDEEMEEFEEGPVDVQTSLQANTEATEENEHDEQEAESGNISQKSDEEDFVKVEDLPLKLTIYSEADLRKKMVEEEQKNHLSGEICEMQTEELAGNSETLKEPETVGAQSI

SEQ ID NO: 5768 - protein, 83 aa, Homo sapiens
MEALGSGHYVGGSIRSMAAAALSGLAVRLSRPQGTRGSYGAFCKTLTRTLLTFFDLAWRLRKNFFYFYILASVILNVHLQVYI

SEQ ID NO: 5769 - protein, 432 aa, Homo sapiens
MAGLGLGSAVPVWLAEDDLGCIICQGLLDWPATLPCGHSFCRHCLEALWGARDARRWACPTCRQGAAQQPHLRKNTLLQDLADKYRRAAREIQAGSDPAHCPCPGSSSLSSAAARPRRRPELQRVAVEKSITEVAQELTELVEHLVDIVRSLQNQRPLSESGPDNELSILGKAFSSGVDLSMASPKLVTSDTAAGKIRDILHDLEEIQEKLQESVTWKEAPEAQMQGELLEAPSSSSCPLPDQSHPALRRASRFAQWAIHPTFNLKSLSCSLEVSKDSRTVTVSHRPQPYRWSCERFSTSQVLCSQALSSGKHYWEVDTRNCSHWAVGVASWEMSRDQVLGRTMDSCCVEWKGTSQLSAWHMVKETVLGSDRPGVVGIWLNLEEGKLAFYSVDNQEKLLYECTISASSPLYPAFWLYGLHPGNYLIIKQVKV

SEQ ID NO: 5770 - protein, 94 aa, Homo sapiens
MRTLAILAAILLVALQAQAEPLQARADEVAAAPEQIAADIPEVVVSLAWDESLAPKHPGSRKNMDCYCRIPACIAGERRYGTCIYQGRLWAFCC

SEQ ID NO: 5771 - protein, 202 aa, Homo sapiens
MERGAGAKLLPLLLLLRATGFTCAQTDGRNGYTAVIEVTSGGPWGDWAWPEMCPDGFFASGFSLKVEPPQGIPGDDTALNGIRLHCARGNVLGNTHVVESQSGSWGEWSEPLWCRGGAYLVAFSLRVEAPTTLGDNTAANNVRFRCSDGEELQGPGLSWGDFGDWSDHCPKGACGLQTKIQGPRGLGDDTALNDARLFCCRS

SEQ ID NO: 5772 - protein, 735 aa, Homo sapiens
MAKERGLISPSDFAQLQKYMEYSTKKVSDVLKLFEDGEMAKYVQGDAIGYEGFQQFLKIYLEVDNVPRHLSLALFQSFETGHCLNETNVTKDVVCLNDVSCYFSLLEGGRPEDKLEFTFKLYDTDRNGILDSSEVDKIILQMMRVAEYLDWDVSELRPILQEMMKEIDYDGSGSVSQAEWVRAGATTVPLLVLLGLEMTLKDDGQHMWRPKRFPRPVYCNLCESSIGLGKQGLSCNLCKYTVHDQCAMKALPCEVSTYAKSRKDIGVQSHVWVRGGCESGRCDRCQKKIRIYHSLTGLHCVWCHLEIHDDCLQAVGHECDCGLLRDHILPPSSIYPSVLASGPDRKNSKTSQKTMDDLNLSTSEALRIDPVPNTHPLLVFVNPKSGGKQGQRVLWKFQYILNPRQVFNLLKDGPEIGLRLFKDVPDSRILVCGGDGTVGWILETIDKANLPVLPPVAVLPLGTGNDLARCLRWGGGYEGQNLAKILKDLEMSKVVHMDRWSVEVIPQQTEEKSDPVPFQIINNYFSIGVDASIAHRFHIMREKYPEKFNSRMKNKLWYFEFATSESIFSTCKKLEESLTVEICGKPLDLSNLSLEGIAVLNIPSMHGGSNLWGDTRRPHGDIYGINQALGATAKVITDPDILKTCVPDLSDKRLEVVGLEGAIEMGQIYTKLKNAGRRLAKCSEITFHTTKTLPMQIDGEPWMQTPCTIKITHKNQMPMLMGPPPRSTNFFGFLS

SEQ ID NO: 5773 - protein, 2430 aa, Homo sapiens
MAPPAHKSILERSENVLMSPWKGKLIVQDRMLCDIALWSTYGAMIPTQLPQELDFKYVMKVSSLKKRLPEAAFRKQNYLEEKVCFQDLCFNLYEVELSNRQGENIDKLTECIKNKQLAIIKCLEDRGFFILLTSSALLSEPDFGGKQMGLHGLHLFRSPLSTGVKDLKVEDDISMKVIPILSTLNCALLETKKSLPEERIHPNTLVKRHFQELYKADRSPSLSVAPQDRMKDPTFLGKLPSGFDLIPPAEKCPSESLTQLNSYFSDPSAYILEVSTALDLLAEHPQSPCVSDGICDAGFSLVMTPDPEFLVSEAEVRKETETKKDSEEMLKAKKRVFPLSPASNLRVQPKRKASMPHMVQSKKVNLCRPFPKRTASRADNSSDSPTTLKLVKGQFPQKRKRGAEVLTAQFVQKTKLDRKNQEAPISKDVPVPTNAKRARKQEKSPVKTVPRAKPPVKKSPQKQRVNIVKGNENPRNRKQLQPVKGETASKLQSEISRGCQEDGISINSVQPENTTAAHNDLPENSIVNYDSQALNMLADLALSSATSSTPVSEARNLHCSSELPQNDVLLSKENSLRGTSDHEYHRGVKTQKGELLPNPSSDRKSNSGSDLTVSQDEESLVPCSQAPAKAQSALTEEMLESSDASQSSSVSVEHSYALLLTEHSKKHLQEREILSPLFPRNGTKSPEAATPVGKVMPFRHQPGLLLQQKPPDDPVVKPKDRPPSARVKKSSCSRIVLSCDDSVKITFKCETEYAFSLDSKYTNNPLEKTVVRALHGPWNTDLPDNVEEVKLLLHMWVALFYSNQNKIIRSSRKVVEHSNPAKYVSINSTLESCELREIEESLGLEKCSADSLLETNEISRAHAAEVSFRDPNCLLPFIKTPLTQGLELCVQNEQKKTFARECDPDTQEDQNFICSYNNEVTGEEAKQESLETSNLVLSGIGSTQTNGPSVPSEEEIVQPLDSTRVASYSGTVTQATFTRTYDGPGSQPVICQSSVYGTLENKVDILDAAVQTKTGTLQDLIQHGSPINNECHPSLERKDDNMGCAVINPEPITLTFEKNAHVPIQTEGVNTADERTTFKKELIKQVSPAASLRHPVSTSENARTQGLRDIPSLVVAGQKGTKYLCASSVGGETLDKAVCSLQKETPLPVSLPSDKTMVMEALSLAKSSSHLSPSEEVRCTQDFLSQTQSLLGLSSEGLLELTQVEVDSSSASTTLGRQCSLNCISSGCHTSGDSLELRKNHKNGPNTENMNLEAFDSVFIKQTSLSVSREVSLELSEEDSDIDLALTISPPTSPREEMPAGEIEQFEEAPFSNLELQDVAEEIGEPEEVALTESREVSSADNVSVYPSVSEEPVENKERKGDNLQPVTLILSKENCTLEIAEEINVTSDFPFDSVIEEVSPASSPEPPVPVKETRPYQAVTPCILKLHGTQCEKSNQISQCESEDLGITEKENVFVGPTHPVGQDNFTQVQQMQVSAEMPLILTDHPGRTGRPTLPGKVTEEIVSSEHDEGLSFSGKVQCYGRELNQPASAAKCTGDFSPSPEKLVKSGNPLQPVSIENRNLDLKHLVLESSEPPFGPRNVIENKSLSDTLVSTTAPSGIVNVSVKQQTSPKSSQNHLFPGDLKTDEGIYLQVKSLTAASVDGAYSTQGCMCSVVPTLCSSSDNATLTHYVRPINAEPVFQAQEIPAGRMASLLKNGEPEAELHKETTGPGTAGPQSNTTSSLKGERKAIHTLQDVSTCETKELLNVGVSSLCAGPYQNTADTKENLSKEPLASFVSESFDTSVCGIATEHVEIENSGEGLRAEAGSETLGRDGEVGVNSDMHYELSGDSDLDLLGDCRNPRLDLEDSYTLRGSYTRKKDVPTDGYESSLNFHNNNQEDWGCSSWVPGMETSLPPGHWTAAVKKEEKCVPPYVQIRDLHGILRTYANFSITKELKDTMRTSHGLRRHPSFSANCGLPSSWTSTWQVADDLTQNTLDLEYLRFAHKLKQTIKNGDSQHSASSANVFPKESPTQISIGAFPSTKISEAPFLHPAPRSRSPLLVTVVESDPRPQGQPRRGYTASSLDSSSSWRERCSHNRDLRNSQRNHTVSFHLNKLKYNSTVKESRNDISLILNEYAEFNKVMKNSNQFIFQDKELNDVSGEATAQEMYLPFPGRSASYEDIIIDVCTNLHVKLRSVVKEACKSTFLFYLVETEDKSFFVRTKNLLRKGGHTEIEPQHFCQAFHRENDTLIIIIRNEDISSHLHQIPSLLKLKHFPSVIFAGVDSPGDVLDHTYQELFRAGGFVISDDKILEAVTLVQLKEIIKILEKLNGNGRWKWLLHYRENKKLKEDERVDSTAHKKNIMLKSFQSANIIELLHYHQCDSRSSTKAEILKCLLNLQIQHIDARFAVLLTDKPTIPREVFENSGILVTDVNNFIENIEKIAAPFRSSYW

SEQ ID NO: 5774 - protein, 398 aa, Homo sapiens
MESGLLRPAPVSEVIVLHYNYTGKLRGARYQPGAGLRADAVVCLAVCAFIVLENLAVLLVLGRHPRFHAPMFLLLGSLTLSDLLAGAAYAANILLSGPLTLKLSPALWFAREGGVFVALTASVLSLLAIALERSLTMARRGPAPVSSRGRTLAMAAAAWGVSLLLGLLPALGWNCLGRLDACSTVLPLYAKAYVLFCVLAFVGILAAICALYARIYCQVRANARRLPARPGTAGTTSTRARRKPRSLALLRTLSVVLLAFVACWGPLFLLLLLDVACPARTCPVLLQADPFLGLAMANSLLNPIIYTLTNRDLRHALLRLVCCGRHSCGRDPSGSQQSASAAEASGGLRRCLPPGLDGSFSGSERSSPQRDGLDTSGSTGSPGAPTAARTLVSEPAAD

SEQ ID NO: 5775 - protein, 128 aa, Homo sapiens
MSGRGKQGGKARAKAKTRSSRAGLQFPVGRVHRLLRKGNYAERVGAGAPVYLAAVLEYLTAEILELAGNAARDNKKTRIIPRHLQLAIRNDEELNKLLGKVTIAQGGVLPNIQAVLLPKKTESHHKTK

SEQ ID NO: 5776 - protein, 208 aa, Homo sapiens
MASKCPKCDKTVYFAEKVSSLGKDWHKFCLKCERCSKTLTPGGHAEHDGKPFCHKPCYATLFGPKGVNIGGAGSYIYEKPLAEGPQVTGPIEVPAARAEERKASGPPKGPSRASSVTTFTGEPNTCPRCSKKVYFAEKVTSLGKDWHRPCLRCERCGKTLTPGGHAEHDGQPYCHKPCYGILFGPKGVNTGAVGSYIYDRDPEGKVQP

SEQ ID NO: 5777 - protein, 1287 aa, Homo sapiens
MSGGGGGGGSAPSRFADYFVICGLDTETGLEPDELSALCQYIQASKARDGASPFISSTTEGENFEQTPLRRTFKSKVLARYPENVEWNPFDQDAVGMLCMPKGLAFKTQADPREPQFHAFIITREDGSRTFGFALTFYEEVTSKQICSAMQTLYHMHNAEYDVLHAPPADDRDQSSMEDGEDTPVTKLQRFNSYDISRDTLYVSKCICLITPMSFMKACRSVLEQLHQAVTSPQPPPLPLESYIYNVLYEVPLPPPGRSLKFSGVYGPIICQRPSTNELPLFDFPVKEVFELLGVENVFQLFTCALLEFQILLYSQHYQRLMTVAETITALMFPFQWQHVYVPILPASLLHFLDAPVPYLMGLHSNGLDDRSKLELPQEANLCFVDIDNHFIELPEDLPQFPNKLEFVQEVSEILMAFGIPPEGNLHCSESASKLKRLRASELVSDKRNGNIAGSPLHSYELLKENETIARLQALVKRTGVSLEKLEVREDPSSNKDLKVQCDEEELRIYQLNIQIREVFANRFTQMFADYEVFVIQPSQDKESWFTNREQMQNFDKASFLSDQPEPYLPFLSRFLETQMFASFIDNKIMCHDDDDKDPVLRVFDSRVDKIRLLNVRTPTLRTSMYQKCTTVDEAEKAIELRLAKIDHTAIHPHLLDMKIGQGKYEPGFFPKLQSDVLSTGPASNKWTKRNAPAQWRRKDRQKQHTEHLRLDNDQREKYIQEARTMGSTIRQPKLSNLSPSVIAQTNWKFVEGLLKECRNKTKRMLVEKMGREAVELGHGEVNITGVEENTLIASLCDLLERIWSHGLQVKQGKSALWSHLLHYQDNRQRKLTSGSLSTSGILLDSERRKSDASSLMPPLRISLIQDMRHIQNIGEIKTDVGKARAWVRLSMEKKLLSRHLKQLLSDHELTKKLYKRYAFLRCDDEKEQFLYHLLSFNAVDYFCFTNVFTTILIPYHILIVPSKKLGGSMFTANPWICISGELGETQIMQIPRNVLEMTFECQNLGKLTTVQIGHDNSGLYAKWLVEYVMVRNEITGHTYKFPCGRWLGKGMDDGSLERILVGELLTSQPEVDERPCRTPPLQQSPSVIRRLVTISPNNKPKLNTGQIQESIGEAVNGIVKHFHKPEKERGSLTLLLCGECGLVSALEQAFQHGFKSPRLFKNVFIWDFLEKAQTYYETLEKNEVVPEENWHTRARNFCRFVTAINNTPRNIGKDGKFQMLVCLGARDHLLHHWIALLADCPITAHMYEDVALIKDHTLVNSLIRVLQTLQEFNITLETSLVKGIDI

SEQ ID NO: 5778 - protein, 221 aa, Homo sapiens
MSDSEEESQDRQLKIVVLGDGASGKTSLTTCFAQETFGKQYKQTIGLDFFLRRITLPGNLNVTLQIWDIGGQTIGGKMLDKYIYGAQGVLLVYDITNYQSFENLEDWYTVVKKVSEESETQPLVALVGNKIDLEHMRTIKPEKHLRFCQENGFSSHFVSAKTGDSVFLCFQKVAAEILGIKLNKAEIEQSQRVVKADIVNYNQEPMSRTVNPPRSSMCAVQ

SEQ ID NO: 5779 - protein, 1200 aa, Homo sapiens
MRAQGRGRLPRRLLLLLALWVQAARPMGYFELQLSALRNVNGELLSGACCDGDGRTTRAGGCGHDECDTYVRVCLKEYQAKVTPTGPCSYGHGATPVLGGNSFYLPPAGAAGDRARARARAGGDQDPGLVVIPFQFAWPRSFTLIVEAWDWDNDTTPNEELLIERVSHAGMINPEDRWKSLHFSGHVAHLELQIRVRCDENYYSATCNKFCRPRNDFFGHYTCDQYGNKACMDGWMGKECKEAVCKQGCNLLHGGCTVPGECRCSYGWQGRFCDECVPYPGCVHGSCVEPWQCNCETNWGGLLCDKDLNYCGSHHPCTNGGTCINAEPDQYRCTCPDGYSGRNCEKAEHACTSNPCANGGSCHEVPSGFECHCPSGWSGPTCALDIDECASNPCAAGGTCVDQVDGFECICPEQWVGATCQLDVNDCRGQCQHGGTCKDLVNGYQCVCPRGFGGRHCELERDECASSPCHSGGLCEDLADGFHCHCPQGFSGPLCEVDVDLCEPSPCRNGARCYNLEGDYYCACPDDFGGKNCSVPREPCPGGACRVIDGCGSDAGPGMPGTAASGVCGPHGRCVSQPGGNFSCICDSGFTGTYCHENIDDCLGQPCRNGGTCIDEVDAFRCFCPSGWEGELCDTNPNDCLPDPCHSRGRCYDLVNDFYCACDDGWKGKTCHSREFQCDAYTCSNGGTCYDSGDTFRCACPPGWKGSTCAVAKNSSCLPNPCVNGGTCVGSGASFSCICRDGWEGRTCTHNTNDCNPLPCYNGGICVDGVNWFRCECAPGFAGPDCRINIDECQSSPCAYGATCVDEINGYRCSCPPGRAGPRCQEVIGFGRSCWSRGTPFPHGSSWVEDCNSCRCLDGRRDCSKVWCGWKPCLLAGQPEALSAQCPLGQRCLEKAPGQCLRPPCEAWGECGAEEPPSTPCLPRSGHLDNNCARLTLHFNRDHVPQGTTVGAICSGIRSLPATRAVARDRLLVLLCDRASSGASAVEVAVSFSPARDLPDSSLIQGAAHAIVAAITQRGNSSLLLAVTEVKVETVVTGGSSTGLLVPVLCGAFSVLWLACVVLCVWWTRKRRKERERSRLPREESANNQWAPLNPIRNPIERPGGHKDVLYQCKNFTPPPRRADEALPGPAGHAAVREDEEDEDLGRGEEDSLEAEKFLSHKFTKDPGRSPGRPAHWASGPKVDNRAVRSINEARYAGKE

SEQ ID NO: 5780 - protein, 157 aa, Homo sapiens
MSGSLGRAAAALLRWGRGAGGGGLWGPGVRAAGSGAGGGGSAEQLDALVKKDKVVVFLKGTPEQPQCGFSNAVVQILRLHGVRDYAAYNVLDDPELRQGIKDYSNWPTIPQVYLNGEFVGGCDILLQMHQNGDLVEELKKLGIHSALLDEKKDQDSK

SEQ ID NO: 5781 - protein, 692 aa, Homo sapiens
MELLPLWLCLGFHFLTVGWRNRSGTATAASQGVCKLVGGAADCRGQSLASVPSSLPPHARMLTLDANPLKTLWNHSLQPYPLLESLSLHSCHLERISRGAFQEQGHLRSLVLGDNCLSENYEETAAALHALPGLRRLDLSGNALTEDMAALMLQNLSSLRSVSLAGNTIMRLDDSVFEGLERLRELDLQRNYIFEIEGGAFDGLAELRHLNLAFNNLPCIVDFGLTRLRVLNVSYNVLEWFLATGGEAAFELETLDLSHNQLLFFPLLPQYSKLRTLLLRDNNMGFYRDLYNTSSPREMVAQFLLVDGNVTNITTVSLWEEFSSSDLADLRFLDMSQNQFQYLPDGFLRKMPSLSHLNLHQNCLMTLHIREHEPPGALTELDLSHNQLSELHLAPGLASCLGSLRLFNLSSNQLLGVPPGLFANARNITTLDMSHNQISLCPLPAASDRVGPPSCVDFRNMASLRSLSLEGCGLGALPDCPFQGTSLTYLDLSSNWGVLNGSLAPLQDVAPMLQVLSLRNMGLHSSFMALDFSGFGNLRDLDLSGNCLTTFPRFGGSLALETLDLRRNSLTALPQKAVSEQLSRGLRTIYLSQNPYDCCGVDGWGALQHGQTVADWAMVTCNLSSKIIRVTELPGGVPRDCKWERLDLGLLYLVLILPSCLTLLVACTVIVLTFKKPLLQVIKSRCHWSSVY

SEQ ID NO: 5782 - protein, 632 aa, Homo sapiens
MSRVRDAGCVAAGIVIGAGAWYCVYKYTRGRDQTKKRMAKPKNRAVAGTGARARAGLRAGFTIDLGSGFSPPTPVRAEAEDRAQDEASALDTVGAEAVAPAASSAEAQSGAGSQAQEADGAGVGPKAESVVGAAMASAIAPPPGVTEALGAAEAPAMAGAPKVAEAPREAETSRAAVPPGTVVPTEAAAPTEVTEGPGVAAPTKVAEAPGVASPTEAAEAPVPATPTGAAAPTGAAESPGTSGSPRTAVVPGTSAAKKATPGAHTGAIPKATSATGAVPKGGGKGVTRSRNGGKGKGKKSKVEVDELGMGFRPGDGAAAAAAASANGGQAFLAEVPDSEEGESGWTDTESDSDSEPETQRRGRGRRPVAMQKRPFPYEIDEILGVRDLRKVLALLQKSDDPFIQQVALLTLSNNANYSCNQETIRKLGGLPIIANMINKTDPHIKEKALMAMNNLSENYENQGRLQVYMNKVMDDIMASNLNSAVQVVGLKFLTNMTITNDYQHLLVNSIANFFRLLSQGGGKIKVEILKILSNFAENPDMLKKLLSTQVPASFSSLYNSYVESEILINALTLFEIIYDNLRAEVFNYREFNKGSLFYLCTTSGVCVKKIRALANHHDLLVKVKVIKLVNKF

SEQ ID NO: 5783 - protein, 733 aa, Homo sapiens
MAEVGEDSGARALLALRSAPCSPVLCAAAAAAAFPAAAPPPAPAQPQPPPGPPPPPPPPLPPGAIAGAGSSGGSSGVSGDSAVAGAAPALVAAAAASVRQSPGPALARLEGREFEFLMRQPSVTIGRNSSQGSVDLSMGLSSFISRRHLQLSFQEPHFYLRCLGKNGVFVDGAFQRRGAPALQLPKQCTFRFPSTAIKIQFTSLYHKEEAPASPLRPLYPQISPLKIHIPEPDLRSMVSPVPSPTGTISVPNSCPASPRGAGSSSYRFVQNVTSDLQLAAEFAAKAASEQQADTSGGDSPKDESKPPFSYAQLIVQAISSAQDRQLTLSGIYAHITKHYPYYRTADKGWQNSIRHNLSLNRYFIKVPRSQEEPGKGSFWRIDPASEAKLVEQAFRKRRQRGVSCFRTPFGPLSSRSAPASPTHPGLMSPRSGGLQTPECLSREGSPIPHDPEFGSKLASVPEYRYSQSAPGSPVSAQPVIMAVPPRPSSLVAKPVAYMPASIVTSQQPAGHAIHVVQQAPTVTMVRVVTTSANSANGYILTSQGAAGGSHDAAGAAVLDLGSEARGLEEKPTIAFATIPAAGGVIQTVASQMAPGVPGHTVTILQPATPVTLGQHHLPVRAVTQNGKHAVPTNSLAGNAYALTSPLQLLATQASSSAPVVVTRVCEVGPKEPAAAVAATATTTPATATTASASASSTGEPEVKRSRVEEPSGAVTTPAGVIAAAGPQGPGTGE

SEQ ID NO: 5784 - protein, 165 aa, Homo sapiens
MVAMAAGPSGCLVPAFGLRLLLATVLQAVSAFGAEFSSEACRELGFSSNLLCSSCDLLGQFNLLQLDPDCRGCCQEEAQFETKKLYAGAILEVCGUKLGRFPQVQAFVRSDKPKLFRGLQIKYVRGSDPVLKLLDDNGNIAEELSILKWNTDSVEEFLSEKLERI

SEQ ID NO: 5785 - protein, 257 aa, Homo sapiens
MSILFYVIFLAYLRGIQGNNMDQRSLPEDSLNSLIIKLIQADILKNKLSKQMVDVKENYQSTLPKAEAPREPERGGPAKSAFQPVIAMDTELLRQQRRYNSPRVLLSDSTPLEPPPLYLMEDYVGSPVVANRTSRRKRYAEHKSHRGEYSVCDSESLWVTDKSSAIDIRGHQVTVLGEIKTGNSPVKQYFYETRCKEARPVKNGCRGIDDKHWNSQCKTSQTYVRALTSENNKLVGWRWIRIDTSCVCALSRKIGRT

SEQ ID NO: 5786 - protein, 359 aa, Homo sapiens
MAEPFLSEYQHQPQTSNCTGAAAVQEELNPERPPGAEERVPEEDSRWQSRAFPQLGGRPGPEGEGSLESQPPPLQTQACPESSCLREGEKGQNGDDSSAGGDFPPPAEVEPTPEAELLAQPCHDSEASKLGAPAAGGEEEWGQQQRQLGKKKHRRRPSKKKRHWKPYYKLTWEEKKKFDEKQSLRASRIRAEMFAKGQPVAPYNTTQFLMDDHDQEEPDLKTGLYSKRAAAKSDDTSDDDFMEEGGEEDGGSDGMGGDGSEFLQRDFSETYERYHTESLQNMSKQELIKEYLELEKCLSRMEDENNRLRLESKRLGGDDARVRELELELDRLRAENLQLLTENELHRQQERAPLSKFGD

SEQ ID NO: 5787 - protein, 228 aa, Homo sapiens
MLHVEMLTLVFLVLWMCVFSQDPGSKAVADRYAVYWNSSNPRFQRGDYHIDVCINDYLDVFCPHYEDSVPEDKTERYVLYMVNFDGYSACDHTSKGFKRWECNRPHSPNGPLKFSEKFQLFTPFSLGFEFRPGREYFYISSAIPDNGRRSCLKLKVFVRPTNSCMKTIGVHDRVFDVNDKVENSLEPADDTVHESAEPSRGENAAQTPRIPSRLLAILLFLLAMLLTL

SEQ ID NO: 5788 - protein, 157 aa, Homo sapiens
MQFMLLFSRQGKLRLQKWYVPLSDKEKKKITRELVQTVLARKPKMCSFLEWRDLKIVYKRYASLYFCCAIEDQDNELITLEIIHRYVELLDKYFGSVCELDIIFNFEKAYFILDEFLLGGEVQETSKKNVLKAIEQADLLQEEAETPRSVLEEIGLT

SEQ ID NO: 5789 - protein, 483 aa, Homo sapiens
MATIEEIAHQIIEQQMGEIVTEQQTGQKIQIVTALDHNTQGKQFILTNHDGSTPSKVILARQDSTPGKVFLTTPDAAGVNQLFFTTPDLSAQHLQLLTDNSPDQGPNKVFDLCVVCGDKASGRHYGAVTCEGCKGFFKRSIRKNLVYSCRGSKDCIINKHHRNRCQYCRLQRCIAFGMKQDSVQCERKPIEVSREKSSNCAASTEKIYIRKDLRSPLTATPTFVTDSESTRSTGLLDSGMFMNIHPSGVKTESAVLMTSDKAESCQGDLSTLANVVTSLANLGKTKDLSQNSNEMSMIESLSNDDTSLCEFQEMQTNGDVSRAFDTLAKALNPGESTACQSSVAGMEGSVHLITGDSSINYTEKEGPLLSDSHVAFRLTMPSPMPEYLNVHYIGESASRLLFLSMHWALSIPSFQALGQENSISLVKAYWNELFTLGLAQCWQVMNVATILATFVNCLHNSLQQDAKVIAALIHFTRRAITDL

SEQ ID NO: 5790 - protein, 516 aa, Homo sapiens
MEREPGAAGVRRALGRRLEAVLASRSEANAVFDILAVLQSEDQEEIQEAVRTCSRLFGALLERGELFVGQLPSEEMVMTGSQGATRKYKVWMRHRYHSCCNRLGELLGHPSFQVKELALSALLKFVQLEGAHPLEKSKWEGNYLFPRELFKLVVGGLLSPEEDQSLLLSQFREYLDYDDTRYHTMQAAVDAVARVTGQHPEVPPAFWNNAFTLLSAVSLPRREPTVSSFYVKRAELWDTWKVAHLKEHRRVFQAMWLSFLKHKLPLSLYKKVLLIVHDAILPQLAQPTLMIDFLTRACDLGGALSLLALNGLFILIHKHNLEYPDFYRKLYGLLDPSVFHVKYRARFFHLADLFLSSSHLPAYLVAAFAKRLARLALTAPPEALLMVLPFICNLLRRHPACRVLVHRPHGPELDADPYDPGEEDPAQSRALESSLWELQALQRHYHPEVSKAASVINQALSMPEVSIAPLLELTAYEIFERDLKKKGPEPVPLEFIPAQGLLGRPGELCAQHFTLS

SEQ ID NO: 5791 - protein, 319 aa, Homo sapiens
MSVGFIGAGQLAFALAKGFTAAGVLAAHKIMASSPDMDLATVSALRKMGVKLTPHNKETVQHSDVLFLAVKPHIIPFILDEIGADIEDRHIVVSCAAGVTISSIEKKLSAFRPAPRVIRCMTNTPVVVREGATVYATGTHAQVEDGRLMEQLLSSVGFCTEVEEDLIDAVTGLSGSGPAYAFTALDALADGGVKMGLPRRLAVRLGAQALLGAAKMLLHSEQHPGQLKDNVSSPGGATIHALHVLESGGFRSLLINAVEASCIRTRELQSMADQEQVSPAAIKKTILDKVKLDSPAGTALSPSGHTKLLPRSLAPAGKD

SEQ ID NO: 5792 - protein, 169 aa, Homo sapiens
MAPPWVPAMGFTLAPSLGCFVGSRFVHGEGLRWYAGLQKPSWHPPHWVLGPVWGTLYSAMGYGSYLVWKELGGFTEKAVVPLGLYTGQLALNWAWPPIFFGARQMGWALVDLLLVSGAAAATTVAWYQVSPLAARLLYPYLAWLAFTTTLNYCVWRDNHGWRGGRRLPE

SEQ ID NO: 5793 - protein, 917 aa, Homo sapiens
MFRKARRVNVRKRNDSEEEERERDEEQEPPPLLPPPGTGEEAGPGGGDRAPGGESLLGPGPSPPSALTPGLGAEAGGGFPGGAEPGNGLKPRKRPRENKEVPRASLLSFQDEEEENEEVFKVKKSSYSKKIVKLLKKEYKEDLEKSKIKTELNSSAESEQPLDKTGHVKDTNQEDGVIISEHGEDEMDMESEKEEEKPKTGGAFSNALSSLNVLRPGEIPDAAFIHAARKKRQMARELGDFTPHDNEPGKGRLVREDENDASDDEDDDEKRRIVFSVKEKSQRQKIAEEIGIEGSDDDALVTGEQDEELSRWEQEQIRKGINIPQVQASQPAEVNMYYQNTYQTMPYGSSYGIPYSYTAYGSSDAKSQKTDNTVPFKTPSNEMTPVTIDLVKKQLKDRLDSMKELHKTNRQQHEKHLQSRVDSTRAIERLEGSSGGIGERYKFLQEMRGYVQDLLECFSEKVPLINELESAIHQLYKQRASRLVQRRQDDIKDESSEFSSHSNKALMAPNLDSFGRDRALYQEHAKRRIAEREARRTRRRQAREQTGKMADHLEGLSSDDEETSTDITNFNLEKDRISKESGKVFEDVLESFYSIDCIKSQFEAWRSKYYTSYKDAYIGLCLPKLFNPLIRLQLLTWTPLEAKCRDFENMLWFESLLFYGCEEREQEKDDVDVALLPTIVEKVILPKLTVIAENMWDPFSTTQTSRMVGITLKLINGYPSVVNAENKNTQVYLKALLLRMRRTLDDDVFMPLYPKNVLENKNSGPYLFFQRQFWSSVKLLGNFLQWYGIFSNKTLQELSIDGLLNRYILMAFQNSEYGDDSIKKAQNVINCFPKQWFMNLKGERTISQLENFCRYLVHLADTIYRNSIGCSDVEKRNARENIKQIVKLLASVRALDHAMSVASDHNVKEFKSLIEGK

SEQ ID NO: 5794 - protein, 244 aa, Homo sapiens
MAGPERWGPLLLCLLQAAPGRPRLAPPQNVTLLSQNFSVYLTWLPGLGNPQDVTYFVAYQSSPTRRRWREVEECAGTKELLCSMMCLKKQDLYNKFKGRVRTVSPSSKSPWVESEYLDYLFEVEPAPPVLVLTQTEEILSANATYQLPPCMPPLDLKYEVAFWKEGAGNKTLFPVTPHGQPVQITLQPAASEHHCLSARTIYTFSVPKYSKFSKPTCFLLEVPGLFWTHTPCGNLSAQQTRVRE

SEQ ID NO: 5795 - protein, 279 aa, Homo sapiens
MSLFDLFRGFFGFPGPRSHRDPFFGGMTRDEDDDEEEEEEGGSWGRGNPRFHSPQHPPEEFGFGFSFSPGGGIRFHDNFGFDDLVRDFNSIFSDMGAWTLPSHPPELPGPESETPGERLREGQTLRDSMLKYPDSHQPRIFGGVLESDARSESPQPAPDWGSQRPFHRFDDVWPMDPHPRTREDNDLDSQVSQEGLGPVLQPQPKSYFKSISVTKITKPDGIVEERRTVVDSEGRTETTVTRHEADSSPRGDPESPRPPALDDAFSILDLFLGRWFRSR

SEQ ID NO: 5796 - protein, 159 aa, Homo sapiens
MRAVPLPAPLLPLLLLALLAAPAARASRAESVSAPWPEPERESRPPPGPGPGNTTRFGSGAAGGSGSSSSNSSGDALVTRISILLRDLPTLKAAVIVAFAFTTLLIACLLLRVFRSGKRLKKTRKYDIITTPAERVEMAPLNEEDDEDEDSTVFDIKYR

SEQ ID NO: 5797 - protein, 365 aa, Homo sapiens
MSSSVEQKKGPTRQRKCGFCKSNRDKECGQLLISENQKVAAHHKCMLFSSALVSSHSDNESLGGFSIEDVQKEIKRGTKLMCSLCHCPGATIGCDVKTCHRTYHYHCALHDKAQIREKPSQGIYMVYCRKHKKTAHNSEADLEESFNEHELEPSSPKSKKKSRKGRPRKTNFKGLSEDTRSTSSHGTDEMESSSYRDRSPHRSSPSDTRPKCGFCHVGEEENEARGKLHIFNAKKAAAHYKCMLFSSGTVQLTTTSRAEFGDFDIKTVLQEIKRGKRMKCTLCSQPGATIGCEIKACVKTYHYHCGVQDKAKYIENMSRGIYKLYCKNHSGNDERDEEDEERESKSRGKVEIDQQQLTQQQLNGN

SEQ ID NO: 5798 - protein, 302 aa, Homo sapiens
MRRWAWAAVVVLLGPQLVLLGGVGARREAQRTQQPGQRADPPNATASASSREGLPEAPKPSQASGPEFSDAHMTWLNFVRRPDDGALRKRCGSRDKKPRDLFGPPGPPGAEVTAETLLHEFQELLKEATERRFSGLLDPLLPQGAGLRLVGEAFHCRLQGPRRVDKRTLVELHGFQAPAAQGAFLRGSGLSLASGRFTAPVSGIFQFSASLHVDHSELQGKARLRARDVVCVLICIESLCQRHTCLEAVSGLESNSRVFTLQVQGLLQLQAGQYASVFVDNGSGAVLTIQAGSSFSGLLLGT

SEQ ID NO: 5799 - protein, 561 aa, Homo sapiens
MITSQGSVSFRDVTVGFTQEEWQHLDPAQRTLYRDVMLENYSHLVSVGYCIPKPEVILKLEKGEEPWILEEKFPSQSHLELINTSRNYSIMKFNEFNKGGKCFCDEKHEIIHSEEEPSEYNKNGNSFWLNEDLIWHQKIKNWEQSFEYNECGKAFPENSLFLVHKRGYTGQKTCKYTEHGKTCDMSFFITHQQTHPRENHYGNECGENIFEESILLEHQSVYPFSQKLNLTPIQRTHSINNIIEYNECGTFFSEKLVLHLQQRTHTGEKPYECHECGKTFTQKSAHTRHQRTHTGGKPYECHECGKTFYKNSDLIKHQRIHTGERPYGCHECGKSFSEKSTLTQHQRTHTGEKPYECHECGKTFSFKSVLTVHQKTHTGEKPYECYACGKAFLRKSDLIKHQRIHTGEKPYECNECGKSFSEKSTLTKHLRTHTGEKPYECIQCGKFFCYYSGFTEHLRRHTGEKPFGCNECGKTFRQKSALIVHQRTHIRQKPYGCNQCGKSFCVKSKLIAHHRTHTGEKPYECNVCGKSFYVKSKLTVHQRIHLGRNPINVVNEGNYSG

SEQ ID NO: 5800 - protein, 568 aa, Homo sapiens
MERDRISALKRSFEVEEVETPNSTPPRRVQTPLLRATVASSTQKFQDLGVKNSEPSARHVDSLSQRSPKASLRRVELSGPKAAEPVSRRTELSIDISSKQVENAGAIGPSRFGLKRAEVLGHKTPEPAPRRTEITIVKPQESAHRRMEPPASKVPEVPTAPATDAAPKRVEIQMPKPAEAPTAPSPAQTLENSEPAPVSQLQSRLEPKPQPPVAEATPRSQEATEAAPSCVGDMADTPRDAGLKQAPASRNEKAPVDFGYVGIDSILEQMRRKAMKQGFEFNIMVVGQSGLGKSTLINTLFKSKISRKSVQPTSEERIPKTIEIKSITHDIEEKGVRMKLTVIDTPGFGDHINNENCWQPIMKFINDQYEKYLQEEVNINRKKRIPDTRVHCCLYFIPATGHSLRPLDIEFMKRLSKVVNIVPVIAKADTLTLEERVHFKQRITADLLSNGIDVYPQKEFDEDSEDRLVNEKFREMIPFAVVGSDHEYQVNGKRILGRKTKWGTIEVENTTHCEFAYLRDLLIRTHMQNIKDITSSIHFEAYRVKRLNEGSSAMANGMEEKEPEAPEM

SEQ ID NO: 5801 - protein, 175 aa, Homo sapiens
MPKRSCPFADVAPLQLKVRVSQRELSRGVCAERYSQEVFEKTKRLLFLGAQAYLDHVWDEGCAVVHLPESPKPGPTGAPRAARGQMLIGPDGRLIRSLGQASEADPSGVASIACSSCVRAVDGKAVCGQCERALCGQCVRTCWGCGSVACTLCGLVDCSDMYEKVLCTSCAMFET

SEQ ID NO: 5802 - protein, 469 aa, Homo sapiens
MSIHFSSPVFTSRSAAFSGRGAQVRLSSARPGGLGSSSLYGLGASRPRVAVRSAYGGPVGAGIREVTINQSLLAPLRLDADPSLQRVRQEESEQIKTLNNKFASFIDKVRFLEQQNKLLETKWTLLQEQKSAKSSRLPDIFEAQIAGLRGQLEALQVDGGRLEAELRSMQDVVEDFKNKYEDEINHRTAAENEFVVLKKDVDAAYMSKVELEAKVDALNDEINFLRTLNETELTELQSQISDTSVVLSMDNSRSLDLDGIIAEVKAQYEEMAKCSRAEAEAWYQTKFETLQAQAGKHGDDLRNTRNEISEMNRAIQRLQAEIDNIKNQRAKLEAAIAEAEERGELALKDARAKQEELEAALQRGKQDMARQLREYQELMSVKLALDIEIATYRKLLEGEESRLAGDGVGAVNISVMNSTGGSSSGGGIGLTLGGTMGSNALSFSSSAGPGLLKAYSIRTASASRRSARD

SEQ ID NO: 5803 - protein, 184 aa, Homo sapiens
MKILVAFLVVLTIFGIQSHGYEVFNIISPSNNGGNVQETVTIDNEKNTAIINIHAGSCSSTTIFDYKHGYIASRVLSRRACFILKMDHQNIPPLNNLQWYIYEKQALDNMFSSKYTWVKYNPLESLIKDVDWFLLGSPIEKLCKHIPLYKGEVVENTHNVGAGGCAKAGLLGILGISICADIHV

SEQ ID NO: 5804 - protein, 252 aa, Homo sapiens
MQLTRCCFVFLVQGSLYLVICGQDDGPPGSEDPERDDHEGQPRPRVPRKRGHISPKSRPMANSTLLGLLAPPGEAWGILGQPPNRPNHSPPPSAKVKKIFGWGDFYSNIKTVALNLLVTGKIVDHGNGTFSVHFQHNATGQGNISISLVPPSKAVEFHQEQQIFIEAKASKIFNCRMEWEKVERGRRTSLCTHDPAKICSRDHAQSSATWSCSQPFKVVCVYIAFYSTDYRLVQKVCPDYNYHSDTPYYPSG

SEQ ID NO: 5805 - protein, 785 aa, Homo sapiens
MSDQDHSMDEMTAVVKIEKGVGGNNGGNGNGGGAFSQARSSSTGSSSSTGGGGQESQPSPLALLAATCSRIESPNENSNNSQGPSQSGGTGELDLTATQLSQGANGWQIISSSSGATPTSKEQSGSSTNGSNGSESSKNRTVSGGQYVVAAAPNLQNQQVLTGLPGVMPNIQYQVIPQFQTVDGQQLQFAATGAQVQQDGSGQIQIIPGANQQIITNRGSGGNIIAAMPNLLQQAVPLQGLANNVLSGQTQYVTNVPVALNGNITLLPVNSVSAATLTPSSQAVTISSSGSQESGSQPVTSGTTISSASLVSSQASSSSFFTNANSYSTTTTTSNMGIMNFTTSGSSGTNSQGQTPQRVSGLQGSDALNIQQNQTSGGSLQAGQQKEGEQNQQTQQQQILIQPQLVQGGQALQALQAAPLSGQTFTTQAISQETLQNLQLQAVPNSGPIIIRTPTVGPNGQVSWQTLQLQNLQVQNPQAQTITLAPMQGVSLGQTSSSNTTLTPIASAASIPAGTVTVNAAQLSSMPGLQTINLSALGTSGIQVHPIQGLPLAIANAPGDHGAQLGLHGAGGDGIHDDTAGGEEGENSPDAQPQAGRRTRREACTCPYCKDSEGRGSGDPGKKKQHICHIQGCGKVYGKTSHLRAHLRWHTGERPFMCTWSYCGKRFTRSDELQRHKRTHTGEKKFACPECPKRFMRSDHLSKHIKTHQNKKGGPGVALSVGTLPLDSGAGSEGSGTATPSALITTNMVAMEAICPEGIARLANSGINVMQVADLQSINISGNGF

SEQ ID NO: 5806 - protein, 289 aa, Homo sapiens
MAGAGRGAAVSRVQAGPGSPRRARGRQQVQPLGKQRPAPWPGLRSKEKKKVNCKPKNQDEQEIPFRLREIMRSRQEMKNPISNKKRKKAAQVTFRKTLEKEAKGEEPDIAVPKFKQRKGESDGAYIHRMQQEAQHVLFLSKNQAIRQPEVQAAPKEKSEQKKAKKAFQKRRLDKVRRKKEEKAADRLEQELLRDTVKFGEVVLQPPELTARPQRSVSKDQPGRRSQMLRMLLSPGGVSQPLTASLARQRIVEEERERAVQAYRALKQRQQQLHGERPHLTSRKKPEPQL

SEQ ID NO: 5807 - protein, 415 aa, Homo sapiens
MSPFLYLVLLVLGLHATIHCASPEGKVTACHSSQPNATLYKMSSINADFAFNLYRRFTVETPDKNIFFSPVSISAALVMLSFGACCSTQTEIVETLGFNLTDTPMVEIQHGFQHLICSLNFPKKELELQIGNALFIGKHLKPLAKFLNDVKTLYETEVFSTDFSNISAAKQEINSHVEMQTKGKVVGLIQDLKPNTIMVLVNYIHFKAQWANPFDPSKTEDSSSFLIDKTTTVQVPMMHQMEQYYHLVDMELNCTVLQMDYSKNALALFVLPKEGQMESVEAAMSSKTLKKWNRLLQKGWVDLFVPKFSISATYDLGATLLKMGIQHAYSENADFSGLTEDNGLKLSNAAHKAVLHIGEKGTEAAAVPEVELSDQPENTFLHPIIQIDRSFMLLILERSTRSILFLGKVVNPTEA

SEQ ID NO: 5808 - protein, 652 aa, Homo sapiens
MPLLLLLLLLPSPLHPHPICEVSKVASHLEVNCDKRNLTALPPDLPKDTTILHLSENLLYTFSLATLMPYTRLTQLNLDRCELTKLQVDGTLPVLGTLDLSHNQLQSLPLLGQTLPALTVLDVSFNRLTSLPLGALRGLGELQELYLKGNELKTLPPGLLTPTPKLEKLSLANNNLTELPAGLLNGLENLDTLLLQENSLYTIPKGFFGSHLLPFAFLHGNPWLCNCEILYFRRWLQDNAENVYVWKQGVDVKAMTSNVASVQCDNSDKFPVYKYPGKGCPTLGDEGDTDLYDYYPEEDTEGDKVRATRTVVKFPTKAHTTPWGLFYSWSTASLDSQMPSSLHPTQESTKEQTTFPPRWTPNFTLHMESITFSKTPKSTTEPTPSPTTSEPVPEPAPNMTTLEPTPSPTTPEPTSEPAPSPTTPEPTSEPAPSPTTPEPTSEPAPSPTTPEPTPIPTIATSPTILVSATSLITPKSTFLTTTKPVSLLESTKKTIPELDQPPKLRGVLQGHLESSRNDPFLHPDFCCLLPLGFYVLGLFWLLFASVVLILLLSWVGHVKPQALDSGQGAALTTATQTTHLELQRGRQVTVPRAWLLFLRGSLPTFRSSLFLWVRPNGRVGPLVAGRRPSALSQGRGQDLLSTVSIRYSGHSL

SEQ ID NO: 5809 - protein, 179 aa, Homo sapiens
MAALQKSVSSFLMGTLATSCLLLLALLVQGGAAAPISSHCRLDKSNFQQPYITNRTFMLAKEASLADNNTDVRLIGEKLFHGVSMSERCYLMKQVLNFTLEEVLFPQSDRFQPYMQEVVPFLARLSNRLSTCHIEGDDLHIQRNVQKLKDTVKKLGESGEIKAIGELDLLFMSLRNACI

SEQ ID NO: 5810 - protein, 906 aa, Homo sapiens
MPLRLDIKRKLTARSDRVKSVDLHPTEPWMLASLYNGSVCVWNHETQTLVKTFEVCDLPVRAAKFVARKNWVVTGADDMQIRVFNYNTLERVHMFEAHSDYIRCIAVHPTQPFILTSSDDMLIKLWDWDKKWSCSQVFEGHTHYVMQIVINPKDNNQFASASLDRTIKVWQLGSSSPNFTLEGHEKGVNCIDYYSGGDKPYLISGADDRLVKIWDYQNKTCVQTLEGHAQNVSCASFHPELPIIITGSEDGTVRIWHSSTYRLESTLNYGMERVWCVASLRGSNNVALGYDEGSIIVKLGREEPAMSMDANGKIIWAKHSEVQQANLKAMGDAEIKDGERLPLAVKDMGSCEIYPQTIQHNPNGRFVVVCGDGEYIIYTAMALRNKSFGSAQEFAWAHDSSEYAIRESNSIVKIFKNFKEKKSFKPDFGAESIYGGFLLGVRSVNGLAFYDWDNTELIRRIEIQPKHIFWSDSGELVCIATEESFFILKYLSEKVLAAQETHEGVTEDGIEDAFEVLGEIQEIVKTGLWVGDCFIYTSSVNRLNYYVGGEIVTIAHLDRTMYLLGYIPKDNRLYLGDKELNIISYSLLVSVLEYQTAVMRRDFSMADKVLPTIPKEQRTRVAHFLEKQGFKQQALTVSTDPEHRFELALQLGELKIAYQLAVEAESEQKWKQLAELAISKCQFGLAQECLHHAQDYGGLLLLATASGNANMVNKLAEGAERDGKNNVAFMSYFLQGKVDACLELLIRTGRLPEAAFLARTYLPSQVSRVVKLWRENLSKVNQKAAESLADPTEYENLFPGLKEAFVVEEWVKETHADLWPAKQYPLVTPNEERNVMEEGKDFQPSRSTAQQELDGKPASPTPVIVASHTANKEEKSLLELEVDLDNLELEDIDTTDINLDEDILDD

SEQ ID NO: 5811 - protein, 110 aa, Homo sapiens
MPKRSCPFADVAPLQLKVRVSQRELSRGVCAERYSQEVFDPSGVASIACSSCVRAVDGKAVCGQCERALCGQCVRTCWGCGSVACTLCGLVDCSDMYEKVLCTSCAMFET

SEQ ID NO: 5812 - protein, 400 aa, Homo sapiens
MAAGGLSRSERKAAERVRRLREEQQRERLRQVSRILRKAAAERSAEEGRLLAESADLVTELQGRSRRREGLKRRQEEVCDDPEELRGKVRELASAVRNAKYLVVYTGAGISTAASIPDYRGPNGVWTLLQKGRSVSAADLSEAEPTLTHMSITRLHEQKLVQHVVSQNCDGLHLRSGLPRTAISELHGNMYIEVCTSCVPNREYVRVFDVTERTALHRHQTGRTCHKCGTQLRDTIVHFGERGTLGQPLNWEAATEAASRADTILCLGSSLKVLKKYPRLWCMTKPPSRRPKLYIVNLQWTPKDDWAALKLHGKCDDVMRLLMAELGLEIPAYSRWQDPIFSLATPLRAGEEGSHSRKSLCRSREEAPPGDRGAPLSSAPILGGWFGRGCTKRTKRKKVT

SEQ ID NO: 5813 - protein, 212 aa, Homo sapiens
MNLFRFLGDLSHLLAIILLLLKIWKSRSCAGISGKSQVLFAVVFTARYLDLFTNYISLYNTCMKVVYIACSFTTVWLIYSKFKATYDGNHDTFRVEFLVVPTAILAFLVNHDFTPLEILWTFSIYLESVAILPQLFMVSKTGEAETITSHYLFALGVYRTLYLFNWIWRYHFEGFFDLIAIVAGLVQTVLYCDFFYLYITKVLKGKKLSLPA

SEQ ID NO: 5814 - protein, 413 aa, Homo sapiens
MHLALTTVLLWAWGLQAFEIVEKENIFQRTPCPAFLMFENAAYLADMSFELPCHCKPEEVPAVVWFYQKHLGSSHTKVLTDFDGRVLTEAAQVRVGSDMLTRFSIRMFSLLVFRAQSEDSGLYFCGTRKGDYFYAYDVDIQNSEGMVATFQDKGQEPFADEYYGHLHVFTTFWEWTPCDRCGVRGEQWRIGLCYLQSPDLSPRYLKAVPDVVSCGSRAVPRKLRTKARDHTPEVLVRSCLVPCEKTKTIREGVLAIINYVSKVGSRPWVPQVPIQFHQQRLGHGLIISCPGARPEHAVAWDKDRQHLYRTQYLKGVNRSMRVFIDHGNQLHIRFTQLDDRGIYYCWRQGVLVAGFRLGVTSHGHYPASFSDPETRSAVELTLIGYLLITAVFVTIHFCRCCCYLFHCCPSFSP

SEQ ID NO: 5815 - protein, 224 aa, Homo sapiens
MTARAWASWRSSALLLLLVPGYFPLSHPMTVAGPVGGSLSVQCRYEKEHRTLNKFWCRPPQILRCDKIVETKGSAGKRNGRVSIRDSPANLSFTVTLENLTEEDAGTYWCGVDTPWLRDFHDPIVEVEVSVFPAGTTTASSPQSSMGTSGPPTKLPVHTWPSVTRKDSPEPSPHPGSLFSNVRFLLLVLLELPLLLSMLGAVLWVNRPQRSSRSRQNWPKGENQ

SEQ ID NO: 5816 - protein, 915 aa, Homo sapiens
MADEALAGLDEGALRKLLEVTADLAERRRIRSAIRELQRQELEREEEALASKRFRAERQDNKENWLHSQQREAEQRAALARLAGQLESMNDVEELTALLRSAGEYEERKLIRAAIRRVRAQEIEAATLAGRLYSGRPNSGSREDSKGLAAHRLEQCEVPEREEQEQQAEVSKPTPTPEGTSQDVTTVTLLLRAPPGSTSSSPASPSSSPTPASPEPPLEPAEAQCLTAEVPGSPEPPPSPPKTTSPEPQESPTLPSTEGQVVNKLLSGPKETPAAQSPTRGPSDTKRADVAGPRPCQRSLSVLSPRQPAQNRESTPLASGPSSFQRAGSVRDRVHKFTSDSPMAARLQDGTPQAALSPLTPARLLGPSLTSTTPASSSSGSSSRGPSDTSSRFSKEQRGVAQPLAQLRSCPQEEGPRGRGLAARPLENRAGGPVARSEEPGAPLPVAVGTAEPGGSMKTTFTIEIKDGRGQASTGRVLLPTGNQRAELTLGLRAPPTLLSTSSGGKSTITRVNSPGTLARLGSVTHVTSFSHAPPSSRGGCSIKMEAEPAEPLAAAVEAANGAEQTRVNKAPEGRSPLSAEELMTIEDEGVLDKMLDQSTDFEERKLIRAALRELRQRKRDQRDKERERRLQEARGRPGEGRGNTATETTTRHSQRAADGSAVSTVTKTERLVHSNDGTRTARTTTVESSFVRRSENGSGSTMMQTKTFSSSSSSKKMGSIFDREDQASPRAGSLAALEKRQAEKKKELMKAQSLPKTSASQARKAMIEKLEKEGAAGSPGGPRAAVQRSTSFGVPNANSIKQMLLDWCRAKTRGYEHVDIQNFSSSWSDGMAFCALVHNFFPEAFDYGQLSPQNRRQNFEVAFSSAETHADCPQLLDTEDMVRLREPDWKCVYTYIQEFYRCLVQKGLVKTKKS

SEQ ID NO: 5817 - protein, 444 aa, Homo sapiens
MVSQALRLLCLLLGLQGCLAAVFVTQEEAHGVLHRRRRANAFLEELRPGSLERECKEEQCSFEEAREIFKDAERTKLFWISYSDGDQCASSPCQNGGSCKDQLQSYICFCLPAFEGRNCETHKDDQLICVNENGGCEQYCSDHTGTKRSCRCHEGYSLLADGVSCTPTVEYPCGKIPILEKRNASKPQGRIVGGKVCPKGECPWQVLLLVNGAQLCGGTLINTIWVVSAAHCFDKIKNWRNLIAVLGEHDLSEHDGDEQSRRVAQVIIPSTYVPGTTNHDIALLRLHQPVVLTDHVVPLCLPERTFSERTLAFVRFSLVSGWGQLLDRGATALELMVLNVPRLMTQDCLQQSRKVGDSPNITEYMFCAGYSDGSKDSCKGDSGGPHATHYRGTWYLTGIVSWGQGCATVGHFGVYTRVSQYIEWLQKLMRSEPRPGVLLRAPFP

SEQ ID NO: 5818 - protein, 225 aa, Homo sapiens
MAVRSLWAGRLRVQRLLAWSAAWESKGWPLPFSTATQRTAGEDCRSEDPPDELGPPLAERALRVKAVKLEKEVQDLTVRYQRAIADCENIRRRTQRCVEDAKIFGIQSFCKDLVEVADILEKTTECISEESEPEDQKLTLEKVFRGLLLLEAKLKSVFAKHGLEKLTPIGDKYDPHEHELICHVPAGVGVQPGTVALVRQDGYKLHGRTIRLARVEVAVESQRRL

SEQ ID NO: 5819 - protein, 299 aa, Homo sapiens
MPGSASKRRIPVSQPGMADPHQLFDDTSSAQSRGYGAQRAPGGLSYPAASPTPHAAFLADPVSNMAMAYGSSLAAQGKELVDKNIDRFIPITKLKYYFAVDTMYVGRKLGLLFFPYLHQDWEVQYQQDTPVAPRFDVNAPDLYIPAMAFITYVLVAGLALGTQDRFSPDLLGLQASSALAWLTLEVLAILLSLYLVTVNTDLTTIDLVAFLGYKYVGMIGGVLMGLLFGKIGYYLVLGWCCVAIFVFMIRTLRLKILADAAAEGVPVRGARNQLRMYLTMAVAAAQPMLMYWLTFHLVR

SEQ ID NO: 5820 - protein, 245 aa, Homo sapiens
MASTALLALCSTGAFSGLAVEAGAGVCHATPIYAGHSWHQATFRLNVAGSTLSRYLRDLLVAANPDLLQQALPRKAITHLKKRSCYVSLDFEGDLRDPARHHPASFSVGNGCCVCLSSERFRCPEPIFQPGLLGQAEQGLPALAFRALQKMPKTLRTRLADTVVLAGGSTLFPGFAERLDKELEAQCRRHGYAALRPHLVAKHGRGMAVWTGGSMVASLHSFQRRWITRAMYQECGSRLLYDVFN

SEQ ID NO: 5821 - protein, 213 aa, Homo sapiens
MSVELEEALPVTTAEGMAKKVTKAGGSAALSPSKKRKNSKKKNQPGKYSQLVVETIRRLGERNGSSLAKIYTEAKKVPWFDQQNGRTYLKYSIKALVQNDTLLQVKGTGANGSFKLNRKKLEGGGERRGAPAAATAPAPTAHKAKKAAPGAAGSRRADKKPARGQKPEQRSHKKGAGAKKDKGGKAKKTAAAGGKKVKKAAKPSVPKVPKGRK

SEQ ID NO: 5822 - protein, 424 aa, Homo sapiens
MATLSFVFLLLGAVSWPPASASGQEFWPGQSAADILSGAASRRRYLLYDVNPPEGFNLRRDVYIRIASLLKTLLKTEEWVLVLPPWGRLYHWQSPDIHQVRIPWSEFFDLPSLNKNIPVIEYEQFIAESGGPFIDQVYVLQSYAEGWKEGTWEEKVDERPCIDQLLYSQDKHEYYRGWFWGYEETRGLNVSCLSVQGSASIVAPLLLRNTSARSVMLDRAENLLHDHYGGKEYWDTRRSMVFARHLREVGDEFRSRHLNSTDDADRIPFQEDWMKMKVKLGSALGGPYLGVHLRRKDFIWGHRQDVPSLEGAVRKIRSLMKTHRLDKVFVATDAVRKEYEELKKLLPEMVRFEPTWEELELYKDGGVAIIDQWICAHARCLPTSLSAESGSGGFQRFFCPKYSVSEQMVACVHSGHFHTVCLLV

SEQ ID NO: 5823 - protein, 367 aa, Homo sapiens
MSSTLAKIAEIEAEMARTQKNKATAHHLGLLKARLAKLRRELITPKGGGGGGPGEGFDVAKTGDARIGFVGFPSVGKSTLLSNLAGVYSEVAAYEFTTLTTVPGVIRYKGAKIQLLDLPGIIEGAKDGKGRGRQVIAVARTCNLILIVLDVLKPLGHKKIIENELEGFGIRLNSKPPNIGFKKKDKGGINLTATCPQSELDAETVKSILAEYKIHNADVTLRSDATADDLIDVVEGNRVYIPCIYVLNKIDQISIEELDIIYKVPHCVPISAHHRWNFDDLLEKIWDYLKLVRIYTKPKGQLPDYTSPVVLPYSRTTVEDFCMKIHKNLIKEFKYALVWGLSVKHNPQKVGKDHTLEDEDVIQIVKK

SEQ ID NO: 5824 - protein, 564 aa, Homo sapiens
MDSRYNSTAGIGDLNQLSAAIPATRVEVSVSCRNLLDRDTFSKSDPICVLYVQGVGNKEWREFGRTEVIDNTLNPDFVRKFILDYFFEERENLRFDLYDVDSKSPNLSKHDFLGQVFCTLGEIVGSQGSRLEKPIVGIPGKKCGTIILTAEELNCCRDAVLMQFCANKLDKKDFFGKSDPFLVFYRSNEDGSFTICHKTEVVKNTLNPVWQAFKISVRALCNGDYDRTIKVEVYDWDRDGSHDFIGEFTTSYRELSRGQSQFNVYEVVNPKKKGKKKKYTNSGTVTLLSFLVETEVSFLDYIKGGTQINFTVAIDFTASNGNPAQPTSLHYMNPYQLNAYGMALKAVGEIVQDYDSDKMFPALGFGAKLPPDGRISHEFALNGNPQNPYCDGIEGVMEAYYRSLKSVQLYGPTNFAPVINHVARYASSVKDGSQYFVLLIVTDGVISDMAQTKESIVNASKLPMSIIIVGVGPAEFDAMVELDGDDVRVSSRGKYAERDIVQFVPFRDYIDRSGNHILSMARLAKDVLAEIPEQFLSYMRARGIKPSPAPPPYTPPTHVLQTQI

SEQ ID NO: 5825 - protein, 155 aa, Homo sapiens
MSESKSGPEYASFFAVMGASAAMVFSALGAAYGTAKSGTGIAAMSVMRPEQIMKSIIPVVMAGIIAIYGLVVAVLIANSLNDDISLYKSFLQLGAGLSVGLSGLAAGFAIGIVGDAGVRGTAQQPRLFVGMILILIFAEVLGLYGLIVALILSTK

SEQ ID NO: 5826 - protein, 100 aa, Homo sapiens
MQKPCKENEGKPKCSVPKREEKRPYGEFERQQTEGNFRQRLLQSLEEFKEDIDYRHFKDEEMTREGDEMERCLEEIRGLRKKFRALHSNHRHSRDRPYPI

SEQ ID NO: 5827 - protein, 471 aa, Homo sapiens
MASVVLPSGSQCAAAAAAAAPPGLRLRLLLLLFSAAALIPTGDGQNLFTKDVTVIEGEVATISCQVNKSDDSVIQLLNPNRQTIYFRDFRPLKDSRFQLLNFSSSELKVSLTNVSISDEGRYFCQLYTDPPQESYTTITVLVPPRNLMIDIQKDTAVEGEEIEVNCTAMASKPATTIRWFKGNTELKGKSEVEEWSDMYTVTSQLMLKVHKEDDGVPVICQVEHPAVTGNLQTQRYLEVQYKPQVHIQMTYPLQGLTREGDALELTCEAIGKPQPVMVTWVRVDDEMPQHAVLSGPNLFINNLNKTDNGTYRCEASNIVGKAHSDYMLYVYDPPTTIPPPTTTTTTTTTTTTTILTIITDTTATTEPAVHGLTQLPNSAEELDSEDLSDSRAGEEGSIRAVDHAVIGGVVAVVVFAMLCLLIILGRYFARHKGTYFTHEAKGADDAADADTAIINAEGGQNNSEEKKEYFI

SEQ ID NO: 5828 - protein, 386 aa, Homo sapiens
MSALEKSMHLGRLPSRPPLPGSGGSQSGAKMRMGPGRKRDFSPVPWSQYFESMEDVEVENETGKDTFRVYKSGSEGPVLLLLHGGGHSALSWAVFTAAIISRVQCRIVALDLRSHGETKVKNPEDLSAETMAKDVGNVVEAMYGDLPPPIMLIGHSMGGAIAVHTASSNLVPSLLGLCMIDVVEGTAMDALNSMQNFLRGRPKTFKSLENAIEWSVKSGQIRNLESARVSMVGQVKQCEGITSPEGSKSIVEGIIEEEEEDEEGSESISKRKKEDDMETKKDHPYTWRIELAKTEKYWDGWFRGLSNLFLSCPIPKLLLLAGVDRLDKDLTIGQMQGKFQMQVLPQCGHAVHEDAPDKVAEAVATFLIRHRFAEPIGGFQCVFPGC

SEQ ID NO: 5829 - protein, 726 aa, Homo sapiens
MSAITVALLSLLFITSGTIENHKDLGGHFFSTTQSPPATQGSTAAQRSTATQHSTATQSSTATQTSPVPLTPESPLFQNFSGYHIGVGRADCTGQVADINLMGYGKSGQNAQGILTRLYSRAFIMAEPDGSNRTVFVSIDIGMVSQRLRLEVLNRLQSKYGSLYRRDNVILSGTHTHSGPAGYFQYTVFVIASEGFSNQTFQHMVTGILKSIDIAHTNMKPGKIFINKGNVDGVQINRSPYSYLQNPQSERARYSSNTDKEMIVLKMVDLNGDDLGLISWFAIHPVSMNNSNHLVNSDNVGYASYLLEQEKNKGYLPGQGPFVAAFASSNLGDVSPNILGPRCINTGESCDNANSTCPIGGPSMCIAKGPGQDMFDSTQIIGRAMYQRAKSKTCKPALGYSFAAGTIDGVGGLNFTQGKTEGDPFWDTIRDQILGKPSEEIKECHKPKPILLHTGELSKPHPWHPDIVDVQIITLGSLAITAIPGEFTTMSGRRLREAVQAEFASHGMQNMTVVISGLCNVYTHYITTYEEYQAQRYEAASTIYGPHTLSAYIQLFRNLAKAIATDTVANLSRGPEPPFFKQLIVPLIPSIVDRAPKGRTFGDVLQPAKPEYRVGEVAEVIFVGANPKNSVQNQTHQTFLTVEKYEATSTSWQIVCNDASWETRFYWHKGLLGLSNATVEWHIPDTAQPGIYRIRYFGHNRKQDILKPAVILSFEGTSPAFEVVTI

SEQ ID NO: 5830 - protein, 94 aa, Homo sapiens
MRTIAILAAILLVALQAQAESLQERADEATTQKQSGEDNQDLAISFAGNGLSALRTSGSQARATCYCRTGRCATRESLSGVCEISGRLYRLCCR

SEQ ID NO: 5831 - protein, 288 aa, Homo sapiens
MAATFFGEVVKAPCRAGTEDEEEEEEGRRETPEDREVRLQLARKREVRLLRRQTKTSLEVSLLEKYPCSKFIIAIGNNAVAFLSSFVMNSGVWEEVGCAKLWNEWCRTTDTTHLSSTEAFCVFYHLKSNPSVFLCQCSCYVAEDQQYQWLEKVFGSCPRKNMQITILTCRHVTDYKTSESTGSLPSPFLRALKTQNFKDSACCPLLEQPNIVHDLPAAVLSYCQVWKIPAILYLCYTDVMKLDLITVEAFKPILSTRSLKGLVKNIPQSTEILKKLMTTNEIQSNIYT

SEQ ID NO: 5832 - protein, 569 aa, Homo sapiens
MPSSLFADLERNGSGGGGGGSSGGGETLDDQRALQLALDQLSLLGLDSDEGASLYDSEPRKKSVNMTECVPVPSSEHVAEIVGRQGCKIKALRAKTNTYIKTPVRGEEPVFVVTGRKEDVAMARREIISAAEHFSMIRASRNKNTALNGAVPGPPNLPGQTTIQVRVPYRVVGLVVGPKGATIKRIQQQTHTYIVTPSRDKEPVFEVTGMPENVDRAREEIEAHIALRTGGIIELTDENDFHANGTDVGFDLHHGSGGSGPGSLWSKPTPSITPTPGRKPFSSYRNDSSSSLGSASTDSYFGGGTSSSAAATQRLADYSPPSPALSFAHNGNNNNNGNGYTYTAGGEASVPSPDGCPELQPTFDPAPAPPPGAPLIWAQFERSPGGGPAAPVSSSCSSSASSSASSSSVVFPGGGASAPSNANLGLLVHRRLHPGTSCPRLSPPLHMAPGAGEHHLARRVRSDPGGGGLAYAAYANGLGAQLPGLQPSDTSGSSSSSSSSSSSSSSSSGLRRKGSRDCSVCFESEVIAALVPCGHNLFCMECANRICEKSEPECPVCHTAVTQAIRIFS

SEQ ID NO: 5833 - protein, 729 aa, Homo sapiens
MQSTSNHLWLLSDILGQGATANVFRGRHKKTGDLFAIKVFNNISFLRPVDVQMREFEVLKKLNHKNIVKLFAIEEETTTRHKVLIMEFCPCGSLYTVLEEPSNAYGLPESEFLIVLRDVVGGMNHLRENGIVHRDIKPGNIMRVIGEDGQSVYKLTDFGAARELEDDEQFVSLYGTEEYLHPDMYERAVLRKDHQKKYGATVDLWSIGVTFYHAATGSLPFRPFEGPRRNKEVMYKIITGKPSGAISGVQKAENGPIDWSGDMPVSCSLSRGLQVLLTPVLANILEADQEKCWGFDQFFAETSDILHRMVIHVFSLQQMTAHKIYIHSYNTATIFHELVYKQTKIISSNQELIYEGRRLVLEPGRLAQHFPKTTEENPIFVVSREPLNTIGLIYEKISLPKVHPRYDLDGDASMAKAITGVVCYACRIASTLLLYQELMRKGIRWLIELIKDDYNETVHKKTEVVITLDFCIRNIEKTVKVYEKLMKINLEAAELGEISDIHTKLLRLSSSQGTIETSLQDIDSRLSPGGSLADAWAHQEGTHPKDRNVEKLQVLLNCMTEIYYQFKKDKAERRLAYNEEQIHKFDKQKLYYHATKAMTHFTDECVKKYEAFLNKSEEWIRKMLHLRKQLLSLTNQCFDIEEEVSKYQEYTNELQETLPQKMFTASSGIKHTMTPIYPSSNTLVEMTLGMKKLKEEMEGVVKELAENNHILERFGSLTMDGGLRNVDCL

SEQ ID NO: 5834 - protein, 200 aa, Homo sapiens
MAAAWTVVLVTLVLGLAVAGPVPTSKPTTTGKGCHIGRFKSLSPQELASFKKARDALEESLKLKNWSCSSPVFPGNWDLRLLQVRERPVALEAELALTLKVLEAAAGPALEDVLDQPLHTLHHILSQLQACIQPQPTAGPRPRGRLHHWLHRLQEAPKKESAGCLEASVTFNLFRLLTRDLKYVADGNLCLRTSTHPEST

SEQ ID NO: 5835 - protein, 676 aa, Homo sapiens
MRVLGGRCGALLACLLLVLPVSEANFLSKQQASQVLVRKRRANSLLEETKQGNLERECIEELCNKEEAREVFENDPETDYFYPKYLVCLRSFQTGLFTAARQSTNAYPDLRSCVNAIPDQCSPLPCNEDGYMSCKDGKASFTCTCKPGWQGEKCEFDINECKDPSNINGGCSQICDNTPGSYHCSCKNGFVMLSNKKDCKDVDECSLKPSICGTAVCKNIPGDFECECPEGYRYNLKSKSCEDIDECSENMCAQLCVNYPGGYTCYCDGKKGFKLAQDQKSCEVVSVCLPLNLDTKYELLYLAEQFAGVVLYLKFRLPEISRFSAEFDFRTYDSEGVILYAESIDHSAWLLIALRGGKIEVQLKNEHTSKITTGGDVINNGLWNMVSVEELEHSISIKIAKEAVMDINKPGPLFKPENGLLETKVYFAGFPRKVESELIKPINPRLDGCIRSWNLMKQGASGIKEIIQEKQNKHCLVTVEKGSYYPGSGIAQFHIDYNNVSSAEGWHVNVTLNIRPSTGTGVMLALVSGNNTVPFAVSLVDSTSEKSQDILLSVENTVIYRIQALSLCSDQQSHLEFRVNRNNLELSTPLKIETISHEDLQRQLAVLDKAMKAKVATYLGGLPDVPFSATPVNAFYNGCMEVNINGVQLDLDEAISKHNDIRAHSCPSVWKKTKNS

SEQ ID NO: 5836 - protein, 310 aa, Homo sapiens
MAATGANAEKAESHNDCPVRLLNPNIAKMKEDILYHFNLTTSRHNFPALFGDVKFVCVGGSPSRMKAFIRCVGAELGLDCPGRDYPNICAGTDRYAMYKVGPVLSVSHGMGIPSISIMLHELIKLLYYARCSNVTIIRIGTSGGIGLEPGTVVITEQAVDTCFKAEFEQIVLGKRVIRKTDLNKKLVQELLLCSAELSEFTTVVGNTMCTLDFYEGQGRLDGALCSYTEKDKQAYLEAAYAAGVRNIEMESSVFAAMCSACGLQAAVVCVTLLNRLEGDQISSPRNVLSEYQQRPQRLVSYFIKKKLSKA

SEQ ID NO: 5837 - protein, 744 aa, Homo sapiens
MAADKPADQGAEKHEGTGQSSGITDQEKELSTNAFQAFTSGNYDACLQHLACLQDINKDDYKIILNTAVAEFFKSNQTTTDNLRQTLNQLKNQVHSAVEEMDGLDDVENSMLYYNQAVILYHLRQYTEAISVGEKLYQFIEPFEEKFAQAVCFLLVDLYILTYQAEKALHLLAVLEKMISQGNNNKNGKNETGNNNNKDGSNHKAESGALIEAAKSKIHQYKVRAYIQMKSLKACKREIKSVMNTAGNSAPSLFLKSNFEYLRGNYRKAVKLLNSSNIAEHPGFMKTGECLRCMFWNNLGCIHFAMSKHNLGIFYFKKALQENDNVCAQLSAGSTDPGKKFSGRPMCTLLTNKRYELLYNCGIQLLHIGRPLAAFECLIEAVQVYHANPRLWLRLAECCIAANKGTSEQETKGLPSKKGIVQSIVGQGYHRKIVLASQSIQNTVYNDGQSSAIPVASMEFAAICLRNALLLLPEEQQDPKQENGAKNSNQLGGNTESSESSETCSSKSHDGDKFIPAPPSSPLRKQELENLKCSILACSAYVALALGDNLMALNHADKLLQQPKLSGSLKFLGHLYAAEALISLDRISDAITHLNPENVTDVSLGISSNEQDQGSDKGENEAMESSGKRAPQCYPSSVNSARTVMLFNLGSAYCLRSEYDKARKCLHQAASMIHPKEVPPEAILLAVYLELQNGNTQLALQIIKRNQLLPAVKTHSEVRKKPVFQPVHPIQPIQMPAFTTVQRK

SEQ ID NO: 5838 - protein, 226 aa, Homo sapiens
MSETAPAETATPAPVEKSPAKKKATKKAAGAGAAKRKATGPPVSELITKAVAASKERNGLSLAALKKALAAGGYDVEKNNSRIKLGLKSLVSKGTLVQTKGTGASGSFKLNKKAASGEAKPKAKKAGAAKAKKPAGATPKKAKKAAGAKKAVKKTPKKAKKPAAAGVKKVAKSPKKAKAAAKPKKATKSPAKPKAVKPKAAKPKAAKPKAAKPKAAKAKKAAAKKK

SEQ ID NO: 5839 - protein, 331 aa, Homo sapiens
MAPQRRAATKAPEGNGAAERRNRSSTKKDRAPREVQRLWQRPWLRTAGLGAGFVLTALLLWSSLGADDGVAEVLARRGEVVAGRFIEVPCSEDYDSHRRFEGCTPRKCGRGVTDVVITREEAERIRSVAEKGLSLGGSDGGASILDLHSGALSVGKHFVNLYRYFGDKIQNIFSEEDFRLYREVRQKVQLTIAEAFGISASSLHLTKPTFFSRINSTEARTAHDEYWHAHVDKVTYGSFDYTSLLYLSNYLEDFGGGRFMFMEEGANKTVEPRAGCFCFRMMSCGFQEVNGPRASEAAGAKAGVRCPPGTHHPPERGETHAILEAESIAYC

SEQ ID NO: 5840 - protein, 586 aa, Homo sapiens
MARGYGATVSLVLLGLGLALAVIVLAVVLSRHQAPCGPQAFAHAAVAADSKVCSDIGRAILQQQGSPVDATIAALVCTSVVNPQSMGLGGGVIFTIYNVTTGKVEVINARETVPASHAPSLLDQCAQALPLGTGAQWIGVPGELRGYAEAHRRHGRLPWAQLFQPTIALLRGGHVVAPVLSRFLHNSILRPSLQASTLRQLFFNGTEPLRPQDPLPWPALATTLETVATEGVEVFYTGRLGQMLVEDIAKEGSQLTLQDLAKFQPEVVDALEVPLGDYTLYSPPPPAGGAILSFILNVLRGFNFSTESMARPEGRVNVYHHLVETLKFAKGQRWRLGDPRSHPKLQNASRDLLGETLAQLIRQQIDGRGDHQLSHYSLAEAWGHGTGTSHVSVLGEDGSAVAATSTINTPFGAMVYSPRTGIILNNELLDLCERCPRGSGTTPSPVSGDRVGGAPGRCWPPVPGERSPSSMVPSILINKAQGSKLVIGGAGGELIISAVAQAIMSKLWLGFDLRAAIAAPILHVNSKGCVEYEPNFSQEVQRGLQDRGQNQTQRPFFLNVVQAVSQEGACVYAVSDLRKSGEAAGY

SEQ ID NO: 5841 - protein, 539 aa, Homo sapiens
MAAPASRQVRRRARAAPRPRSAEDWWWDRLAPRGSGYHLLQSDSMLLVLSEPGPARPRAQRRASRRTPRQPPRGPSAAAKPKAGLRSEAAAAPAPAPAPTPTPEEGPDAGWGDRIPLEILVQIFGLLVAADGPMPFLGRAARVCRRWQEAASQPALWHTVTLSSPLVGRPAKGGVKAEKKLLASLEWLMPNRFSQLQRLTLIHWKSQVHPVLKLVGECCPRLTFLKLSGCHGVTADALVMLAKACCQLHSLDLQHSMVESTAVVSFLEEAGSRMRKLWLTYSSQTTAILGALLGSCCPQLQVLEVSTGINRNSIPLQLPVEALQKGCPQLQVLRLLNLMWLPKPPGRGVAPGPGFPSLEELCLASSTCNFVSNEVLGRLLHGSPNLRLLDLRGCARITPAGLQDLPCRELEQLHLGLYGTSDRLTLAKEGSPFLTQKWCHTLRELDLSGQGFSEKDLEQALAAFLSTPGGSHPALCSLNLRGTRVTPSTVSSVISGCPGLLYLNLESCRCLPRGLKRAYRGLEEVQWCLEQLLTSPSPS

SEQ ID NO: 5842 - protein, 505 aa, Homo sapiens
MPQALERADGSWAWVVLLATMVTQGLTLGFPTCIGIFFTELQWEFQASNSETSWFPSILTAVLHMAGPLCSILVGRFGCRVTVMLGGVLASLGMVASSFSHNLSQLYFTAGFITGLGMCFSFQSSITVLGFYFVRRRVLANALASMGVSLGITLWPLLSRYLLENLGWRGTFLVFGGIFLHCCICGAIIRPVATSVAPETKECPPPPPETPALGCLAACGRTIQRHLAFDILRHNTGYCVYILGVMWSVLGFPLPQVFLVPYAMWHSVDEQQAALLISIIGFSNIFLRPLAGLMAGRPAFASHRKYLFSLALLLNGLTNLVCAASGDFWVLVGYCLAYSVSMSGIGALIFQVLMDIVPMDQFPRALGLFTVLDGLAFLISPPLAGLLLDATNNFSYVFYMSSFFLISAALFMGGSFYALQKKEQGKQAVAADALERDLFLEAKDGPGKQRSPEIMCQSSRQPRPAGVNKHLWGCPASSRTSHEWLLWPKAVLQAKQTALGWNSPT

SEQ ID NO: 5843 - protein, 1009 aa, Homo sapiens
MEALTLWLLPWICQCVSVRADSIIHIGAIFEENAAKDDRVFQLAVSDLSLNDDILQSEKITYSIKVIEANNPFQAVQEACDLMTQGILALVTSTGCASANALQSLTDAMHIPHLFVQRNPGGSPRTACHLNPSPDGEAYTLASRPPVRLNDVMLRLVTELRWQKFVMFYDSEYDIRGLQSFLDQASRLGLDVSLQKVDKNISHVFTSLFTTMKTEELNRYRDTLRRAILLLSPQGAHSFINEAVETNLASKDSHWVFVNEEISDPEILDLVHSALGRMTVVRQIFPSAKDNQKCTRNNHRISSLLCDPQEGYLQMLQISNLYLYDSVLMLANAFHRKLEDRKWHSMASLNCIRKSTKPWNGGRSMLDTIKKGHITGLTGVMEFREDSSNPYVQFEILGTTYSETFGKDMRKLATWDSEKGLNGSLQERPMGSRLQGLTLKVVTVLEEPFVMVAENILGQPKRYKGFSIDVLDALAKALGFKYEIYQAPDGRYGHQLHNTSWNGMIGELISKRADLAISAITITPERESVVDFSKRYMDYSVGILIKKPEEKISIFSLFAPFDFAVWACIAAAIPVVGVLIFVLNRIQAVRAQSAAQPRPSASATLHSAIWIVYGAFVQQGGESSVNSMAMRIVMGSWWLFTLIVCSSYTANLAAFLTVSRMDNPIRTFQDLSKQVEMSYGTVRDSAVYEYFRAKGTNPLEQDSTFAELWRTISKNGGADNCVSSPSEGIRKAKKGNYAFLWDVAVVEYAALTDDDCSVTVIGNSISSKGYGIALQHGSPYRDLFSQRILELQDTGDLDVLKQKWWPHMGRCDLTSHASAQADGKSLKLHSFAGVFCILAIGLLLACLVAALELWWNSNRCHQETPKEDKEVNLEQVHRRMNSLMDEDIAHKQISPASIELSALEMGGLAPTQTLEPTREYQNTQLSVSTFLPEQSSHGTSRTLSSGPSSNLPLPLSSSATMPSMQCKHRSPNGGLFRQSPVKTPIPMSFQPVPGGVLPEALDTSHGTSI

SEQ ID NO: 5844 - protein, 434 aa, Homo sapiens
MAASDTERDGLAPEKTSPDRDKKKEQSEVSVSPRASKHHYSRSRSRSRERKRKSDNEGRKHRSRSRSKEGRRHESKDKSSKKHKSEEHNDKEHSSDKGRERLNSSENGEDRHKRKERKSSRGRSHSRSRSRERRHRSRSRERKKSRSRSRERKKSRSRSRERKKSRSRSRERKRRIRSRSRSRSRHRHRTRSRSRTRSRSRDRKKRIEKPRRFSRSLSRTPSPPPFRGRNTAMDAQEALARRLERAKKLQEQREKEMVEKQKQQEIAAAAATGGSVLNVAALLASGTQVTPQIAMAAQMAALQAKALAETGIAVPSYYNPAAVNPMKFAEQEKKRKMLWQGKKEGDKSQSAEIWEKLNFGNKDQNVKFRKLMGIKSEDEAGCSSVDEESYKTLKQQEEVFRNLDAQYEMARSQTHTQRGMGLGFTSSMRGMDAV

SEQ ID NO: 5845 - protein, 273 aa, Homo sapiens
MGQKVTGGIKTVDMRDPTYRPLKQELQGLDYCKPTRLDLLLDMPPVSYDVQLLHSWNNNDRSLNVFVKEDDKLIFHRHPVAQSTDAIRGKVGYTRGLHVWQITWAMRQRGTHAVVGVATADAPLHSVGYTTLVGNNHESWGWDLGRNRLYHDGKNQPSKTYPAFLEPDETFIVPDSFLVALDMDDGTLSFIVDGQYMGVAFRGLKGKKLYPVVSAVWGHCEIRMRYLNGLDPEPLPLMDLCRRSVRLALGRERLGEIHTLPLPASLKAYLLYQ

SEQ ID NO: 5846 - protein, 288 aa, Homo sapiens
MNNLSFSELCCLFCCPPCPGKIASKLAFLPPDPTYTLMCDESGSRWTLHLSERADWQYSSREKDAIECFMTRTSKGNRIACMFVRCSPNAKYTLLFSHGNAVDLGQMSSFYIGLGSRINCNIFSYDYSGYGASSGKPTEKNLYADIEAAWLALRTRYGIRPENVIIYGQSIGTVPSVDLAARYESAAVILHSPLTSGMRVAFPDTKKTYCFDAFPNIDKISKITSPVLIIHGTEDEVIDFSHGLALFERCQRPVEPLWVEGAGHNDVELYGQYLERLKQFVSQELVNL

SEQ ID NO: 5847 - protein, 321 aa, Homo sapiens
MAQAVWSRLGRILWLACLLPWAPAGVAAEFLVGDLVVTQNTSLPWPSSYLTKTVLKVSFLLHDPSNFLKTALFLYSWDFGDGTQMVTEDSVVYYNYSIIGTFTVKLKVVAEWEEVEPDATRAVKQKTGDFSASLKLQETLRGIQVLGPTLIQTFQKMTVTLNFLGSPPLTVCWRLKPECLPLEEGECHPVSVASTAYNLTHTFRDPGDYCFSIRAENIISKTHQYHKIQVWPSRIQPAVFAFPCATLITVMLAFIMYMTLRNATQQKDMVENPEPPSGVRCCCQMCCGPFLLETPSEYLEIVRENHGLLPPLYKSVKTYTV

SEQ ID NO: 5848 - protein, 1174 aa, Homo sapiens [sequence omitted]

SEQ ID NO: 5849 - protein, 158 aa, Homo sapiens
MADEALFLLLHNEMVSGVYKSAEQGEVENGRCITKLENMGFRVGQGLIERFTKDTARFKDELDIMKFICKDFWTTVFKKQIDNLRTNHQGIYVLQDNKFRLLTQMSAGKQYLEHASKYLAFTCGLIRGGLSNLGIKSIVTAEVSSMPACKFQVMIQKL

SEQ ID NO: 5850 - protein, 725 aa, Homo sapiens
MEPGDAARPGSGRATGAPPPRLLLLPLLLGWGLRVAAAASASSSGAAAEDSSAMEELATEKEAEESHRQDSVSLLTFILLLTLTILTIWLFKHRRVRFLHETGLAMIYGLIVGVILRYGTPATSGRDKSLSCTQEDRAFSTLLVNVSGKFFEYTLKGEISPGKINSVEQNDMLRKVTFDPEVFFNILLPPIIFHAGYSLKKRHFFRNLGSILAYAFLGTAVSCFIIGNLMYGVVKLMKIMGQLSDKFYYTDCLFFGAIISATDPVTVLAIFNELHADVDLYALLFGESVLNDAVAIVLSSSIVAYQPAGLNTHAFDAAAFFKSVGIFLGIFSGSFTMGAVTGVNANVTKFTKLHCFPLLETALFFLMSWSTFLLAEACGFTGVVAVLFCGITQAHYTYNNLSVESRSRTKQLFEVLHFLAENFIFSYMGLALFTFQKHVFSPIFIIGAFVAIFLGRAAHIYPLSFFLNLGRRHKIGWNFQHMMMFSGLRGAMAFALAIRDTASYARQMMFTTTLLIVFFTVWIIGGGTTPMLSWLNIRVGVEEPSEEDQNEHHWQYFRVGVDPDQDPPPNNDSFQVLQGDGPDSARGNRTKQESAWIFRLWYSFDHNYLKPILTHSGPPLTTTLPAWCGLLARCLTSPQVYDNQEPLREEDSDFILTEGDLTLTYGDSTVTANGSSSSHTASTSLEGSRRTKSSSEEVLERDLGMGDQKVSSRGTRLVFPLEDNA

SEQ ID NO: 5851 - protein, 103 aa, Homo sapiens
MSEEKPKEGVKTENDHINLKVAGQDGSVVQFKIKRHTPLSKLMKAYCERQGLSMRQIRFRFDGQPINETDTPAQLEMEDEDTIDVFQQQTGGVPESSLAGHSF

SEQ ID NO: 5852 - protein, 133 aa, Homo sapiens
MALGVPISVYLLFNAMTALTEEAAVTVTPPITAQQADNIEGPIALKFSHLCLEDHNSYCINGACAFHHELEKAICRCFTGYTGERCEHLTLTSYAVDSYEKYIAIGIGVGLLLSGFLVIFYCYIRKRYEKDKI

SEQ ID NO: 5853 - protein, 330 aa, Homo sapiens
MATKESRDAKAQLALSSSANQSKEVPENPNYALKCTLVGHTEAVSSVKFSPNGEWLASSSADRLIIIWGAYDGKYEKTLYGHNLEISDVAWSSDSSRLVSASDDKTLKLWDVRSGKCLKTLKGHSNYVFCCNFNPPSNLIISGSFDETVKIWEVKTGKCLKTLSAHSDPVSAVHFNCSGSLIVSGSYDGLCRIWDAASGQCLKTLVDDDNPPVSFVKFSPNGKYILTATLDNTLKLWDYSRGRCLKTYTGHKNEKYCIFANFSVTGGKWIVSGSEDNLVYIWNLQTKEIVQKLQGHTDVVISAACHPTENLIASAALENDKTIKLWMSNH

SEQ ID NO: 5854 - protein, 241 aa, Homo sapiens
MNRCWALFLSLCCYLRLVSAEGDPIPEELYEMLSDHSIRSFDDLQRLLHGDPGEEDGAELDLNMTRSHSGGELESLARGRRSLGSLTIAEPAMIAECKTRTEVFEISRRLIDRTNANFLVWPPCVEVQRCSGCCNNRNVQCRPTQVQLRPVQVRKIEIVRKKPIFKKATVTLEDHLACKCETVAAARPVTRSPGGSQEQRAKTPQTRVTIRTVRVRRPPKGKHRKFKHTHDKTALKETLGA

SEQ ID NO: 5855 - protein, 140 aa, Homo sapiens
MHRGVGPAFRVVRKMAASGAEPQVLVQYLVLRKDLSQAPFSWPAGALVAQACHAATAALHTHRDHPHTAAYLQELGRMRKVVLEAPDETTLKELAETLQQKNIDHMLWLEQPENIATCIALRPYPKEEVGQYLKKFRLFK

SEQ ID NO: 5856 - protein, 252 aa, Homo sapiens
MAAPALLLLALLLPVGAWPGLPRRPCVHCCRPAWPPGPYARVSDRDLWRGDLWRGLPRVRPTIDIEILKGEKGEAGVRGRAGRSGKEGPPGARGLQGRRGQKGQVGPPGAACRRAYAAFSVGRREGLHSSDHFQAVPFDTELVNLDGAFDLAAGRFLCTVPGVYFLSLNVHTWNYKETYLHIMLNRRPAAVLYAQPSERSVMQAQSLMLLLAAGDAVWVRMFQRDRDNAIYGEHGDLYITFSGHLVKPAAEL

SEQ ID NO: 5857 - protein, 247 aa, Homo sapiens
MAGGVLPLRGLRALCRVLLFLSQFCILSGGEQSQALAQSIKDPGPTRTFTVVPRAAESTEIPPYVMKCPSNGLCSRLPADCIDCTTNFSCTYGKPVTFDCAVKPSVTCVDQDFKSQKNFIINMTCRFCWQLPETDYECTNSTSCMTVSCPRQRYPANCTVRDHVHCLGNRTFPKMLYCNWTGGYKWSTALALSITLGGFGADRFYLGQWREGLGKLFSFGGLGIWTLIDVLLIGVGYVGPADGSLYI

SEQ ID NO: 5858 - protein, 1458 aa, Homo sapiens
MGLRPGIFLLELLLLLGQGTPQIHTSPRKSTLEGQLWPETLKNSPFPCNPNKLGVNMPSKSVHSLKPSDIKFVAAIGNLEIPPDPGTGDLEKQDWTERPQQVCMGVMTVLSDIIRYFSPSVPMPVCHTGKRVIPHDGAEDLWIQAQELVRNMKENLQLDFQFDWKLINVFFSNASQCYLCPSAQQNGLAAGGVDELMGVLDYLQQEVPRAFVNLVDLSEVAEVSRQYHGTWLSPAPEPCNCSEETTRLAKVVMQWSYQEAWNSLLASSRYSEQESFTVVFQPFFYETTPSLHSEDPRLQDSTTLAWHLWNRMMEPAGEKDEPLSVKHGRPMKCPSQESPYLFSYRNSNYLTRLQKPQDKLEVREGAEIRCPDKDPSDTVPTSVHRLKPADINVIGALGDSLTAGNGAGSTPGNVLDVLTQYRGLSWSVGGDENIGTVTTLANILREFNPSLKGFSVGTGKETSPNAFLNQAVAGGRAEDLPVQARRLVDLMKNDTRIHFQEDWKIITLFIGGNDLCDFCNDLVHYSPQNFTDNIGKALDILHAEVPRAFVNLVTVLEIVNLRELYQEKKVYCPRMILRSLCPCVLKFDDNSTELATLIEFNKKFQEKTHQLIESGRYDTREDFTVVVQPFFENVDMPKTSEGLPDNSFFAPDCFHFSSKSHSRAASALWNNMLEPVGQKTTRHKFENKINITCPNQVQPFLRTYKNSMQGHGTWLPCRDRAPSALHPTSVHALRPADIQVVAALGDSLTAGNGIGSKPDDLPDVTTQYRGLSYSAGGDGSLENVTTLPNILREFNRNLTGYAVGTGDANDTNAFLNQAVPGAKAEDLMSQVQTLMQKMKDDHRVNFHEDWKVITVLIGGSDLCDYCTDSNLYSAANFVHHLRNALDVLHREVPRVLVNLVDFLNPTIMRQVFLGNPDKCPVQQASVLCNCVLTLRENSQELARLEAFSRAYRSSMRELVGSGRYDTQEDFSVVLQPFFQNIQLPVLADGLPDTSFFAPDCIHPNQKFHSQLARALWTNMLEPLGSKTETLDLRAEMPITCPTQNEPFLRTPRNSNYTYPIKPAIENWGSDFLCTEWKASNSVPTSVHQLRPADIKVVAALGDSLTTAVGARPNNSSDLPTSWRGLSWSIGGDGNLETHTTLPNILKKFNPYLLGFSTSTWEGTAGLNVAAEGARARDMPAQAWDLVERMKNSPDINLEKDWKLVTLFIGVNDLCHYCENPEAHLATEYVQHIQQALDILSEELPRAFVNVVEVMELASLYQGQGGKCAMLAAQNNCTCLRHSQSSLEKQELKKVNWNLQHGISSFSYWHQYTQREDFAVVVQPFFQNTLTPLNERGDTDLTFFSEDCFHFSDRGHAEMAIALWNNMLEPVGRKTTSNNFTHSRAKLKCPSPESPYLYTLRNSRLLPDQAEEAPEVLYWAVPVAAGVGLVVGIIGTVVWRCRRGGRREDPPMSLRTVAL

SEQ ID NO: 5859 - protein, 619 aa, Homo sapiens
MFVPRSLKIKRNANDDGKSCVAKIIKPDPEDLQLDKSRDVPVDAVATEAATIDRHISESCPFPSPGGQLAEVHSVSPEQGAKDSHPSEEPVKSFSKTQRWAEPGEPICVVCGRYGEYICDKTDEDVCSLECKAKHLLQVKEKEEKSKLSNPQKADSEPESPLNASYVYKEHPFILNLQEDQIENLKQQLGILVQGQEVTRPIIDFEHCSLPEVLNHNLKKSGYEVPTPIQMQMIPVGLLGRDILASADTGSGKTAAFLLPVIMRALFESKTPSALILTPTRELAIQIERQAKELMSGLPRMKTVLLVGGLPLPPQLYRLQQHVKVIIATPGRLLDIIKQSSVELCGVKIVVVDEADTMLKMGFQQQVLDILENIPNDCQTILVSATIPTSIEQLASQLLHNPVRIITGEKNLPCANVRQIILWVEDPAKKKKLFEILNDKKLFKPPVLVFVDCKLGADLLSEAVQKITGLKSISIHSEKSQIERKNILKGLLEGDYEVVVSTGVLGRGLDLISVRLVVNFDMPSSMDEYVHQIGRVGRLGQNGTAITFINNNSKRLFWDIAKRVKPTGSILPPQLLNSPYLHDQKRKEQQKDKQTQNDLVTGANLMDIIRKHDKSNSQK

SEQ ID NO: 5860 - protein, 617 aa, Homo sapiens
MGSYLSVPAYFTSRDLFRCSECQDSLTNWYYEKDGKLYCPKDYWGKFGEFCHGCSLLMTGPFMVAGEFKYHPECFACMSCKVIIEDGDAYALVQHATLYCGKCHNEVVLAPMFERLSTESVQEQLPYSVTLISMPATTEGRRGFSVSVESACSNYATTVQVKEVNRMHISPNNRNAIHPGDRILEINGTPVRTLRVEEVEDAISQTSQTLQLLIEHDPVSQRLDQLRLEARLAPHMQNAGHPHALSTLDTKENLEGTLRRRSLRRSNSISKSPGPSSPKEPLLFSRDISRSESLRCSSSYSQQIFRPCDLIHGEVLGKGFFGQAIKVTHKATGKVMVMKELIRCDEETQKTFLTEVKVMRSLDHPNVLKFIGVLYKDKKLNLLTEYIEGGTLKDFLRSMDPFPWQQKVRFAKGIASGMAYLHSMCIIHRDLNSHNCLIKLDKTVVVADFGLSRLIVEERKRAPMEKATTKKRTLRKNDRKKRYTVVGNPYWMAPEMLNGKSYDETVDIFSFGIVLCEIIGQVYADPDCLPRTLDFGLNVKLFWEKFVPTDCPPAFFPLAAICCRLEPESRPAFSKLEDSFEALSLYLGELGIPLPAELEELDHTVSMQYGLTRDSPP

SEQ ID NO: 5861 - protein, 511 aa, Homo sapiens
MKLFWLLFTIGFCWAQYSSNTQQGRTSIVHLFEWRWVDIALECERYLAPKGFGGVQVSPPNENVAIHNPFRPWWERYQPVSYKLCTRSGNEDEFRNMVTRCNNVGVRIYVDAVINHMCGNAVSAGTSSTCGSYFNPGSRDFPAVPYSGWDFNDGKCKTGSGDIENYNDATQVRDCRLSGLLDLALGKDYVRSKIAEYMNHLIDIGVAGFRIDASKHMWPGDIKAILDKLHNLNSNWFPEGSKPFIYQEVIDLGGEPIKSSDYFGNGRVTEFKYGAKLGTVIRKWNGEKMSYLKNWGEGWGFMPSDRALVFVDNHDNQRGHGAGGASILTFWDARLYKMAVGFMLAHPYGFTRVMSSYRWPRYFENGKDVNDWVGPPNDNGVTKEVTINPDTTCGNDWVCEHRWRQIRNMVNFRNVVDGQPFTNWYDNGSNQVAFGRGNRGFIVFNNDDWTFSLTLQTGLPAGTYCDVISGDKINGNCTGIKIYVSDDGKAHFSISNSAEDPFIAIHAESKL

SEQ ID NO: 5862 - protein, 319 aa, Homo sapiens
MVLSELAARLNCAEYKNWVKAGHCLLLLRSCLQGFVGREVLSFHRGLLAAAPGLGPRAVCRGGSRCSPRARQFQPQCQVCAEWKREILRHHVNRNGDVHWGNCRPGRWPVDAWEVAKAFMPRGLADKQGPEECDAVALLSLINSCDHFVVDRKKVTEVIKCRNEIMHSSEMKVSSTWLRDFQMKIQNFLNEFKNIPEIVAVYSRIEQLLTSDWAVHIPEEDQRDGCECEMGTYLSESQVNEIEMQLLKEKLQEIYLQAEEQEVLPEELSNRLEVVKEFLRNNEDLRNGLTEDMQKLDSLCLHQKLDSQEPGRQTPDRKA

SEQ ID NO: 5863 - protein, 243 aa, Homo sapiens
MRPQGPAASPQRLRGLLLLLLLQLPAPSSASEIPKGKQKAQLRQREVVDLYNGMCLQGPAGVPGRDGSPGANGIPGTPGIPGRDGFKGEKGECLRESFEESWTPNYKQCSWSSLNYGIDLGKIAECTFTKMRSNSALRVLFSGSLRLKCRNACCQRWYFTFNGAECSGPLPIEAIIYLDQGSPEMNSTINIHRTSSVEGLCEGIGAGLVDVAIWVGTCSDYPKGDASTGWNSVSRIIIEELPK

SEQ ID NO: 5864 - protein, 364 aa, Homo sapiens
MPRGRCRQQGPRIPIWAAANYANAHPWQQMDKASPGVAYTPLVDPWIERPCCGDTVCVRTTMEQKSTASGTCGGKPAERGPLAGHMPSSRPHRVDFCWVPGSDPGTFDGSPWLLDRFLAQLGDYMSFHFEHYQDNISRVCEILRRLTGRAQAWAAPYLDGDLPLPDDYELFCQDLKEVVQDPNSFAEYHAVVTCPLPLASSQLPVAPQLPVVRQYLARFLEGLALDMGTAPRSLPAAMATPAVSGSNSVSRSALFEQQLTKESTPGPKEPPVLPSSTCSSKPGPVEPASSQPEEAAPTPVPRLSESANPPAQRPDPAHPGGPKPQKTEEEVLETEGDQEVSLGTPQEVVEAPETPGEPPLSPGF

SEQ ID NO: 5865 - protein, 782 aa, Homo sapiens
MARARAGALLALWVLGAAAHPQCLDFRPPFRPTQPLRLCAQYSDFGCCDEGRDAELTRRFWALASRVDAAEWAACAGYARDLLCQECSPYAAHLYDAEDPFTPLRTVPGLCQDYCLDMWHKCRGLFRHLSTDQELWALEGNLARFCRYLSLDDTDYCFPYLLVNKNLNSNLGHVVADAKGCLQLCLEEVANGLRNPVAMVHARDGTHRFFVAEQVGLVWAYLPDRSRLGKPFLNISRVVLTSPWEGDERGFLGIAFHPSFQHNRRLYVYYSVGIRSSEWIRISEFRVSEDDENAVDHSSERIILEVKEPASNHNGGQLLFGDDGYLYIFTGDGGMAGDPFGTFGNAQNKSALLGKVLRIDVDRKERGLPYGIPPDNPFVGDPAAQPEVYALGVRNMWRCSFDRGDPSSGTGRGRLFCGDVGQNKFEEVDVVERGGNYGWRAREGFECYDRSLCANTSLNDLLPIFAYPHTVGKSVTGGYVYRGCEYPNLNGLYIFGDFMSGRLMSLQENPGTGQWQYSEICMGHGQTCEFPGLINNYYPYIISFGEDEAGELYFMSTGEPSATAPRGVVYKIIDASRRAPPGKCQIQPAQVKIRSRLIPFVPKEKFIPKTRSTPRPTARAPTRAPRRGRPTAAPPAPTPRPARPTQQPGSRRGGGRRRGRLNSASRAFRDGEVRLVRPAGLSSGSGRVEVFVGGRWGTVCDDSWNISGAAVVCRQLGFAYAVRAVKRAEFGQGGSLPILLDDVRCAGWERNLLECQHNGVGTHNCEHDEDAGVVCSHQNPDL

SEQ ID NO: 5866 - protein, 441 aa, Homo sapiens
MLRKGCCVELLLLLVAAELPLGGGCPRDCVCYPAPMTVSCQAHNFAAIPEGIPVDSERVFLQNNRIGLLQPGHFSPAMVTLWIYSNNITYIHPSTFEGFVHLEELDLGDNRQLRTLAPETFQGLVKLHALYLYKCGLSALPAGVFGGLHSLQYLYLQDNHIEYLQDDIFVDLVNLSHLFLHGNKLWSLGPGTFRGLVNLDRLLLHENQLQWVHHKAFHDLRRLTTLFLFNNSLSELQGECLAPLGALEFLRLNGNPWDCGCRARSLWEWLQRFRGSSSAVPCVSPGLRHGQDLKLLRAEDFRNCTGPASPHQIKSHTLTTTDRAARKEHHSPHGPTRSKGHPHGPRPGHRKPGKNCTNPRNRNQISKAGAGKQAPELPDYAPDYQHKFSFDIMPTARPKRKGKCARRTPIRAPSGVQQASSASSLGASLLAWTLGLAVTLR

SEQ ID NO: 5867 - protein, 1040 aa, Homo sapiens
MGTATRRKPHLLLVAAVALVSSSAWSSALGSQTTFGPVFEDQPLSVLFPEESTEEQVLLACRARASPPATYRWKMNGTEMKLEPGSRHQLVGGNLVIMNPTKAQDAGVYQCLASNPVGTVVSREAILRFGFLQEFSKEERDPVKAHEGWGVMLPCNPPAHYPGLSYRWLLNEFPNFIPTDGRHFVSQTTGNLYIARTNASDLGNYSCLATSHMDFSTKSVFSKFAQLNLAAEDTRLFAPSIKARFPAETYALVGQQVTLECFAFGNPVPRIKWRKVDGSLSPQWTTAEPTLQIPSVSFEDEGTYECEAENSKGRDTVQGRIIVQAQPEWLKVISDTEADIGSNLRWGCAAAGKPRPTVRWLRNGEPLASQNRVEVLAGDLRFSKLSLEDSGMYQCVAENKHGTIYASAELAVQALAPDFRLNPVRRLIPAARGGEILIPCQPRAAPKAVVLWSKGTEILVNSSRVTVTPDGTLIIRNISRSDEGKYTCFAENFMGKANSTGILSVRDATKITLAPSSADINLGDNLTLQCHASHDPTMDLTFTWTLDDFPIDFDKPGGHYRRTNVKETIGDLTILNAQLRHGGKYTCMAQTVVDSASKEATVLVRGPPGPPGGVVVRDIGDTTIQLSWSRGFDNHSPIAKYTLQARTPPAGKWKQVRTNPANIEGNAETAQVLGLTPWMDYEFRVIASNILGTGEPSGPSSKIRTREAAPSVAPSGLSGGGGAPGELIVNWTPMSREYQNGDGFGYLLSFRRQGSTHWQTARVPGADAQYFVYSNESVRPYTPFEVKIRSYNRRGDGPESLTALVYSAEEEPRVAPTKVWAKGVSSSEMNVTWEPVQQDMNGILLGYEIRYWKAGDKEAAADRVRTAGLDTSARVSGLHPNTKYHVTVRAYNRAGTGPASPSANATTMKPPPRRPPGNISWTFSSSSLSIKWDPVVPFRNESAVTGYKMLYQNDLHLTPTLHLTGKNWIEIPVPEDIGHALVQIRTTGPGGDGIPAEVHIVRNGGTSMMVENMAVRPAPHPGTVISHSVAMLILIGSLEL

SEQ ID NO: 5868 - protein, 1627 aa, Homo sapiens
MRLWSWVLHLGLLSAALGCGLAERPRRARRDPRAGRPPRPAAGPATCATRAARGRRASPPPPPPPGGAWEAVRVPRRRQQREARGATEEPSPPSRALYFSGRGEQLRLRADLELPRDAFTLQVWLRAEGGQRSPAVITGLYDKCSYISRDRGWVVGIHTISDQDNKDPRYFFSLKTDRARQVTTINAHRSYLPGQWVYLAATYDGQFMKLYVNGAQVATSGEQVGGIFSPLTQKCKVLMLGGSALNHNYRGYIEHFSLWKVARTQREILSDMETHGAHTALPQLLLQENWDNVKHAWSPMKDGSSPKVEFSNAHGFLLDTSLEPPLCGQTLCDNTEVIASYNQLSSFRQPKVVRYRVVNLYEDDHKNPTVTREQVDFQHHQLAEAFKQYNISWELDVLEVSNSSLRRRLILANCDISKIGDENCDPECNHTLTGHDGGDCRHLRHPAFVKKQHNGVCDMDCNYERFNFDGGECCDPEITNVTQTCFDPDSPHRAYLDVNELKNILKLDGSTHLNIFFAKSSEEELAGVATWPWDKEALMHLGGIVLNPSFYGMPGHTHTMIHEIGHSLGLYHVFRGISEIQSCSDPCMETEPSFETGDLCNDTNPAPKHKSCGDPGPGNDTCGFHSFFNTPYNNFMSYADDDCTDSFTPNQVARMHCYLDLVYQGWQPSRKPAPVALAPQVLGHTTDSVTLEWFPPIDGHFFERELGSACHLCLEGRILVQYASNASSPMPCSPSGHWSPREAEGHPDVEQPCKSSVRTWSPNSAVNPHTVPPACPEPQGCYLELEFLYPLVPESLTIWVTFVSTDWDSSGAVNDIKLLAVSGKNISLGPQNVFCDVPLTIRLWDVGEEVYGIQIYTLDEHLEIDAAMLTSTADTPLCLQCKPLKYKVVRDPPLQMDVASILHLNRKFVDMDLNLGSVYQYWVITISGTEESEPSPAVTYIHGSGYCGDGIIQKDQGEQCDDMNKINGDGCSLFCRQEVSFNCIDEPSRCYFHDGDGVCEEFEQKTSIKDCGVYTPQGFLDQWASNASVSHQDQQCPGWVIIGQPAASQVCRTKVIDLSEGISQHAWYPCTISYPYSQLAQTTFWLRAYFSQPMVAAAVIVHLVTDGTYYGDQKQETISVQLLDTKDQSHDLGLHVLSCRNNPLIIPVVHDLSQPFYHSQAVRVSFSSPLVAISGVALRSFDNFDPVTLSSCQRGETYSPAEQSCVHFACEKTDCPELAVENASLNCSSSDRYHGAQCTVSCRTGYVLQIRRDDELIKSQTGPSVTVTCTEGKWNKQVACEPVDCSIPDHHQVYAASFSCPEGTTFGSQCSFQCRHPAQLKGNNSLLTCMEDGLWSFPEALCELMCLAPPPVPNADLQTARCRENKHKVGSFCKYKCKPGYHVPGSSRKSKKRAFKTQCTQDGSWQEGACVPVTCDPPPPKFHGLYQCTNGFQFNSECRIKCEDSDASQGLGSNVIHCRKDGTWNGSFHVCQEMQGQCSVPNELNSNLKLQCPDGYAIGSECATSCLDHNSESIILPMNVTVRDIPHWLNPTRVERVVCTAGLKWYPHPALIHCVKGCEPFMGDNYCDAINNRAFCNYDGGDCCTSTVKTKKVTPFPMSCDLQGDCACRDPQAQEHSRKDLRGYSHG

SEQ ID NO: 5869 - protein, 304 aa, Homo sapiens
MLQKPRNRGRSGGQAERDRDWSHSGNPGASRAGEDARVLRDGFAEEAPSTSRGPGGSQGSQGPSPQGARRAQAAPAVGPRSQKQLELKVSELVQFLLIKDQKKIPIKRADILKHVIGDYKDIFPDLFKRAAERLQYVFGYKLVELEPKSNTYILINTLEPVEEDAEMRGDQGTPTTGLLMIVLGLIFMKGNTIKETEAWDFLRRLGVYPTKKHLIFGDPKKLITEDFVRQRYLEYRRIPHTDPVDYEFQWGPRTNLETSKMKVLKFVAKVHNQDPKDWPAQYCEALADEENRARPQPSGPAPSS

SEQ ID NO: 5870 - protein, 74 aa, Homo sapiens
MPKYYEDKPQGGACAGLKEDLGACLLQSDCVVQEGKSPRQCLKEGYCNSLKYAFFECKRSVLDNRARFRGRKGY

SEQ ID NO: 5871 - protein, 145 aa, Homo sapiens
MELVQVLKRGLQQITGHGGLRGYLRVFFRTNDAKVGTLVGEDKYGNKYYEDNKQFFGRHRWVVYTTEMNGKNTFWDVDGSMVPPEWHRWLHSMTDDPPTTKPLTARKFIWTNHKFNVTGTPEQYVPYSTTRKKIQEWIPPSTPYK

SEQ ID NO: 5872 - protein, 2320 aa, Homo sapiens
MAEPSSARRPVPLIESELYFLIARYLSAGPCRRAAQVLVQELEQYQLLPKRLDWEGNEHNRSYEELVLSNKHVAPDHLLQICQRIGPMLDKEIPPSISRVTSLLGAGRQSLLRTAKDCRHTVWKGSAFAALHRGRPPEMPVNYGSPPNLVEIHRGKQLTGCSTFSTAFPGTMYQHIKMHRRILGHLSAVYCVAFDRTGHRIFTGSDDCLVKIWSTHNGRLLSTLRGHSAEISDMAVNYENTMIAAGSCDKIIRVWCLRTCAPVAVLQGHTGSITSLQFSPMAKGSQRYMVSTGADGTVCFWQWDLESLKFSPRPLKFTEKPRPGVQMLCSSFSVGGMFLATGSTDHVIRMYFLGFEAPEKIAELESHTDKVDSIQFCNNGDRFLSGSRDGTARIWRFEQLEWRSILLDMATRISGDLSSEEERFMKPKVTMIAWNQNDSIVVTAVNDHVLKVWNSYTGQLLHNLMGHADEVFVLETHPFDSRIMLSAGHDGSIFIWDITKGTKMKHYFNMIEGQGHGAVFDCKFSQDGQHFACTDSHGHLLIFGFGCSKPYEKIPDQMFFHTDYRPLIRDSNNYVLDEQTQQAPHLMPPPFLVDVDGNPHPTKYQRLVPGRENSADEHLIPQLGYVATSDGEVIEQIISLQTNDNDERSPESSILDGMIRQLQQQQDQRMGADQDTIPRGLSNGEETPRRGFRRLSLDIQSPPNIGLRRSGQVEGVRQMHQNAPRSQIATERDLQAWKRRVVVPEVPLGIFRKLEDFRLEKGEEERNLYIIGRKRKTLQLSHKSDSVVLVSQSRQRTCRRKYPNYGRRNRSWRELSSGNESSSSVRHETSCDQSEGSGSSEEDEWRSDRKSESYSESSSDSSSRYSDWTADAGINLQPPLRTSCRRRITRFCSSSEDEISTENLSPPKRRRKRKKENKPKKENLRRMTPAELANMEHLYEFHPPVWITDTTLRKSPFVPQMGDEVIYFRQGHEAYIEAVRRNNIYELNPNKEPWRKMDLRDQELVKIVGIRYEVGPPTLCCLKLAFIDPATGKLMDKSFSIRYHDMPDVIDFLVLRQFYDEARQRNWQSCDRFRSIIDDAWWFGTVLSQEPYQPQYPDSHFQCYIVRWDNTEIEKLSPWDMEPIPDNVDPPEELGASISVTTDELEKLLYKPQAGEWGQKSRDEECDRIISGIDQLLNLDIAAAFAGPVDLCTYPKYCTVVAYPTDLYTIRMRLVNRFYRRLSALVWEVRYIEHNARTFNEPESVIARSAKKITDQLLKFIKNQHCTNISELSNTSENDEQNAEDLDDSDLPKTSSGRRRVHDGKKSIRATNYVESNWKKQCKELVNLIFQCEDSEPFRQPVDLVEYPDYRDIIDTPMDFGTVRETLDAGNYDSPLEFCKDIRLIFSNAKAYTPNKRSKIYSMTLRLSALFEEKMKKISSDFKIGQKFNEKLRRSQRFKQRQNCKGDSQPNKSIRNLKPKRLKSQTKIIPELVGSPTQSTSSRTAYLGTHKTSAGISSGVTSGDSSDSAESSERRKRNRPITNGSTLSESEVEDSLATSLSSSASSSSEESKESSRARESSSRSGLSRSSNLRVTRTRAAQRKTGPVSLANGCGRKATRKRVYLSDSDNNSLETGEILKARAGNNRKVLRKCAAVAANKIKLMSDVEENSSSESVCSGRKLPHRNASAVARKKLLHNSEDEQSLKSEIEEEELKDENQLLPVSSSHTAQSNVDESENRDSESESDLRVARKNWHANGYKSHTPAPSKTKFLKIESSEEDSKSHDSDHACNRTAGPSTSVQKLKAESISEEADSEPGRSGGRKYNTFHKNASFFKKTKILSDSEDSESEEQDREDGKCHKMEMNPISGNLNCDPIAMSQCSSDHGCETDLDSDDDKIEKPNNFMKDSASQDNGLSRKISRKRVCSSDSDSSLQVVKKSSKARTGLLRITRRCAATAANKIKLMSDVEDVSLENVHTRSKNGRKKPLHLACTTAKKKLSDCEGSVHCEVPSEQYACEGKPPDPDSEGSTKVLSQALNGDSDSEDMLNSEHKHRHTNIHKIDAPSKRKSSSVTSSGEDSKSHIPGSETDRTFSSESTLAQKATAENNFEVELNYGLRRWNGRRLRTYGKAPFSKTKVIHDSQETAEKEVKRKRSHPELENVKISETTGNSKFRPDTSSKSSDLGSVTESDIDCTDNTKTKRRKTKGKAKVVRKEFVPRDREPNTKVRTCMHNQKDAVQMPSETLKAKMVPEKVPRRCATVAANKIKIMSNLKETISGPENVWIRKSSRKLPHRNASAAAKKKLLNVYKEDDTTINSESEKELEDINRKMLFLRGFRSWKENAQ

SEQ ID NO: 5873 - protein, 58 aa, Homo sapiens
MVNLLQIVRDHWVHVLVPMGFVIGCYLDRKSDERLTAFRNKSMLFKRELQPSEEVTWK

SEQ ID NO: 5874 - protein, 125 aa, Homo sapiens
MHKEEHEVAVLGPPPSTILPRSTVINIHSETSVPDHVVWSLFNTLFLNWCCLGFIAFAYSVKSRDRKMVGDVTGAQAYASTAKCLNIWALILGILMTIGFILLLVFGSVTVYHIMLQIIQEKRGY

SEQ ID NO: 5875 - protein, 335 aa, Homo sapiens
MAAGAAEAAVAAVEEVGSAGQFEELLRLKAKSLLVVHFWAPWAPQCAQMNEVMAELAKELPQVSFVKLEAEGVPEVSEKYEISSVPTFLFFKNSQKIDRLDGAHAPELTKKVQRHASSGSFLPSANEHLKEDLNLRLKKLTHAAPCMLFMKGTPQEPRCGFSKQMVEILHKHNIQFSSFDIFSDEEVRQGLKAYSSWPTYPQLYVSGELIGGLDIIKELEASEELDTICPKAPKLEERLKVLTNKASVMLFMKGNKQEAKCGFSKQILEILNSTGVEYETFDILEDEEVRQGLKAYSNWPTYPQLYVKGELVGGLDIVKELKENGELLPILRGEN

SEQ ID NO: 5876 - protein, 345 aa, Homo sapiens
MGVCGYLFLPWKCLVVVSLRLLFLVPTGVPVRSGDATFPKAMDNVTVRQGESATLRCTIDDRVTRVAWLNRSTILYAGNDKWSIDPRVIILVNTPTQYSIMIQNVDVYDEGPYTCSVQTDNHPKTSRVHLIVQVPPQIMNISSDITVNEGSSVTLLCLAIGRPEPTVTWRHLSVKEGQGFVSEDEYLEISDIKRDQSGEYECSALNDVAAPDVRKVKITVNYPPYISKAKNTGVSVGQKGILSCEASAVPMAEFQWFKEETRLATGLDGMRIENKGRMSTLTFFNVSEKDYGNYTCVATNKLGNTNASITLYGPGAVIDGVNSASRALACLWLSGTLLAHFFIKF

SEQ ID NO: 5877 - protein, 321 aa, Homo sapiens
MAAAEAGGDDARCVRLSAERAQALLADVDTLLFDCDGVLWRGETAVPGAPEALRALRARGKRLGFITNNSSKTRAAYAEKLRRLGFGGPAGPGASLEVFGTAYCTALYLRQRLAGAPAPKAYVLGSPALAAELEAVGVASVGVGPEPLQGEGPGDWLHAPLEPDVRAVVVGFDPHFSYMKLTKALRYLQQPGCLLVGTNMDNRLPLENGRFIAGTGCLVRAVEMAAQRQADIIGKPSRFIFDCVSQEYGINPERTVMVGDRLDTDILLGATCGLKTILTLTGVSTLGDVKNNQESDCVSKKKMVPDFYVDSIADLLPALQG

SEQ ID NO: 5878 - protein, 235 aa, Homo sapiens
MAVELGVLLVRPRPGTGLGRVMRTLLLVLWLATRGSALYFHIGETEKKCFIEEIPDETMVIGNYRTQLYDKQREEYQPATPGLGMFVEVKDPEDKVILARQYGSEGRFTFTSHTPGEHQICLHSNSTKFSLFAGGMLRVHLDIQVGEHANDYAEIAAKDKLSELQLRVRQLVEQVEQIQKEQNYQRWREERFRQTSESTNQRVLWWSILQTLILVAIGVWQMRHLKSFFEAKKLV

SEQ ID NO: 5879 - protein, 398 aa, Homo sapiens
MLRLYVLVMGVSAFTLQPAAHTGAARSCRFRGRHYKREFRLEGEPVALRCPQVPYWLWASVSPRINLTWHKNDSARTVPGEEETRMWAQDGALWLLPALQEDSGTYVCTTRNASYCDKMSIELRVFENTDAFLPFISYPQILTLSTSGVLVCPDLSEFTRDKTDVKIQWYKDSLLLDKDNEKFLSVRGTTHLLVHDVALEDAGYYRCVLTFAHEGQQYNITRSIELRIKKKKEETIPVIISPLKTISASLGSRLTIPCKVFLGTGTPLTTMLWWTANDTHIESAYPGGRVTEGPRQEYSENNENYIEVPLIFDPVTREDLHMDFKCVVHNTLSFQTLRTTVKEASSTFSWGIVLAPLSLAFLVLGGIWMHRRCKHRTGKADGLTVLWPHHQDFQSYPK

SEQ ID NO: 5880 - protein, 320 aa, Homo sapiens
MRLLALAAAALLARAPAPEVCAALNVTVSPGPVVDYLEGENATLLCHVSQKRRKDSLLAVRWFFAHSFDSQEALMVKMTKLRVVQYYGNFSRSAKRRRLRLLEEQRGALYRLSVLTLQPSDQGHYVCRVQEISRHRNKWTAWSNGSSATEMRVISLKASEESSFEKTKETWAFFEDLYVYAVLVCCVGILSILLFMLVIVWQSVFNKRKSRVRHYLVKCPQNSSGETVTSVTSLAPLQPKKGKRQKEKPDIPPAVPAKAPIAPTFHKPKLLKPQRKVTLPKIAEENLTYAELELIKPHRAAKGAPTSTVYAQILFEENKL

SEQ ID NO: 5881 - protein, 745 aa, Homo sapiens
MRRCRWAALALGLLRLCLAQANFAPHFFDNGVGSTNGNMALFSLPEDTPVGSHVYTLNGTDPEGDPISYHISFDPSTRSVFSVDPTFGNITLVEELDREREDEIEAIISISDGLNLVAEKVVILVTDANDEAPRFIQEPYVALVPEDIPAGSIIFKVHAVDRDTGSGGSVTYFLQNLHSPFAVDRHSGVLRLQAGATLDYERSRTHYITVVAKDGGGRLHGADVVFSATTTVTVNVEDVQDMAPVFVGTPYYGYVYEDTLPGSEVLKVVAMDGDRGKPNRILYSLVNGNDGAFEINETSGAISITQSPAQLQREVYELHVQVTEMSPAGSPAAQATVPVTIRIVDLNNHPPTFYGESGPQNRFELSMNEHPPQGEILRGLKITVNDSDQGANAKFNLQLVGPRGIFRVVPQTVLNEAQVTIIVENSAAIDFEKSKVLTFKLLAVEVNTPEKFSSTADVVIQLLDTNDNVPKFDSLYYVARIPENAPGGSSVVAVTAVDPDTGPWGEVKYSTYGTGADLFLIHPSTGLIYTQPWASLDAEATARYNFYVKAEDMEGKYSVAEVFITLLDVNDHPPQFGKSVQKKTMVLGTPVKIEAIDEDAEEPNNLVDYSITHAEPANVFDINSHTGEIWLKNSIRSLDALHNITPGRDCLWSLEVQAKDRGSPSFSTTALLKIDITDAEVRRLRYMKNSNFPGTTKSVRKPKFKPKKPHSSQGLFLHPHCEIALFNLSNVNLYSRVFQGAAQAS

SEQ ID NO: 5882 - protein, 310 aa, Homo sapiens
MTATEALLRVLLLLLAFGHSTYGAECFPACNPQNGFCEDDNVCRCQPGWQGPLCDQCVTSPGCLHGLCGEPGQCICTDGWDGELCDRDVRACSSAPCANNRTCVSLDDGLYECSCAPGYSGKDCQKKDGPCVINGSPCQHGGTCVDDEGRASHASCLCPPGFSGNFCEIVANSCTPNPCENDGVCTDIGGDFRCRCPAGFIDKTCSRPVTNCASSPCQNGGTCLQHTQGQAICFTILGVLTSLVVLGTVGIVFLNKCETWVSNLRYNHMLRKKKNLLLQYNSGEDLAVNIIFPEKIDMTTFSKEAGDEEI

SEQ ID NO: 5883 - protein, 329 aa, Homo sapiens
MAEAGTGEPSPSVEGEHGTEYDTLPSDTVSLSDSDSDLSLPGGAEVEALSPMGLPGEEDSGPDEPPSPPSGLLPATVQPFHLRGMSSTFSQRSRDIFDCLEGAARRAPSSVAHTSMSDNGGFKRPLAPSGRSPVEGLGRAHRSPASPRVPPVPDYVAHPERWTKYSLEDVTEVSEQSNQATALAFLGSQSLAAPTDCVSSFNQDPSSCGEGRVIFTKPVRGVEARHERKRVLGKVGEPGRGGLGNPATDRGEGPVELAHLAGPGSPEAEEWGSHHGGLQEVEALSGSVHSGSVPGLPPVETVGFHGSRKRSRDHFRNKSSSPEDPGAEV

SEQ ID NO: 5884 - protein, 426 aa, Homo sapiens
MSPAFRAMDVEPRAKGVLLEPFVHQVGGHSCVLRFNETTLCKPLVPREHQFYETLPAEMRKFTPQYKGVVSVRFEEDEDRNLCLIAYPLKGDHGIVDIVDNSDCEPKSKLLRWTTNKKHHVLETEKTPKDWVRQHRKEEKMKSHKLEEEFEWLKKSEVLYYTVEKKGNISSQLKHYNPWSMKCHQQQLQRMKENAKHRNQYKFILLENLTSRYEVPCVLDLKMGTRQHGDDASEEKAANQIRKCQQSTSAVIGVRVCGMQVYQAGSGQLMFMNKYHGRKLSVQGFKEALFQFFHNGRYLRRELLGPVLKKLTELKAVLERQESYRFYSSSLLVIYDGKERPEVVLDSDAEDLEDLSEESADESAGAYAYKPIGASSVDVRMIDFAHTTCRLYGEDTVVHEGQDAGYIFGLQSLIDIVTEISEESGE

SEQ ID NO: 5885 - protein, 305 aa, Homo sapiens
MKSDSSTSAAPLRGLGGPLRSSEPVRAVPARAPAVDLLEEAADLLVVHLDFRAALETCERAWQSLANHAVAEEPAGTSLEVKCSLCVVGIQALAEMDRWQEVLSWVLQYYQVPEKLPPKVLELCILLYSKMQEPGAVLDVVGAWLQDPANQNLPEYGALAEFHVQRVLLPLGCLSEAEELVVGSAAFGEERRLDVLQAIHTARQQQKQEHSGSEEAQKPNLEGSVSHKFLSLPMLVRQLWDSAVSHFFSLPFKKSLLAALILCLLVVRFDPASPSSLHFLYKLAQLFRWIRKAAFSRLYQLRIRD

SEQ ID NO: 5886 - protein, 126 aa, Homo sapiens
MSVMDLANTCSSFQSDLDFCSDCGSVLPLPGAQDTVTCIRCGFNINVRDFEGKVVKTSVVFHQLGTAMPMSVEEGPECQGPVVDRRCPRCGHEGMAYHTRQMRSADEGQTVFYTCTNCKFQEKEDS

SEQ ID NO: 5887 - protein, 295 aa, Homo sapiens
MGKRGRPRKEARCEGAGLAPAAPPAVPPAVAAPQPPALPEDPAGAKPRCPFSDIFNTSENSMEKHINTFLQNVQILLEAASYLEQIEKENKKCEHGYASSFPSMPSPRLQHSKPPRRLSRAQKHSSGSSNTSTANRSTHNELEKNRRAHLRLCLERLKVLIPLGPDCTRHTTLGLLNKAKAHIKKLEEAERKSQHQLENLEREQRFLKWRLEQLQGPQEMERIRMDSIGSTISSDRSDSEREEIEVDVESTEFSHGEVDNISTTSISDIDDHSSLPSIGSDEGYSSASVKLSFTS

SEQ ID NO: 5888 - protein, 1287 aa, Homo sapiens
MSKVIQKKNHWTSRVHECTVKRGPQGELGVTVLGGAEHGEFPYVGAVAAVEAAGLPGGGEGPRLGEGELLLEVQGVRVSGLPRYDVLGVIDSCKEAVTFKAVRQGGRLNKDLRHFLNQRFQKGSPDHELQQTIRDNLYRHAVPCTTRSPREGEVPGVDYNFLTVKEFLDLEQSGTLLEVGTYEGNYYGTPKPPSQPVSGKVITTDALHSLQSGSKQSTPKRTKSYNDMQNAGIVHAENEEEDDVPEMNSSFTADSGEQEEHTLQETALPPVNSSIIAAPITDPSQKFPQYLPLSAEDNLGPLPENWEMAYTENGEVYFIDHNTKTTSWLDPRCLNKQQKPLEECEDDEGVHTEELDSELELPAGWEKIEDPVYGIYYVDHINRKTQYENPVLEAKRKKQLEQQQQQQQQQQQQQQQQQQQQTEEWTEDHSALVPPVIPNHPPSNPEPAREVPLQGKPFFTRNPSELKGKFIHTKLRKSSRGFGFTVVGGDEPDEFLQIKSLVLDGPAALDGKMETGDVIVSVNDTCVLGHTHAQVVKIFQSIPIGASVDLELCRGYPLPFDPDDPNTSLVTSVAILDKEPIIVNGQETYDSPASHSSKTGKVNGMKDARPSSPADVASNSSHGYPNDTVSLASSIATQPELITVHIVKGPMGFGFTIADSPGGGGQRVKQIVDSPRCRGLKEGDLIVEVNKKNVQALTHNQVVDMLVECPKGSEVTLLVQRGGLPVPKKSPKSQPLERKDSQNSSQHSVSSHRSLHTASPSHSTQVLPEFPPAEAQAPDQTDSSGQKKPDPFKIWAQSRSMYENRPMSPSPASGLSKGEREREINSTNFGECPIPDYQEQDIFLWRKETGFGFRILGGNEPGEPIYIGHIVPLGAADTDGRLRSGDELICVDGTPVIGKSHQLVVQLMQQAAKQGHVNLTVRRKVVFAVPKTENEVPSPASSHHSSNQPASLTEEKRTPQGSQNSLNTVSSGSGSTSGIGSGGGGGSGVVSTVVQPYDVEIRRGENEGFGFVIVSSVSRPEAGTTFGNACVAMPHKIGRIIEGSPADRCGKLKVGDRILAVNGCSITNKSHSDIVNLIKEAGNTVTLRIIPGDESSNATLLTNAEKIATITTTHTPSQQGTQETRNTTKPKQESQFEFKAPQATQEQDFYTVELERGAKGFGFSLRGGREYNMDLYVLRLAEDGPAERCGKMRIGDEILEINGETTKNMKHSRAIELIKNGGRRVRLFLKRGDGSVPEYAMIPPNIAACMRNEKLGEACFYLMGHNQTTTPAATATAPPPVHKVFRK

SEQ ID NO: 5889 - protein, 243 aa, Homo sapiens
MRPRLWLLLAAQLTVLHGNSVLQQTPAYIKVQTNKMVMLSCEAKISLSNMRIYWLRQRQAPSSDSHHEFLALWDSAKGTIHGEEVEQEKIAVFRDASRFILNLTSVKPEDSGIYFCMIVGSPELTFGKGTQLSVVDFLPTTAQPTKKSTLKKRVCRLPRPETQKGPLCSPITLGLLVAGVLVLLVSLGVAIHLCCRRRRARLRFMKQPQGEGISGTFVPQCLHGYYSNTTTSQKLLNPWILKT

SEQ ID NO: 5890 - protein, 777 aa, Homo sapiens
MGRGSGTFERLLDKATSQLLLETDWESILQICDLIRQGDTQAKYAVNSIKKKVNDKNPHVALYALEVMESVVKNCGQTVHDEVANKQTMEELKDLLKRQVEVNVRNKILYLIQAWAHAFRNEPKYKVVQDTYQIMKVEGHVFPEFKESDAMFAAERAPDWVDAEECHRCRVQFGVMTRKHHCRACGQIFCGKCSSKYSTIPKFGIEKEVRVCEPCYEQLNRKAEGKATSTTELPPEYLTSPLSQQSQLPPKRDETALQEEEELQLALALSQSEAEEKERLRQKSTYTSYPKAEPMPSASSAPPASSLYSSPVNSSAPLAEDIDPELARYLNRNYWEKKQEEARKSPTPSAPVPLTEPAAQPGEGHAAPTNVVENPLPETDSQPIPPSGGPFSEPQFHNGESEESHEQFLKALQNAVTTFVNRMKSNHMRGRSITNDSAVLSLFQSINGMHPQLLELLNQLDERRLYYEGLQDKLAQIRDARGALSALREEHREKLRRAAEEAERQRQIQLAQKLEIMRQKKQEYLEVQRQLAIQRLQEQEKERQMRLEQQKQTVQMRAQMPAFPLPYAQLQAMPAAGGVLYQPSGPASFPSTFSPAGSVEGSPMHGVYMSQPAPAAGPYPSMPSTAADPSMVSAYMYPAGATGAQAAPQAQAGPTASPAYSSYQPTPTAGYQNVASQAPQSLPAISQPPQSSTMGYMGSQSVSMGYQPYNMQNLMTTLPSQDASLPPQQPYIAGQQPMYQQMAPSGGPPQQQPPVAQQPQAQGPPAQGSEAQLISFD

SEQ ID NO: 5891 - protein, 315 aa, Homo sapiens
MACAEFSFHVPSLEELAGVMQKGLKDNFADVQVSVVDCPDLTKEPFTFPVKGICGKTRIAEVGGVPYLLPLVNQKKVYDLNKIAKEIKLPGAFILGAGAGPFQTLGFNSEFMPVIQTESEHKPPVNGSYFAHVNPADGGCLLEKYSEKCHDFQCALLANLFASEGQPGKVIEVKAKRRTGPLNFVTCMRETLEKHYGNKPIGMGGTFIIQKGKVKSHIMPAEFSSCPLNSDEEVNKWLHFYEMKAPLVCLPVFVSRDPGFDLRLEHTHFFSRHGEGGHYHYDTTPDIVEYLGYFLPAEFLYRIDQPKETHSIGRD

SEQ ID NO: 5892 - protein, 911 aa, Homo sapiens
MAQLFLPLLAALVLAQAPAALADVLEGDSSEDRAFRVRIAGDAPLQGVLGGALTIPCHVHYLRPPPSRRAVLGSPRVKWTFLSRGREAEVLVARGVRVKVNEAYRFRVALPAYPASLTDVSLALSELRPNDSGIYRCEVQHGIDDSSDAVEVKVKGVVFLYREGSARYAFSFSGAQEACARIGAHIATPEQLYAAYLGGYEQCDAGWLSDQTVRYPIQTPREACYGDMDGFPGVRNYGVVDPDDLYDVYCYAEDLNGELFLGDPPEKLTLEEARAYCQERGAEIATTGQLYAAWDGGLDHCSPGWLADGSVRYPIVTPSQRCGGGLPGVKTLFLFPNQTGFPNKHSRFNVYCFRDSAQPSAIPEASNPASNPASDGLEAIVTVTETLEELQLPQEATESESRGAIYSIPIMEDGGGGSSTPEDPAEAPRTLLEFETQSMVPPTGFSEEEGKALEEEEKYEDEEEKEEEEEEEEVEDEALWAWPSELSSPGPEASLPTEPAAQEESLSQAPARAVLQPGASPLPDGESEASRPPRVHGPPTETLPTPRERNLASPSPSTLVEAREVGEATGGPELSGVPRGESEETGSSEGAPSLLPATRAPEGTRELEAPSEDNSGRTAPAGTSVQAQPVLPTDSASRGGVAVVPASGDCVPSPCHNGGTCLEEEEGVRCLCLPGYGGDLCDVGLRFCNPGWDAFQGACYKHFSTRRSWEEAETQCRMYGAHLASISTPEEQDFINNRYREYQWIGLNDRTIEGDFLWSDGVPLLYENWNPGQPDSYFLSGENCVVMVWHDQGQWSDVPCNYHLSYTCKMGLVSCGPPPELPLAQVFGRPRLRYEVDTVLRYRCREGLAQRNLPLIRCQENGRWEAPQISCVPRRPARALHPEEDPEGRQGRLLGRWKALLIPPSSPMPGP

SEQ ID NO: 5893 - protein, 357 aa, Homo sapiens
MASVLNVKESKAPERTVVVAGLPVDLFSDQLLAVLVKSHFQDIKNEGGDVEDVIYPTRTKGVAYVIFKEKKVAENVIRQKKHWLARKTRHAELTVSLRVSHFGDKIFSSVNAILDLSVFGKEVTLETLVKDLKKKIPSLSFSPLKPNGRISVEGSFLAVKRLRESLLARACSLLEKDRNFTSEERKWNRQNPQRNLQRSNNSLASVRTLVPETARSGEMLVLDTDVFLYLKHKCGSYESTLKKFHILSQEKVDGEITTICLKSIQVGSQPNNAKHVKELIEEWSHALYLKLRKETFILEGKENREKRMIKRACEQLSSRYLEVLINLYRTHIDIIGSSSDTYLFKKGVMKLIGQKVS

SEQ ID NO: 5894 - protein, 492 aa, Homo sapiens
MAPPAARLALLSAAALTLAARPAPSPGLGPGPECFTANGADYRGTQNWTALQGGKPCLFWNETFQHPYNTLKYPNGEGGLGEHNYCRNPDGDVSPWCYVAEHEDGVYWKYCEIPACQMPGNLGCYKDHGNPPPLTGTSKTSNKLTIQTCISFCRSQRFKFAGMESGYACFCGNNPDYWKYGEAASTECNSVCFGDHTQPCGGDGRIILFDTLVGACGGNYSAMSSVVYSPDFPDTYATGRVCYWTIRVPGASHIHFSFPLFDIRDSADMVELLDGYTHRVLARFHGRSRPPLSFNVSLDFVILYFFSDRINQAQGFAVLYQAVKEELPQERPAVNQTVAEVITEQANLSVSAARSSKVLYVITTSPSHPPQTVPGSNSWAPPMGAGSHRVEGWTVYGLATLLILTVTAIVAKILLHVTFKSHRVPASGDLRDCHQPGTSGEIWSIFYKPSTSISIFKKKLKGQSQQDDRNPLAIQDSEVTSLIWSQGQPRSI

SEQ ID NO: 5895 - protein, 350 aa, Homo sapiens
MEKQPQNSRRGLAPREVPPAVGLLLIMALMNTLLYLCLDHFFIAPRQSTVDPTHCPYGHFRIGQMKNCSPWLSCEELRTEVRQLKRVGEGAVKRVFLSEWKEHKVALSQLTSLEMKDDFLHGLQMLKSLQGTHVVTLLGYCEDDNTMLTEYHPLGSLSNLEETLNLSKYQNVNTWQHRLELAMDYVSIINYLHHSPVGTRVMCDSNDLPKTLSQYLLTSNFSILANDLDALPLVNHSSGMLVKCGHRELHGDFVAPEQLWPYGEDVPFHDDLMPSYDEKIDIWKIPDISSFLLGHIEGSDMVRFHLFDIHKACKSQTPSERPTAQDVLETYQKVLDTLRDAMMSQAREML

SEQ ID NO: 5896 - protein, 379 aa, Homo sapiens
MPHSSLHPSIPCPRGHGAQKAALVLLSACLVTLWGLGEPPEHTLRYLVLHLASLQLGLLLNGVCSLAEELRHIHSRYRGSYWRTVRACLGCPLRRGALLLLSIYFYYSLPNAVGPPFTWMLALLGLSQALNILLGLKGLAPAEISAVCEKGNFNVAHGLAWSYYIGYLRLILPELQARIRTYNQHYNNLLRGAVSQRLYILLPLDCGVPDNLSMADPNIRFLDKLPQQTGDHAGIKDRVYSNSIYELLENGQRAGTCVLEYATPLQTLFAMSQYSQAGFSREDRLEQAKLFCRTLEDILADAPESQNNCRLIAYQEPADDSSFSLSQEVLRHLRQEEKEEVTVGSLKTSAVPSTSTMSQEPELLISGMEKPLPLRTDFS

SEQ ID NO: 5897 - protein, 164 aa, Homo sapiens
MSVNMDELRHQVMINQFVLAAGCAADQAKQLLQAAHWQFETALSTFFQETNIPNSHHHHQMMCTPSNTPATPPNFPDALAMFSKLRASEGLQSSNSPMTAAACSPPANFSPFWASSPPSHQAPWIPPSSPTTFHHLHRPQPTWPPGAQQGGAQQKAMAAMDGQR

SEQ ID NO: 5898 - protein, 344 aa, Homo sapiens
MQLEIKVALNFIISYLYNKLPRRRADLFGEELERLLKKKYEGHWYPEKPLKGSGFRCVHIGEMVDPVVELAAKRSGLAVEDVRANVPEELSVWIDPFEVSYQIGEKGAVKVLYLDDSEGCGAPELDKEIKSSFNPDAQVFVPIGSQDSSLSNSPSPSFGQSPSPTFIPRSAQPITFTTASFAATKFGSTKMKKGGGAASGGGVASSGAGGQQPPQQPRMARSPTNSLLKHKSLSLSMHSLNFITANPAPQSQLSPNAKEFVYNGGGSPSLFFDAADGQGSGTPGPFGGSGAGTCNSSSFDMAQVFGGGANSLFLEKTPFVEGLSYNLNTMQYPSQQFQPVVLAN

SEQ ID NO: 5899 - protein, 180 aa, Homo sapiens
MSVRVARVAWVRGLGASYRRGASSFPVPPPGAQGVAELLRDATGAEEEAPWAATERRMPGQCSVLLFPGQGSQVVGMGRGLLNYPRVRELYAAARRVLGYDLLELSLHGPQETLDRTVHCQPAIFVASLAAVEKLHHLQPSVIENCVAAAGFSVGEFAALVFAGAMEFAEGSTVSPEEFL

SEQ ID NO: 5900 - protein, 362 aa, Homo sapiens
MAPKQDPKPKFQEGERVLCFHGPLLYEAKCVKVAIKDKQVKYFIHYSGWNKKSAVRPRRSEKSLKTHEDIVALFPVPEGAPSVHHPLLTSSWDEWVPESRVLKYVDTNLQKQRELQKANQEQYAEGKMRGAAPGKKTSGLQQKNVEVKTKKNKQKTPGNGDGGSTSETPQPPRKKRARVDPTVENEETFMNRVEVKVKIPEELKPWLVDDWDLITRQKQLFYLPAKKNVDSILEDYANYKKSRGNTDNKEYAVNEVVAGIKEYFNVMLGTQLLYKFERPQYAEILADHPDAPMSQVYGAPHLLRLFVRIGAMLAYTPLDEKSLALLLNYLHDFLKYLAKNSATLFSASDYEVAPPEYHRKAV

SEQ ID NO: 5901 - protein, 327 aa, Homo sapiens
MTAPCPPPPPDPQFVLRGTQSPVHALHFCEGAQAQGRPLLFSGSQSGLVHIWSLQTRRAVTTLDGHGGQCVTWLQTLPQGRQLLSQGRDLKLCLWDLAEGRSAVVDSVCLESVGFCRSSILAGGQPRWTLAVPGRGSDEVQILEMPSKTSVCALKPKADAKLGMPMCLRLWQADCSSRPLLLAGYEDGSVVLWDVSEQKVCSRIACHEEPVMDLDFDSQKARGISGSAGKALAVWSLDWQQALQVRGTHELTNPGIAEVTIRPDRKILATAGWDHRIRVFHWRTMQPLAVLAFHSAAVQCVAFTADGLLAAGSKDQRISLWSLYPRA

SEQ ID NO: 5902 - protein, 178 aa, Homo sapiens
MEIKHLLFLVAAACLLPMLSMKKKSARDQFNKLVTDLPNVQEEIVNIHNALRRRVVPPASNMLKMSWSEEAAQNARIFSKYCDMTESNPLERRLPNTFCGENMHMTSYPVSWSSVIGVWYSESTSFKHGEWTTTDDDITTDHYTQIVWATSYLIGCAIASCRQQGSPRYLYVCHYCHD

SEQ ID NO: 5903 - protein, 101 aa, Homo sapiens
MQRLCVYVLIFALALAAFSEASWKPRSQQPDAPLGTGANRDLELPWLEQQGPASHHRRQLGPQGPPHLVADPSKKQGPWLEEEEEAYGWMDFGRRSAEDEN

SEQ ID NO: 5904 - protein, 374 aa, Homo sapiens
MDDLCEANGTFAISLFKILGEEDNSRNVFFSPMSISSALAMVFMGAKGSTAAQMSQALCLYKDGDIHRGFQSLLSEVNRTGTQYLLRTANRLFGEKTCDFLPDFKEYCQKFYQAELEELSFAEDTEECRKHINDWVAEKTEGKISEVLDAGTVDPLTKLVLVNAIYFKGKWNEQFDRKYTRGMLFKTNEEKKTVQMMFKEAKFKMGYADEVHTQVLELPYVEEELSMVILLPDDNTDLAVVEKALTYEKFKAWTNSEKLTKSKVQVFLPRLKLEESYDLEPFLRRLGMIDAFDEAKADFSGMSTEKNVPLSKVAHKCFVEVNEEGTEAAAATAVVRNSRCSRMEPRFCADHPFLFFIRHHKTNCILFCGRFSSP

SEQ ID NO: 5905 - protein, 324 aa, Homo sapiens
MDWDDEYSHNSFDLHCLLNSFPGDLEFEQIFSDIDEKIEQNAASIKHCIKEIQSEINKQCPGVQLQTTTDCFEWLTNYNYSTSESSFISHGDLIKFFKTLQDLLKNEQNQEEMTLDLLWDLSCHSSVSFPSTLSGTSFHFLSRTSLHSVEDNSSMDVKSMWDDIRLHLRRFLVSKLQSHNEINNSQQKILLKKQCLQQLLFLYPESEVIIKYQNIQNKLLANLLWNCFPSYNRDSNLDVIAHGYQSTMLKLYSVIKEDFNTLCEILAPSSMVKFIKETYLDTVTEEMAKFLENFCELQFRENAVRVVKTSKSSSKHRGAVHALG

SEQ ID NO: 5906 - protein, 439 aa, Homo sapiens
MVPSSPRALFLLLLILACPEPRASQNCLSKQQLLSAIRQLQQLLKGQETRFAEGIRHMKSRLAALQNSVGRVGPDALPVSCPALNTPADGRKFGSKYLVDHEVHFTCNPGFRLVGPSSVVCLPNGTWTGEQPHCRGISECSSQPCQNGGTCVEGVNQYRCICPPGRTGNRCQHQAQTAAPEGSVAGDSAFSRAPRCAQVERAQHCSCEAGFHLSGAAGDSVCQDVNECELYGQEGRPRLCMHACVNTPGSYRCTCPGGYRTLADGKSCEDVDECVGLQPVCPQGTTCINTGGSFQCVSPECPEGSGNVSYVKTSPFQCERNPCPMDSRPCRHLPKTISFHYLSLPSNLKTPITLFRMATASAPGRAGPNSLRFGIVGGNSRGHFVMQRSDRQTGDLILVQNLEGPQTLEVDVDMSEYLDRSFQANHVSKVTIFVSPYDF

SEQ ID NO: 5907 - protein, 1452 aa, Homo sapiens
MRGLGTCLATLAGLLLTAAGETFSGGCLFDEPYSTCGYSQSEGDDFNWEQVNTLTKPTSDPWMPSGSFMLVNASGRPEGQRAHLLLPQLKENDTHCIDFHYFVSSKSNSPPGLLNVYVKVNNGPLGNPIWNISGDPTRTWNRAELAISTFWPNFYQVIFEVITSGHQGYLAIDEVKVLGHPCTRTPHFLRIQNVEVNAGQFATFQCSAIGRTVAGDRLWLQGIDVRDAPLKEIKVTSSRRFIASFNVVNTTKRDAGKYRCMIRTEGGVGISNYAELVVKEPPVPIAPPQLASVGATYLWIQLNANSINGDGPIVAREVEYCTASGSWNDRQPVDSTSYKIGHLDPDTEYEISVLLTRPGEGGTGSPGPALRTRTKCADPMRGPRKLEVVEVKSRQITIRWEPFGYNVTRCHSYNLTVHYCYQVGGQEQVREEVSWDTENSHPQHTITNLSPYTNVSVKLILMNPEGRKESQELIVQTDEDLPGAVPTESIQGSTFEEKIFLQWREPTQTYGVITLYEITYKAVSSFDPEIDLSNQSGRVSKLGNETHFLFFGLYPGTTYSFTIRASTAKGFGPPATNQFTTKISAPSMPAYELETPLNQTDNTVTVMLKPAHSRGAPVSVYQIVVEEERPRRTKKTTEILKCYPVPIHFQNASLLNSQYYFAAEFPADSLQAAQPFTIGDNKTYNGYWNTPLLPYKSYRIYFQAASRANGETKIDCVQVATKGAATPKPVPEPEKQTDHTVKIAGVIAGILLFVIIFLGVVLVMKKRKLAKKRKETMSSTRQEMTVMVNSMDKSYAEQGTNCDEAFSFMDTHNLNGRSVSSPSSFTMKTNTLSTSVPNSYYPDETHTMASDTSSLVQSHTYKKREPADVPYQTGQLHPAIRVADLLQHITQMKCAEGYGFKEEYESFFEGQSAPWDSAKKDENRMKNRYGNIIAYDHSRVRLQTIEGDTNSDYINGNYIDGYHRPNHYIATQGPMQETIYDFWRMVWHENTASIIMVTNLVEVGRVKCCKYWPDDTEIYKDIKVTLIETELLAEYVIRTFAVEKRGVHEIREIRQFHFTGWPDHGVPYHATGLLGFVRQVKSKSPPSAGPLVVHCSAGAGRTGCFIVIDIMLDMAEREGVVDIYNCVRELRSRRVNMVQTEEQYVFIHDAILEACLCGDTSVPASQVRSLYYDMNKLDPQTNSSQIKEEFRTLNMVTPTLRVEDCSIALLPRNHEKNRCMDILPPDRCLPFLITIDGESSNYINAALMDSYKQPSAFIVTQHPLPNTVKDFWRLVLDYHCTSVVMLNDVDPAQLCPQYWPENGVHRHGPIQVEFVSADLEEDIISRIFRIYNAARPQDGYRMVQQFQFLGWPMYRDTPVSKRSFLKLIRQVDKWQEEYNGGEGRTVVHCLNGGGRSGTFCAISIVCEMLRHQRTVDVFHAVKTLRNNKPNMVDLLDQYKFCYEVALEYLNSG

SEQ ID NO: 5908 - protein, 738 aa, Homo sapiens
MTMLQESFSFDDLSVDFTQKEWQLLDPSQKNLYKDVMLENYSSLVSLGYEVMKPDVIFKLEQGEEPWVGDGEIPSSDSPEVWKVDGNMMWHQDNQDKLKIIKRGHECDAFGKNFNLNMNFVPLRKSNSEGDLDGLILKHHLDLLIPKGDYGKAESDDFNVFDNFFLHSKPEDTDTWLKYYDCDKYKESYKKSQIIIYHRNRLGEKLYECSECRKRFSKKPSLIKHQSRHIRDIAFGCGNCGKTFPQKSQFITHHRTHTGEKPYNCSQCGKAFSQKSQLTSHQRTHTGEKPYECGECGKAFSRKSHLISHWRTHTGEKPYGCNECGRAFSEKSNLINHQRIHTGEKPFECRECGKAFSRKSQLVTHHRTHTGTKPFGCSDCRKAFFEKSELIRHQTIHTGEKPYECSECRKAFRERSSLINHQRTHTGEKPHGCIQCGKAFSQKSHLISHQMTHTGEKPFICSKCGKAFSRKSQLVRHQRTHTGEKPYECSECGKAFSEKLSLTNHQRIHTGEKPYVCSECGKAFCQKSHLISHQRTHTGEKPYECSECGKAFGEKSSLATHQRTHTGEKPYECRDCEKAFSQKSQLNTHQRIHTGEKPYECSLCRKAFFEKSELIRHLRTHTGEKPYECNECRKAFREKSSLINHQRIHTGEKPFECSECGKAFSRKSHLIPHQRTHTGEKPYGCSECRKAFSQKSQLVNHQRIHTGEKPYRCIECGKAFSQKSQLINHQRTHTVKKS

SEQ ID NO: 5909 - protein, 184 aa, Homo sapiens
MWRLALGGVFLAAAQACVFCRLPAHDLSGRLARLCSQMEARQKECGASPDFSAFALDEVSMNKVTEKTHRVLRVMEIKEAVSSLPSYWSWLRKTKLPEYTREALCPPACPLPLLSPAGGSTTLYNCSTCKGTEVSCWPRKRCFPGSQDLWEAKILLLSIFGAFLLLGVLSLLVESHHLQAKSGL

SEQ ID NO: 5910 - protein, 228 aa, Homo sapiens
MPRRGLVAGPDLEYFQRRYFTPAEVAQHNRPEDLWVSYLGRVYDLTSLAQEYKGNLLLKPIVEVAGQDISHWFDPKTRDIRKHIDPLTGCLRYCTPRGRFVHVPPQLPCSDWANDFGKPWWQGSYYEVGRLSAKTRSIRIINTLTSQEHTLEVGVLESIWEILHRYLPYNSHAASYTWKYEGKNLNMDFTLEENGIRDEEEEFDYLSMDGTLHTPAILLYFNDDLTEL

SEQ ID NO: 5911 - protein, 608 aa, Homo sapiens
MAESIIIRVQSPDGVKRITATKRETAATFLKKVAKEFGFQNNGFSVYINRNKTGEITASSNKSLNLLKIKHGDLLFLFPSSLAGPSSEMETSVPPGFKVFGAPNVVEDEIDQYLSKQDGKIYRSRDPQLCRHGPLGKCVHCVPLEPFDEDYLNHLEPPVKHMSFHAYIRKLTGGADKGKFVALENISCKIKSGCEGHLPWPNGICTKCQPSAITLNRQKYRHVDNIMFENHTVADRFLDFWRKTGNQHFGYLYGRYTEHKDIPLGIRAEVAAIYEPPQIGTQNSLELLEDPKAEVVDEIAAKLGLRKVGWIFTDLVSEDTRKGTVRYSRNKDTYFLSSEECITAGDFQNKHPNMCRLSPDGHFGSKFVTAVATGGPDNQVHFEGYQVSNQCMALVRDECLLPCKDAPELGYAKESSSEQYVPDVFYKDVDKFGNEITQLARPLPVEYLIIDITTTFPKDPVYTFSISQNPFPIENRDVLGETQDFHSLATYLSQNTSSVFLDTISDFHLLLFLVTNEVMPLQDSISLLLEAVRTRNEELAQTWKRSEQWATIEQLCSTVGGQLPGLHEYGAVGGSTHTATAAMWACQHCTFMNQPGTGHCEMCSLPRT

SEQ ID NO: 5912 - protein, 703 aa, Homo sapiens
MERAAPSRRVPLPLLLLGGLALLAAGVDADVLLEACCADGHRMATHQKDCSLPYATESKECRMVQEQCCHSQLEELHCATGISLANEQDRCATPHGDNASLEATFVKRCCHCCLLGRAAQAQGQSCEYSLMVGYQCGQVFQACCVKSQETGDLDVGGLQETDKIIEVEEEQEDPYLNDRCRGGGPCKQQCRDTGDEVVCSCFVGYQLLSDGVSCEDVNECITGSHSCRLGESCINTVGSFRCQRDSSCGTGYELTEDNSCKDIDECESGIHNCLPDFICQNTLGSFRCRPKLQCKSGFIQDALGNCIDINECLSISAPCPIGHTCINTEGSYTCQKNVPNCGRGYHLNEEGTRCVDVDECAPPAEPCGKGHRCVNSPGSFRCECKTGYYFDGISRMCVDVNECQRYPGRLCGHKCENTLGSYLCSCSVGFRLSVDGRSCEDINECSSSPCSQECANVYGSYQCYCRRGYQLSDVDGVTCEDIDECALPTGGHICSYRCINIPGSFQCSCPSSGYRLAPNGRNCQDIDECVTGIHNCSINETCFNIQGGFRCLAFECPENYRRSAATLQQEKTDTVRCIKSCRPNDVTCVFDPVHTISHTVISLPTFREFTRPEEIIFLRAITPPHPASQANIIFDITEGNLRDSFDIIKRYMDGMTVGVVRQVRPIVGPFHAVLKLEMNYVVGGVVSHRNVVNVHIFVSEYWF

SEQ ID NO: 5913 - protein, 534 aa, Homo sapiens
MAVESGVISTLIPQDPPEQELILVKVEDNFSWDEKFKQNGSTQSCQELFRQQFRKFCYQETPGPREALSRLQELCYQWLMPELHTKEQILELLVLEQFLSILPEELQIWVQQHNPESGEEAVTLLEDLEREFDDPGQQVPASPQGPAVPWKDLTCLRASQESTDIHLQPLKTQLKSWKPCLSPKSDCENSETATKEGISEEKSQGLPQEPSFRGISEHESNLVWKQGSATGEKLRSPSQGGSFSQVIFTNKSLGKRDLYDEAERCLILTTDSIMCQKVPPEERPYRCDVCGHSFKQHSSLTQHQRIHTGEKPYKCNQCGKAFSLRSYLIIHQRIHSGEKAYECSECGKAFNQSSALIRHRKIHTGEKACKCNECGKAFSQSSYLIIHQRIHTGEKPYECNECGKTFSQSSKLIRHQRIHTGERPYECNECGKAFRQSSELITHQRIHSGEKPYECSECGKAFSLSSNLIRHQRIHSGEEPYQCNECGKTFKRSSALVQHQRIHSGDEAYICNECGKAFRHRSVLMRHQRVHTIK

SEQ ID NO: 5914 - protein, 676 aa, Homo sapiens
MAPFLRIAFNSYELGSLQAEDEANQPFCAVKMKEALSTERGKTLVQKKPTMYPEWKSTFDAHIYEGRVIQIVLMRAAEEPVSEVTVGVSVLAERCKKNNGKAEFWLDLQPQAKVLMSVQYFLEDVDCKQSMRSEDEAKFPTMNRRGAIKQAKIHYIKNHEFIATFFGQPTFCSVCKDFVWGLNKQGYKCRQCNAAIHKKCIDKIIGRCTGTAANSRDTIFQKERFNIDMPHRFKVHNYMSPTFCDHCGSLLWGLVKQGLKCEDCGMNVHHKCREKVANLCGINQKLLAEALNQVTQRASRRSDSASSEPVGIYQGFEKKTGVAGEDMQDNSGTYGKIWEGSSKCNINNFIFHKVLGKGSFGKVLLGELKGRGEYFAIKALKKDVVLIDDDVECTMVEKRVLTLAAENPFLTHLICTFQTKDHLFFVMEFLNGGDLMYHIQDKGRFELYRATFYAAEIMCGLQFLHSKGIIYRDLKLDNVLLDRDGHIKIADFGMCKENIFGESRASTFCGTPDYIAPEILQGLKYTFSVDWWSFGVLLYEMLIGQSPFHGDDEDELFESIRVDTPHYPRWITKESKDILEKLFEREPTKRLGVTGNIKIHPFFKTINWTLLEKRRLEPPFRPKVKSPRDYSNFDQEFLNEKARLSYSDKNLIDSMDQSAFAGFSFVNPKFEHLLED

SEQ ID NO: 5915 - protein, 501 aa, Homo sapiens
MSFPQLGYQYIRPLYPSERPGAAGGSGGSAGARGGLGAGASELNASGSLSNVLSSVYGAPYAAAAAAAAAQGYGAFLPYAAELPIFPQLGAQYELKDSPGVQHPAAAAAFPHPHPAFYPYGQYQFGDPSRPKNATRESTSTLKAWLNEHRKNPYPTKGEKIMLAIITKMTLTQVSTWFANARRRLKKENKMTWAPRSRTDEEGNAYGSEREEEDEEEDEEDGKRELELEEEELGGEEEDTGGEGLADDDEDEEIDLENLDGAATEPELSLAGAARRDGDLGLGPISDSKNSDSEDSSEGLEDRPLPVLSLAPAPPPVAVASPSLPSPPVSLDPCAPAPAPASALQKPKIWSLAETATSPDNPRRSPPGAGGSPPGAAVAPSALQLSPAAAAAAAHRLVSAPLGKFPAWTNRPFPGPPPGPRLHPLSLLGSAPPHLLGLPGAAGHPAAAAAFARPAEPEGGTDRCSALEVEKKLLKTAFQPVPRRPQNHLDAALVLSALSSS

SEQ ID NO: 5916 - protein, 967 aa, Homo sapiens
MAVALDSQIDAPLEVEGCLIMKVEKDPEWASEPILEGSDSSETFRKCFRQFCYEDVTGPHEAFSKLWELCCRWLKPEMRSKEQILELLVIEQFLTILPEKIQAWAQKQCPQSGEEAVALVVHLEKETGRLRQQVSSPVHREKHSPLGAAWEVADFQPEQVETQPRAVSREEPGSLHSGHQEQLNRKRERRPLPKNARPSPWVPALADEWNTLDQEVTTTRLPAGSQEPVKDVHVARGFSYRKSVHQIPAQRDLYRDFRKENVGNVVSLGSAVSTSNKITRLEQRKEPWTLGLHSSNKRSILRSNYVKEKSVHAIQVPARSAGKTWREQQQWGLEDEKIAGVHWSYEETKTFLAILKESRFYETLQACPRNSQVYGAVAEWLRECGFLRTPEQCRTKFKSLQKSYRKVRNGHMLEPCAFFEDMDALLNPAARAPSTDKPKEMIPVPRLKRIAISAKEHISLVEEEEAAEDSDDDEIGIEFIRKSEIHGAPVLFQNLSGVHWGYEETKTFLDILRETRFYEALQACHRKSKLYGAVAEQLRECGFLRTPEQCRTKFKSLQKSYRKVKNGHVLESCAFYKEMDALINSRASAPSPSTPEEVPSPSRQERGGIEVEPQEPTGWEPEETSQEAVIEDSCSERMSEEEIVQEPEFQGPPGLLQSPNDFEIGSSIKEDPTQIVYKDMEQHRALIEKSKRVVSQSTDPSKYRKRECISGRQWENLQGIRQGKPMSQPRDLGKAVVHQRPFVGKRPYRLLKYGESFGRSTRLMCRMTHHKENPYKCGVCGKCFGRSRSLIRHQRIHTGEKPFKCLDCGKSFNDSSNFGAHQRIHTGEKPYRCGECGKCFSQSSSLIIHQRTHTGEKPYQCGECGKSFTNSSHFSAHRRVHTGENPYKCVDCEKSFNNCTRFREHRRIHTGEKPYGCAQCGKRFSKSSVLTKHREVHVREKPLPHPPSLYCPENPHKGKTDEFRKTF

SEQ ID NO: 5917 - protein, 213 aa, Homo sapiens
MAALLRAVRRFRGKAVWERPLHGLWCCSGQEDPKRWVGSSSPISKEKLPNAETEKFWMFYRFDAIRTFGFLSRLKLAQTALTVVALPPGYYLYSQGLLTLNTVCLMSGISGFALTMLCWMSYFLRRLVGILYLNESGTMLRVAHLNFWGWRQDTYCPMADVIPLTETKDRPQEMFVRIQRYSGKQTFYVTLRYGRILDRERFTQVFGVHQMLK

SEQ ID NO: 5918 - protein, 592 aa, Homo sapiens
MASTSRDVIAGRGIHSKVKSAKLLEVLNAMEEEESNNNREEIFIAPPDNAAGEFTDEDSGDEDSQRGAHLPGSVLHASVLCEDSGTGEDNDDLELQPAKKRQKAVVKPQRIWTKRDIRPDFGSWTASDPHIEDLKSQELSPVGLFELFFDEGTINFIVNETNRYAWQKNVNLSLTAQELKCVLGILILSGYISYPRRRMFWETSPDSHHHLVADAIRRDRFELIFSYLHFADNNELDASDRFAKVRPLIIRMNCNFQKHAPLEEFYSFGESMCEYFGHRGSKQLHRGKPVRLGYKIWCGTTSRGYLVWFEPSQGTLFTKPDRSLDLGGSMVIKFVDALQERGFLPYHIFFDKVFTSVKLMSILRKKGVKATGTVREYRTERCPLKDPKELKKMKRGSFDYKVDESEEIIVCRWHDSSVVNICSNAVGIEPVRLTSRHSGAAKTRTQVHQPSLVKLYQEKVGGVGRMDQNIAKYKVKIRGMKWYSSFIGYVIDAALNNAWQLHRICCQDAQVDLLAFRRYIACVYLESNADTTSQGRRSRRLETESRFDMIGHWIIHQDKRTRCALCHSQTNTRCEKCQKGVHAKCFREYHIR

SEQ ID NO: 5919 - protein, 1170 aa, Homo sapiens
MDEETRHSLECIQANQIFPRKQLIREDENLQVPFLELHGESTEFVGRAEDAIIALSNYRLHIKFKESLVNVPLQLIESVECRDIFQLHLTCKDCKVIRCQFSTFEQCQEWLKRLNNAIRPPAKIEDLFSFAYHAWCMEVYASEKEQHGDLCRPGEHVTSRFKNEVERMGFDMNNAWRISNINEKYKLCGSYPQELIVPAWITDKELESVSSFRSWKRIPAVIYRHQSNGAVIARCGQPEVSWWGWRNADDEHLVQSVAKACASDSRSSGSKLSTRNTSRDFPNGGDLSDVEFDSSLSNASGAESLAIQPQKLLILDARSYAAAVANRAKGGGCECPEYYPNCEVVFMGMANIHSIRRSFQSLRLLCTQMPDPGNWLSALESTKWLHHLSVLLKSALLVVHAVDQDQRPVLVHCSDGWDRTPQIVALAKLLLDPYYRTIEGFQVLVEMEWLDFGHKFADRCGHGENSDDLNERCPVFLQWLDCVHQLQRQFPCSFEFNEAFLVKLVQHTYSCLFGTFLCNNAKERGEKHTQERTCSVWSLLRAGNKAFKNLLYSSQSEAVLYPVCHVRNLMLWSAVYLPCPSPTTPVDDSCAPYPAPGTSPDDPPLSRLPKTRSYDNLTTACDNTVPLASRRCSDPSLNEKWQEHRRSLELSSLAGPGEDPLSADSLGKPTRVPGGAELSVAAGVAEGQMENILQEATKEESGVEEPAHRAGIEIQEGKEDPLLEKESRRKTPEASAIGLHQDPELGDAALRSHLDMSWPLFSQGISEQQSGLSVLLSSLQVPPRGEDSLEVPVEQFRIEEIAEGREEAVLPIPVDAKVGYGTSQSCSLLPSQVPFETRGPNVDSSTDMLVEDKVKSVSGPQGHHRSCLVNSGKDRLPQTMEPSPSETSLVERPQVGSVVHRTSLGSTLSLTRSPCALPLAECKEGLVCNGAPETENRASEQPPGLSTLQMYPTPNGHCANGEAGRSKDSLSRQLSAMSCSSAHLHSRNLHHKWLHSHSGRPSATSSPDQPSRSHLDDDGMSVYTDTIQQRLRQIESGHQQEVETLKKQVQELKSRLESQYLTSSLHFNGDFGDEVMTRWLPDHLAAHCYACDSAFWLASRKHHCRDTDRVDQTWNCGNVFCSSCCNQKVPVPSQQLFEPSRVCKSCYSSLHPTSSSIDLELDKPIAATSN

SEQ ID NO: 5920 - protein, 797 aa, Homo sapiens
MQDGNFLLSALQPEAGVCSLALPSDLQLDRRGAEGPEAERLRAARVQEQVRARLLQLGQQPRHNGAAEPEPEAETARGTSRGQYHTLQAGFSSRSQGLSGDKTSGFRPIAKPAYSPASWSSRSAVDLSCSRRLSSAHNGGSAFGAAGYGGAQPTPPMPTRPVSFHERGGVGSRADYDTLSLRSLRLGPGGLDDRYSLVSEQLEPAATSTYRAFAYERQASSSSSRAGGLDWPEATEVSPSRTIRAPAVRTLQRFQSSHRSRGVGGAVPGAVLEPVARAPSVRSLSLSLADSGHLPDVHGFNSYGSHRTLQRLSSGFDDIDLPSAVKYLMASDPNLQVLGAAYIQHKCYSDAAAKKQARSLQAVPRLVKLFNHANQEVQRHATGAMRNLIYDNADNKLALVEENGIFELLRTLREQDDELRKNVTGILWNLSSSDHLKDRLARDTLEQLTDLVLSPLSGAGGPPLIQQNASEAEIFYNATGFLRNLSSASQATRQKMRECHGLVDALVTSINHALDAGKCEDKSVENAVCVLRNLSYRLYDEMPPSALQRLEGRGRRDLAGAPPGEVVGCFTPQSRRLRELPLAADALTFAEVSKDPKGLEWLWSPQIVGLYNRLLQRCELNRHTTEAAAGALQNITAGDRRWAGVLSRLALEQERILNPLLDRVRTADHHQLRSLTGLIRNLSRNARNKDEMSTKVVSHLIEKLPGSVGEKSPPAEVLVNIIAVLNNLVVASPIAARDLLYFDGLRKLIFIKKKRDSPDSEKSSRAASSLLANLWQYNKLHRDFRAKGYRKEDFLGP

SEQ ID NO: 5921 - protein, 634 aa, Homo sapiens
MAEEQEFTQLCKLPAQPSHPHCVNNTYRSAQHSQALLRGLLALRDSGILFDVVLVVEGRHIEAHRILLAASCDYFRGMFAGGLKEMEQEEVLIHGVSYNAMCQILHFIYTSELELSLSNVQETLVAACQLQIPEIIHFCCDFLMSWVDEENILDVYRLAELFDLSRLTEQLDTYILKNFVAFSRTDKYRQLPLEKVYSLLSSNRLEVSCETEVYEGALLYHYSLEQVQADQISLHEPPKLLETVRFPLMEAEVLQRLHDKLDPSPLRDTVASALMYHRNESLQPSLQSPQTELRSDFQCVVGFGGIHSTPSTVLSDQAKYLNPLLGEWKHFTASLAPRMSNQGIAVLNNFVYLIGGDNNVQGFRAESRCWRYDPRHNRWFQIQSLQQEHADLSVCVVGRYIYAVAGRDYHNDLNAVERYDPATNSWAYVAPLKREVYAHAGATLEGKMYITCGRRGEDYLKETHCYDPGSNTWHTLADGPVRRAWHGMATLLNKLYVIGGSNNDAGYRRDVHQVACYSCTSGQWSSVCPLPAGHGEPGIAVLDNRIYVLGGRSHNRGSRTGYVHIYDVEKDCWEEGPQLDNSISGLAACVLTLPRSLLLEPPRGTPDRSQADPDFASEVMSVSDWEEFDNSSED

SEQ ID NO: 5922 - protein, 600 aa, Homo sapiens
MASTDYSTYSQAAAQQGYSAYTAQPTQGYAQTTQAYGQQSYGTYGQPTDVSYTQAQTTATYGQTAYATSYGQPPTGYTTPTAPQAYSQPVQGYGTGAYDTTTATVTTTQASYAAQSAYGTQPAYPAYGQQPAATAPTSYSSTQPTSYDQSSYSQQNTYGQPSSYGQQSSYGQQSSYGQQPPTSYPPQTGSYSQAPSQYSQQSSSYGQQSSFRQDHPSSMGVYGQESGGFSGPGENRSMSGPDNRGRGRGGFDRGGMSRGGRGGGRGGMGSAGERGGFNKPGGPMDEGPDLDLGPPVDPDEDSDNSAIYVQGLNDSVTLDDLADFFKQCGVVKMNKRTGQPMIHIYLDKETGKPKGDATVSYEDPPTAKAAVEWFDGKDFQGSKLKVSLARKKPPMNSMRGGLPPREGRGMPPPLRGGPGGPGGPGGPMGRMGGRGGDRGGFPPRGPRGSRGNPSGGGNVQHRAGDWQCPNPGCGNQNFAWRTECNQCKAPKPEGFLPPPFPPPGGDRGRGGPGGMRGGRGGLMDRGGPGGMFRGGRGGDRGGFRGGRGMDRGGFGGGRRGGPGGPPGPLMEQMGGRRGGRGGPGKMDKGEHRQERRDRPY

SEQ ID NO: 5923 - protein, 275 aa, Homo sapiens
MEERKEEGEAEIQEHGPEHWFSKWERQCLAEAEQDEQLPPELQEEAAAAAQPEHKQQKLWHLFQNSATAVAQLYKDRVCQQPGLSLWVPFQNAATAVTNLYKESVDTHQRSFDIGIQIGYQRRNKDVLAWVKKRRRTIRREDLISFLCGKVPPPRNSRAPPRLTVVSPNRATSTETSSSVETDLQPFREAIALHGLSGAMASISVRSSTPGSPTHVSSGSNASRRRNGLHDVDLNTFISEEMALHLDNGGTRKRTSAQCGDVITDSPTHKRNRMI

SEQ ID NO: 5924 - protein, 610 aa, Homo sapiens
MIASQFLSALTLVLLIKESGAWSYNTSTEAMTYDEASAYCQQRYTHLVAIQNKEEIEYLNSILSYSPSYYWIGIRKVNNVWVWVGTQKPLTEEAKNWAPGEPNNRQKDEDCVEIYIKREKDVGMWNDERCSKKKLALCYTAACTNTSCSGHGECVETINNYTCKCDPGFSGLKCEQIVNCTALESPEHGSLVCSHPLGNFSYNSSCSISCDRGYLPSSMETMQCMSSGEWSAPIPACNVVECDAVTNPANGFVECFQNPGSFPWNTTCTFDCEEGFELMGAQSLQCTSSGNWDNEKPTCKAVTCRAVRQPQNGSVRCSHSPAGEFTFKSSCNFTCEEGFMLQGPAQVECTTQGQWTQQIPVCEAFQCTALSNPERGYMNCLPSASGSFRYGSSCEFSCEQGFVLKGSKRLQCGPTGEWDNEKPTCEAVRCDAVHQPPKGLVRCAHSPIGEFTYKSSCAFSCEEGFELHGSTQLECTSQGQWTEEVPSCQVVKCSSLAVPGKINMSCSGEPVFGTVCKFACPEGWTLNGSAARTCGATGHWSGLLPTCEAPTESNIPLVAGLSAAGLSLLTLAPFLLWLRKCLRKAKKFVPASSCQSLESDGSYQKPSYIL

SEQ ID NO: 5925 - protein, 356 aa, Homo sapiens
MNFEFEREIGFINSQPSLAECLTSFPAVLETFQTSSIKESTLIPPPPPFEQTFPSLQPGASTLQRPRSQKRAEDGPALPPPPPPPLPAAPPAPEFPWMKEKKSAKKPSQSATSPSPAASAVPASGVGSPADGLGLPEAGGGGARRLRTAYTNTQLLELEKEFHFNKYLCRPRRVEIAALLDLTERQVKVWFQNRRMKHKRQTQHREPPDGEPACPGALEDICDPAEEPAASPGGPSASRAAWEACCHPPEVVPGALSADPRPLAVRLEGAGASSPGCALRGAGGLEPGPLPEDVFSGRQDSPFLPDLNFFAADSCLQLSGGLSPSLQGSLDSPVPFSEEELDFFTSTLCAIDLQFP

SEQ ID NO: 5926 - protein, 364 aa, Homo sapiens
MLRFLPDLAFSFLLILALGQAVQFQEYVFLQFLGLDKAPSPQKFQPVPYILKKIFQDREAAATTGVSRDLCYVKELGVRGNVLRFLPDQGFFLYPKKISQASSCLQKLLYFNLSAIKEREQLTLAQLGLDLGPNSYYNLGPELELALFLVQEPHVWGQTTPKPGKMFVLRSVPWPQGAVHFNLLDVAKDWNDNPRKNFGLFLEILVKEDRDSGVNFQPEDTCARLRCSLHASLLVVTLNPDQCHPSRKRRAAIPVPKLSCKNLCHRHQLFINFRDLGWHKWIIAPKGFMANYCHGECPFSLTISLNSSNYAFMQALMHAVDPEIPQAVCIPTKLSPISMLYQDNNDNVILRHYEDMVVDECGCG

SEQ ID NO: 5927 - protein, 141 aa, Homo sapiens
MGFQKFSPFLALSILVLLQAGSLHAAPFRSALESSPADPATLSEDEARLLLAALVQDYVQMKASELEQEQEREGSSLDSPRSKRCGNLSTCMLGTYTQDFNKFHTFPQTAIGVGAPGKKRDMSSDLERDHRPHVSMPQNAN

SEQ ID NO: 5928 - protein, 244 aa, Homo sapiens
MDPGAALQRRAGGGGGLGAGSPALSGGQGRRRKQPPRPADFKLQVIIIGSRGVGKTSLMERFTDDTFCEACKSTVGVDFKIKTVELRGKKIRLQIWDTAGQERFNSITSAYYRSAKGIILVYDITKKETFDDLPKWMKMIDKYASEDAELLLVGNKLDCETDREITRQQGEKFAQQITGMRFCEASAKDNFNVDEIFLKLVDDILKKMPLDILRNELSNSILSLQPEPEIPPELPPPRPHVRCC

SEQ ID NO: 5929 - protein, 244 aa, Homo sapiens
MELTIFILRLAIYILTFPLYLLNFLGLWSWICKKWFPYFLVRFTVIYNEQMASKKRELFSNLQEFAGPSGKLSLLEVGCGTGANFKFYPPGCRVTCIDPNPNFEKFLIKSIAENRHLQFERFVVAAGENMHQVADGSVDVVVCTLVLCSVKNQERILREVCRVLRPGGAFYFMEHVAAECSTWNYFWQQVLDPAWHLLFDGCNLTRESWKALERASFSKLKLQHIQAPLSWELVRPHIYGYAVK

SEQ ID NO: 5930 - protein, 678 aa, Homo sapiens
MAPSLSPGPAALRRAPQLLLLLLAAECALAALLPAREATQFLRPRQRRAFQVFEEAKQGHLERECVEELCSREEAREVFENDPETDYFYPRYLDCINKYGSPYTKNSGFATCVQNLPDQCTPNPCDRKGTQACQDLMGNFFCLCKAGWGGRLCDKDVNECSQENGGCLQICHNKPGSFHCSCHSGFELSSDGRTCQDIDECADSEACGEARCKNLPGSYSCLCDEGFAYSSQEKACRDVDECLQGRCEQVCVNSPGSYTCHCDGRGGLKLSQDMDTCEDILPCVPFSVAKSVKSLYLGRMFSGTPVIRLRFKRLQPTRLVAEFDFRTFDPEGILLFAGGHQDSTWIVLALRAGRLELQLRYNGVGRVTSSGPVINHGMWQTISVEELARNLVIKVNRDAVMKIAVAGDLFQPERGLYHLNLTVGGIPFHEKDLVQPINPRLDGCMRSWNWLNGEDTTIQETVKVNTRMQCFSVTERGSFYPGSGFAFYSLDYMRTPLDVGTESTWEVEVVAHIRPAADTGVLFALWAPDLRAVPLSVALVDYHSTKKLKKQLVVLAVEHTALALMEIKVCDGQEHVVTVSLRDGEATLEVDGTRGQSEVSAAQLQERLAVLERHLRSPVLTFAGGLPDVPVTSAPVTAFYRGCMTLEVNRRLLDLDEAAYKHSDITAHSCPPVEPAAA

SEQ ID NO: 5931 - protein, 2151 aa, Homo sapiens
MLSSGVETQPVPLDSSMSAVVQELYSELPVSVSRELHADPEPSVIPDVKPGASSSLLSQNRALPLELQRTHVESCCEETYETLDHGSEPGRCGLVDSTAGGSVASGILDRAKRSESMEPKVFRDPGGQAGIIREPSEGAKEDPHQHSTAAEEKTSPSQEDLLMQSSKELSHVDLPEDFLRSKEGNVQITAETLLKSAEVQGMKVNGTKTDNNEGHKNGNVSKDLSAGCGEFQEVDKIMTSDEVSETSTLVTPEPLTFVDPVLTEATPKEKECEELKSCPWLSLPGNSAISNVDNGKEELCKPNLVCEADDNHQQLHGHHNEQPSSTHDSPTATSPLKENSEVSCFTSDLSGPESRTISLENCGFEGGGLLKRSAEKTDSSYFYRGDDQGKNLASREENEERLLIPRSERGGPFLFNAREPEKEISGRCSGEKEPVVSPKENIHNNCIQDSLHTGNSSSLMPNSFTEATEVMLNKNDLKITVHVQGNLTNPEDHKETFTNMSHPGGHSEESSFSSLMQIEEAGQTTPVEPNILSKSFYTKDCNSLVSIQRNLEGNTQLNEASCNDFLFERKSIVSLMPEDQISPVSEVLKPKQGTALLLPSPEFDYRPESEKVIQTSHDDIPLLDEQSIACEMNELSCTNELVVNKVESECVLNQQVSLNSQEHANLPTDSLLHLNKEMPLATGRDAHQSHHPPLEGRADVIADIQTIPIQTKIKDISPPGNQTCGASSNCPTLNIKPVSLERKKEMADSGTKALHSRLRSNKREAAGFPQVVSVIECHSVQSQDISSCHRVRKNVSQENMCSASAAFKSSKISLQVDNSLITKYENAFQHRDHCCQGTGHSVEKSSCKVSYTSQERELDGKETNGSLPGDKIRNKMVAGLLNSGISNKTIHTSSSIKLSEEGLEGKEQDVSKETVFCKYNISDHAIQELNQTVNIPGPEKVLDQSPTVMFSSFKNVKSVETLDQKADEVLDCQSNQNRPDECKSEGQSAKEMLSSDQRETVTEPHGEVNHNQKDLLVSSGSNNSLPCGSPKKCNLKGAFVKMSGCDESTEGMVDIVYTDCSNKLAEGVLDVKASNLLDCGARQEKLAFQEDSRSTLSRRELDAAHTGTTGQDSDFPVTAASTVDFLKIKKSCEENVCRSLKDCEMEKCPDSCAHEMESVADHEPNKRILGRVNLSLNDSHYGQQDKGTSLRETQEMTEGSRLEPNSEFGKESTFGISSKESMSCHDESSVSLRSLKSIEIMPSQENSETNVNSEETDLKNLCKPKDGEMLCENVKDCTVLPEMKEIVSRDWSNSSDRDSVCTCVEKNACKACHPHENSSDRHLPLTVKTDIKVKGEETEEHQRGRLGYLTVGEQSEELVTRETGDGDPVSNISQTHFKCRGILNHAEKQQSPEVLDYMLQKEEKYIRQQKAHTISQQCISSSLLLDDAQNQNQPKADKDESTMINEITLAKLAKDSIVAQTQKLEDQKEERLHHPLRKDTESCTSPCLLGAPRKAQDPSSAGCDQIHGAFAKKGVLPLKKQPHRTCKKVSYQEQIIVGRKIGKIRSSAFLKSSSNPIPTKAHRLLSLCTLSAPTRLEPETAPTKSLVSHIPKQMSTPCHPLRSLNFRKTTKESALLNKLSILASKLAPAMKTQKLRYRRCSSELLPMAKSYKRLRYKRLLDGFSSSTEQLNPYLAASGWDKRPNSKPMALYSLESIKMTFIDLSNKMPSLLFGSEIFPVSFHVKSSSSDCTTESSRTFPEHCAPARLALGEALQCPSQPPKWTFSFFLSHGCPGMATFREDTGVHSQTHTQAPPQPPAPLQDYGGTAIVQTRADCSVLGLHTLLALCSPGCYRIWTKKRSFSSHMPTMQRLFMTQFTQGLKGLRSPASIADKVFCSLPYSVGRVLSIWSQHGPSVCSFEISSLHSPHCKRQPSLGTTSSHTMLPYVPLPGMEATYNTSGSQTRLEPPFPALVPKSCLVAESAVSKLLLSASEFQVRGLDELDGVKAACPCPQSSPPEQKEAEPEKRPKKVSQIRIRKTIPRPDPNLTPMGLPRPKRLKKKEFSLEEIYTNKNYKSPPANRCLETIFEEPKERNGTLISISQQKRKRVLEFQDFTVPRKRRARGKVKVAGSFTRAQKAAVQSRELDALLIQKLMELETFFAKEEEQEQSSGC

SEQ ID NO: 5932 - protein, 138 aa, Homo sapiens
MATKRLFGATRTWAGWGAWELLNPATSGRLLARDYAKKPVMKGAKSGKGAVTSEALKDPDVCTDPVQLTTYAMGVNIYKEGQDVPLKPDAEYPEWLFEMNLGPPKTLEELDPESREYWRRLRKQNIWRHNRLSKNKRL

SEQ ID NO: 5933 - protein, 1222 aa, Homo sapiens
MLVGQGAGLLGPAVVTAAVVLLLSGVGPAHGSEDIVVGCGGFVKSDVEINYSLIEIKLYTKHGTLKYQTDCAPNNGYFMIPLYDKGDFILKIEPPLGWSFEPTTVELHVDGVSDICTKGGDINFVFTGFSVNGKVLSKGQPLGPAGVQVSLRNTGTEAKIQSTVTQPGGKFAFFKVLPGDYEILATHPTWALKEASTTVRVTNSNANAASPLIVAGYNVSGSVRSDGEPMKGVKFLLFSSLVTKEDVLGCNVSPVPGFQPQDESLVYLCYTVSREDGSFSFYSLPSGGYTVIPFYRGERITFDVAPSRLDFTVEHDSLKIEPVFHVMGFSVTGRVLNGPEGDGVPEAVVTLNNQIKVKTKADGSFRLENITTGTYTIHAQKEHLYFETVTIKIAPNTPQLADIVATGFSVCGRISIIRFPDTVKQMNKYKVVLSSQDKDKSLVTVETDAHGSFCFKAKPGTYKVQVMVPEAETRAGLTLKPQTFPLTVTDRPVMDVAFVQFLASVSGKVSCLDTCGDLLVTLQSLSRQGEKRSLQLSGKVNAMTFTFDNVLPGKYKISIMHEDWCWKNKSLEVEVLEDDVSAVEFRQTGYMLRCSLSHAITLEFYQDGNGRENVGIYNLSKGVNRFCLSKPGVYKVTPRSCHRFEQAFYTYDTSSPSILTLTAIRHHVLGTITTDKMMDVTVTIKSSIDSEPALVLGPLKSVQELRREQQLAEIEARRQEREKNGNEEGEERMTKPPVQEMVDELQGPFSYDFSYWARSGEKITVTPSSKELLFYPPSMEAVVSGESCPGKLIEIHGKAGLFLEGQIHPELEGVEIVISEKGASSPLITVFTDDKGAYSVGPLHSDLEYTVTSQKEGYVLTAVEGTIGDFKAYALAGVSFEIKAEDDQPLPGVLLSLSGGLFRSNLLTQDNGILTFSNLSPGQYYFKPMMKEFRFEPSSQMIEVQEGQNLKITITGYRTAYSCYGTVSSLNGEPEQGVAMEAVGQNDCSIYGEDTVTDEEGKFRLRGLLPGCVYHVQLKAEGNDHIERALPHHRVIEVGNNDIDDVNIIVFRQINQFDLSGNVITSSEYLPTLWVKLYKSENLDNPIQTVSLGQSLFFHFPPLLRDGENYVVLLDSTLPRSQYDYILPQVSFTAVGYHKHITLIFNPTRKLPEQDIAQGSYIALPLTLLVLLAGYNHDKLIPLLLQLTSRLQGVGALGQAASDNSGPEDAKRQAKKQKTRRT

SEQ ID NO: 5934 - protein, 841 aa, Homo sapiens
MLLCTARLVGLQLLISCCWAFACHSTESSPDFTLPGDYLLAGLFPLHSGCLQVRHRPEVTLCDRSCSFNEHGYHLFQAMRLGVEEINNSTALLPNITLGYQLYDVCSDSANVYATLRVLSLPGQHHIELQGDLLHYSPTVLAVIGPDSTNRAATTAALLSPFLVPMISYAASSETLSVKRQYPSFLRTIPNDKYQVETMVLLLQKFGWTWISLVGSSDDYGQLGVQALENQATGQGICIAFKDIMPFSAQVGDERMQCLMRHLAQAGATVVVVFSSRQLARVFFESVVLTNLTGKVWVASEAWALSRHITGVPGIQRIGMVLGVAIQKRAVPGLKAFEEAYARADKKAPRPCHKGSWCSSNQLCRECQAFMAHTMPKLKAFSMSSAYNAYRAVYAVAHGLHQLLGCASGACSRGRVYPWQLLEQIHKVHFLLHKDTVAFNDNRDPLSSYNIIAWDWNGPKWTFTVLGSSTWSPVQLNINETKIQWHGKDNQVPKSVCSSDCLEGHQRVVTGFHHCCFECVPCGAGTFLNKSDLYRCQPCGKEEWAPEGSQTCFPRTVVFLALREHTSWVLLAANTLLLLLLLGTAGLFAWHLDTPVVRSAGGRLCFLMLGSLAAGSGSLYGFFGEPTRPACLLRQALFALGFTIFLSCLTVRSFQLIIIFKFSTKVPTFYHAWVQNHGAGLFVMISSAAQLLICLTWLVVWTPLPAREYQRFPHLVMLECTETNSLGFILAFLYNGLLSISAFACSYLGKDLPENYNEAKCVTFSLLFNFVSWIAFFTTASVYDGKYLPAANMMAGLSSLSSGFGGYFLPKCYVILCRPDLNSTEHFQASIQDYTRRCGST

SEQ ID NO: 5935 - protein, 531 aa, Homo sapiens
MCSLASGATGGRGAVENEEDLPELSDSGDEAAWEDEDDADLPHGKQQTPCLFCNRLFTSAEETFSHCKSEHQFNIDSMVHKHGLEFYGYIKLINFIRLKNPTVEYMNSIYNPVPWEKEEYLKPVLEDDLLLQFDVEDLYEPVSVPFSYPNGLSENTSVVEKLKHMEARALSAEAALARAREDLQKMKQFAQDFVMHTDVRTCSSSTSVIADLQEDEDGVYFSSYGHYGIHEEMLKDKIRTESYRDFIYQNPHIFKDKVVLDVGCGTGILSMFAAKAGAKKVLGVDQSEILYQAMDIIRLNKLEDTITLIKGKIEEVHLPVEKVDVIISEWMGYFLLFESMLDSVLYAKNKYLAKGGSVYPDICTISLVAVSDVNKHADRIAFWDDVYGFKMSCMKKAVIPEAVVEVLDPKTLISEPCGIKHIDCHTTSISDLEFSSDFTLKITRTSMCTAIAGYFDIYFEKNCHNRVVFSTGPQSTKTHWKQTVFLLEKPFSVKAGEALKGKVTVHKNKKDPRSLTVTLTLNNSTQTYGLQ

SEQ ID NO: 5936 - protein, 452 aa, Homo sapiens
MAGYLRVVRSLCRASGSRPAWAPAALTAPTSQEQPRRHYADKRIKVAKPVVEMDGDEMTRIIWQFIKEKLILPHVDIQLKYFDLGLPNRDQTDDQVTIDSALATQKYSVAVKCATITPDEARVEEFKLKKMWKSPNGTIRNILGGTVFREPIICKNIPRLVPGWTKPITIGRHAHGDQYKATDFVADRAGTFKMVFTPKDGSGVKEWEVYNFPAGGVGMGMYNTDESISGFAHSCFQYAIQKKWPLYMSTKNTILKAYDGRFKDIFQEIFDKHYKTDFDKNKIWYEHRLIDDMVAQVLKSSGGFVWACKNYDGDVQSDILAQGFGSLGLMTSVLVCPDGKTIEAEAAHGTVTRHYREHQKGRPTSTNPIASIFAWTRGLEHRGKLDGNQDLIRFAQMLEKVCVETVESGAMTKDLAGCIHGLSNVKLNEHFLNTTDFLDTIKSNLDRALGRQ

SEQ ID NO: 5937 - protein, 1691 aa, Homo sapiens
MKLRGVSLAAGLFLLALSLWGQPAEAAACYGCSPGSKCDCSGIKGEKGERGFPGLEGHPGLPGFPGPEGPPGPRGQKGDDGIPGPPGPKGIRGPPGLPGFPGTPGLPGMPGHDGAPGPQGIPGCNGTKGERGFPGSPGFPGLQGPPGPPGIPGMKGEPGSIIMSSLPGPKGNPGYPGPPGIQGLPGPTGIPGPIGPPGPPGLMGPPGPPGLPGPKGNMGLNFQGPKGEKGEQGLQGPPGPPGQISEQKRPIDVEFQKGDQGLPGDRGPPGPPGIRGPPGPPGGEKGEKGEQGEPGKRGKPGKDGENGQPGIPGLPGDPGYPGEPGRDGEKGQKGDTGPPGPPGLVIPRPGTGITIGEKGNIGLPGLPGEKGERGFPGIQGPPGLPGPPGAAVMGPPGPPGFPGERGQKGDEGPPGISIPGPPGLDGQPGAPGLPGPPGPAGPHIPPSDEICEPGPPGPPGSPGDKGLQGEQGVKGDKGDTCFNCIGTGISGPPGQPGLPGLPGPPGSLGFPGQKGEKGQAGATGPKGLPGIPGAPGAPGFPGSKGEPGDILTFPGMKGDKGELGSPGAPGLPGLPGTPGQDGLPGLPGPKGEPGGITFKGERGPPGNPGLPGLPGNIGPMGPPGFGPPGPVGEKGIQGVAGNPGQPGIPGPKGDPGQTITQPGKPGLPGNPGRDGDVGLPGDPGLPGQPGLPGIPGSKGEPGIPGIGLPGPPGPKGFPGIPGPPGAPGTPGRIGLEGPPGPPGFPGPKGEPGFALPGPPGPPGLPGFKGALGPKGDRGFPGPPGPPGRTGLDGLPGPKGDVGPNGQPGPMGPPGLPGIGVQGPPGPPGIPGPIGQPGLHGIPGEKGDPGPPGLDVPGPPGERGSPGIPGAPGPIGPPGSPGLPGKAGASGFPGTKGEMGMMGPPGPPGPLGIPGRSGVPGLKGDDGLQGQPGLPGPTGEKGSKGEPGLPGPPGPMDPNLLGSKGEKGEPGLPGIPGVSGPKGYQGLPGDPGQPGLSGQPGLPGPPGPKGNPGLPGQPGLIGPPGLKGTIGDMGFPGPQGVEGPPGPSGVPGQPGSPGLPGQKGDKGDPGISSIGLPGLPGPKGEPGLPGYPGNPGIKGSVGDPGLPGLPGTPGAKGQPGLPGFPGTPGPPGPKGISGPPGNPGLPGEPGPVGGGGHPGQPGPPGEKGKPGQDGIPGPAGQKGEPGQPGFGNPGPPGLPGLSGQKGDGGLPGIPGNPGLPGPKGEPGFHGFPGVQGPPGPPGSPGPALEGPKGNPGPQGPPGRPGPTGFQGLPGPEGPPGLPGNGGIKGEKGNPGQPGLPGLPGLKGDQGPPGLQGNPGRPGLNGMKGDPGLPGVPGFPGMKGPSGVPGSAGPEGEPGLIGPPGPPGLPGPSGQSIIIKGDAGPPGIPGQPGLKGLPGPQGPQGLPGPTGPPGDPGRNGLPGFDGAGGRKGDPGLPGQPGTRGLDGPPGPDGLQGPPGPPGTSSVAHGFLITRHSQTTDAPQCPQGTLQVYEGFSLLYVQGNKRAHGQDLGTAGSCLRRFSTMPFMFCNINNVCNFASRNDYSYWLSTPEPMPMSMQPLKGQSIQPFISRCAVCEAPAVVIAVHSQTIQIPHCPQGWDSLWIGYSFMMHTSAGAEGSGQALASPGSCLEEFRSAPFIECHGRGTCNYYANSYSFWLATVDVSDMFSKPQSETLKAGDLRTRISRCQVCMKRT

SEQ ID NO: 5938 - protein, 325 aa, Homo sapiens
MVPREAPESAQCLCPSLTIPNAKDVLRKRHKRRSRQHQRFMARKALLQEQGLLSMPPEPGSSPLPTPFGAATATEAASSGKQCLRAGSGSAPCSRRPAPGKASGPLPSKCVAIDCEMVGTGPRGRVSELARCSIVSYHGNVLYDKYIRPEMPIADYRTRWSGITRQHMRKAVPFQVAQKEILKLLKGKVVVGHALHNDFQALKYVHPRSQTRDTTYVPNFLSEPGLHTRARVSLKDLALQLLHKKIQVGQHGHSSVEDATTAMELYRLVEVQWEQQEARSLWTCPEDREPDSSTDMEQYMEDQYWPDDLAHGSRGGAREAQDRRN

SEQ ID NO: 5939 - protein, 264 aa, Homo sapiens
MAPTGLLVAGASFLAFRGLHWGLRRLPTPESAARDRWQWWNLCVSLAHSLLSGTGALLGLSLYPQMAADPIHGHPRWALVLVAVSVGYFLADGADLLWNQTLGKTWDLLCHHLVVVSCLSTAVLSGHYVGFSMVSLLLELNSACLHLRKLLLLSRQAPSLAFSVTSWASLATLALFRLVPLGWMSLWLFRQHHQVPLALVTLGGIGLVTVGIMSIILGIRILVNDVLQSRPHPPSPGHEKTRGTRTRRDNGPVTSNSSTLSLKD

SEQ ID NO: 5940 - protein, 612 aa, Homo sapiens
MENQLAKSTEERTFQYQDSLPSLPVPSLEESLKKYLESVKPFANQEEYKKTEEIVQKFQSGIGEKLHQKLLERAKGKRNWLEEWWLNVAYLDVRIPSQLNVNFAGPAAHFEHYWPPKEGTQLERGSITLWHNLNYWQLLRKEKVPVHKVGNTPLDMNQFRMLFSTCKVPGITRDSIMNYFRTESEGRSPNHIVVLCRGRAFVFDVIHEGCLVTPPELLRQLTYIHKKCHSEPDGPGIAALTSEERTRWAKAREYLIGLDPENLALLEKIQSSLLVYSMEDSSPHVTPEDYSEIIAAILIGDPTVRWGDKSYNLISFSNGVFGCNCDHAPFDAMIMVNISYYVDEKIFQNEGRWKGSEKVRDIPLPEELIFIVDEKVLNDINQAKAQYLREASDLQIAAYAFTSFGKKLTKNKMLHPDTFIQLALQLAYYRLHGHPGCCYETAMTRHFYHGRTETMRSCTVEAVRWCQSMQDPSVNLRERQQKMLQAFAKHNKMMKDCSAGKGFDRHLLGLLLIAKEEGLPVPELFTDPLFSKSGGGGNFVLSTSLVGYLRVQGVVVPMVHNGYGFFYHIRDDRFVVACSAWKSCPETDAEKLVQLTFCAFHDMIQLMNSTHL

SEQ ID NO: 5941 - protein, 1371 aa, Homo sapiens
MTEESSDVPRELIESIKDVIGRKIKISVKKKVKLEVKGDKVENKVLVLTSCRAFLVTARIPTKLELTFSYLEIHGVVCSKSAQMIVETEKCSISMKMASPEDVSEVLAHIGTCLRKIFPGLSPVRIMKKVSMEPSERLASLQALWDSQTVAEQGPCGGFSQMYACVCDWLGFSYREEVQWDVDTIYLTQDTRELNLQDFSHLDHRDLIPIIAALEYNQWFTKLSSKDLKLSTDVCEQILRVVSRSNRLEELVLENAGLRTDFAQKLASALAHNPNSGLHTINLAGNPLEDRGVSSLSIQFAKLPKGLKHLNLSKTSLSPKGVNSLSQSLSANPLTASTLVHLDLSGNVLRGDDLSHMYNFLAQPNAIVHLDLSNTECSLDMVCGALLRGCLQYLAVLNLSRTVFSHRKGKEVPPSFKQFFSSSLALMHINLSGTKLSPEPLKALLLGLACNHNLKGVSLDLSNCELRSGGAQVLEGCIAEIHNITSLDISDNGLESDLSTLIVWLSKNRSIQHLALGKNFNNMKSKNLTPVLDNLVQMIQDEESPLQSLSLADSKLKTEVTIIINALGSNTSLTKVDISGNGMGDMGAKMLAKALQINTKLRTVIWDKNNITAQGFQDIAVAMEKNYTLRFMPIPMYDASQALKTNPEKTEDALQKIENYLLRNHETRKYLQEQAYRLQQGIVTSTTQQMIDRICVKVQDHLNSLRNCGGDAIQEDLKSAERLMRDAKNSKTLLPNLYHVGGASWAGASGLLSSPIQETLESMAGEVTRVVDEQLKALLESMVDAAENLCPNVMKKAHIRQDLIHASTEKISIPRTFVKNVLLEQSGIDILNKISEVKLTVASFLSDRIVDEILDALSHCHHKLADHFSRRGKTLPQQESLEIELAEEKPVKRSIITVEELTEIERLEDLDTCMMTPKSKRKSIHSRMLRPVSRAFEMEFDLDKALEEVPIHIEDPPFPSLRQEKRSSGFISELPSEEGKKLEHFTKLRPKRNKKQQPTQAAVCAANIVSQDGEQNGLMGRVDEGVDEFFTKKVTKMDSKKWSTRGSESHELNEGGDEKKKRDSRKSSGFLNLIKSRSKSERPPTILMTEEPSSPKGAVRSPPVDCPRKDTKAAEHNGNSERIEEIKTPDSFEESQGEEIGKVERSDSKSSPQAGRRYGVQVMGSGLLAEMKAKQEKRAACAQKKLGNDAVSQDSSSPALSGVERSDGGGAVPKLHPGLPENRFGLGTPEKNTKAEPKAEAGSRSRSSSSTPTSPKPLLQSPKPSLAARPVIPQKPRTASRPDDIPDSPSSPKVALLPPVLKKVPSDKERDGQSSPQPSPRTFSQEVSRRSWGQQAQEYQEQKQRSSSKDGHQGSKSNDSGEEAEKEFIFV

SEQ ID NO: 5942 - protein, 944 aa, Homo sapiens
MDKKSFEMVLDEIRKAVLTEYKLKAIEYVHGYFSSEQVVDLLRYFSWAEPQLKAMKALQHKMVAVQPTEVVNILNCFTFSKDKLVALELLASNIIDAQNSRPIEDLFRVNMSEKKRCKRILEQAFKGGCKAPHAMISSCGTIPGNPYPKGRPSRINGIFPGTPLKKDGEECTNEGKGIAARILGPSKPPPSTYNPHKPVPYPIPPCRPHATIAPSAYNNAGLVPLANVIAPPPPPYTPNPVGTENEDLSNPSKPIQNQTFSTPASQLFSPHGSNPSTPAATPVPTASPVKAINHPSASAAATVSGMNLLNTVLPVFPGQVSSAVHTPQPSIPNPTVIRTPSLPTAPVTSIHSTTTTPVPSIFSGLVSLPGPSATPTAATPTPGPTPRSTLGSSEAFASTSAPFTSLPFSTSSSAASTSNPNSASLSSVFAGLPLPLPPTSQGLSNPTPVIAGGSTPSVAGPLGVNSPLLSALKGFLTSNDTNLINSSALSSAVTSGLASLSSLTLQNSDSSASAPNKCYAPSAIPTPQRTSTPGLALFPGLPSPVANSTSTPLTLPVQSPLATAASASTSVPVSCGSSASLLRGPHPGTSDLHISSTPAATTLPVMIKTEPTSPTPSAFKGPSHSGNPSHGTLGLSGTLGRAYTSTSVPISLSACLNPALSGLSSLSTPLNGSNPLSSISLPPHGSSTPIAPVFTALPSFTSLTNNFPLTGNPSLNPSVSLPGSLIATSSTAATSTSLPHPSSTAAVLSGLSASAPVSAAPFPLNLSTAVPSLFSVTQGPLSSSNPSYPGFSVSNTPSVTPALPSFPGLQAPSTVAAVTPLPVAATAPSPAPVLPGFASAFSSNFNSALVAQAGLSSGLQAAGSSVFPGLLSLPGIPGFPQNPSQSSLQELQHNAAAQSALLQQVHSASALESYPAQPDGFPSYPSAPGTPFSLQPSLSQSGWQ

SEQ ID NO: 5943 - protein, 329 aa, Homo sapiens
MDPQCTMGLSNILFVMAFLLSGAAPLKIQAYFNETADLPCQFANSQNQSLSELVVFWQDQENLVLNEVYLGKEKFDSVHSKYMGRTSFDSDSWTLRLHNLQIKDKGLYQCIIHHKKPTGMIRIHQMNSELSVLANFSQPEIVPISNITENVYINLTCSSIHGYPEPKKMSVLLRTKNSTIEYDGVMQKSQDNVTELYDVSISLSVSFPDVTSNMTIFCILETDKTRLLSSPFSIELEDPQPPPDHIPWITAVLPTVIICVMVFCLILWKWKKKKRPRNSYKCGTNTMEREESEQTKKREKIHIPERSDEAQRVFKSSKTSSCDKSDTCF

SEQ ID NO: 5944 - protein, 973 aa, Homo sapiens
METKVHLFCQAEENIDLLDDGSNSFATDLSSGTINHKKYIKFSKTIEKEISPEIRSLSPEYKKIFETSIIFCGEEKSSDFSGEKKVGRKSLQVQQHSKRTEIIPPFLKLSKEKVTRKENSLCKLPNQYSVHKTSSPLCTSSAITREKEMLSNLYMTLYDEVTHGYLHSKELSALHKACKIFSKIRSGKIYVNDLPVILCILRISISDLEMRQALKTVDIDAFQDALKIFCRIKGGRVSTDDVFAVLDSMGIPINREILEEVTKHTYIDSNHMVDIGDIIFTLNELQEQYEDVSITEGSPLNEITSDRKLSSVAGCYLKYKKKNSLSSKLPEPSISKKLNKKSNQYYSKIMENDDLESKRPKNTWQIRKFLGGVGSSNVGVQEPYSKNGINFKKHSEKGEIHDSKSKPQSLKSSTSLSKSLDKSDISSIPKLQKPAVRKHSSLQKQVSSTEKTAISTLENFCEAISKLQENYIAAEELQSILPSTGINLLDEEFQKIVTDTSRNENGMVELDDFVNALAKERSFPECNALPGVIKAIDKIKDKNVDYEDLNTCLQNFGIYLSKPEFKKITELTEAGETKKVNFKEFIDTMMSNTECFSEKLVLPDAIETLDDLRKETMSVSDLWNTLSSLNSNLKKDEFLAALELVTVDEGDKVQFEEFAKVVRNMRDAARLEELQEVVLAADLLEGDMIAGKNLEDFLRNVGIKSPKEEVEKILQSDFVSEDNMVNIKDCMRALRDTQKFSNYIDFRKEASNLKLPKVNEIKEAANILSHVDNGKIGIPDLEHALKCLNVNLTEEDFNEALNCCNVSDNMEVDLKDFLMKMKESPHFQKSKATQILLATTQILQNDLVDVSDLKTLLMDKDLHTANAILTVMLRHVPEHESGKVSIQEFMTKLSDILTIPKAAGKFYLICTYCPDLERQAVVYMLKTIQDSIVKAQVSKKQYNMNIKQHKISLHNFCLNSKANIAKLNPNSKF

SEQ ID NO: 5945 - protein, 736 aa, Homo sapiens
MKKSRSVMTVMADDNVKDYFECSLSKSYSSSSNTLGIDLWRGRRCCSGNLQLPPLSQRQSERARTPEGDGISRPTTLPLTTLPSIAITTVSQECFDVENGPSPGRSPLDPQASSSAGLVLHATFPGHSQRRESFLYRSDSDYDLSPKAMSRNSSLPSEQHGDDLIVTPFAQVLASLRSVRNNFTILTNLHGTSNKRSPAASQPPVSRVNPQEESYQKLAMETLEELDWCLDQLETIQTYRSVSEMASNKFKRMLNRELTHLSEMSRSGNQVSEYISNTFLDKQNDVEIPSPTQKDREKKKKQQLMTQISGVKKLMHSSSLNNTSISRFGVNTENEDHLAKELEDLNKWGLNIFNVAGYSHNRPLTCIMYAIFQERDLLKTFRISSDTFITYMMTLEDHYHSDVAYHNSLHAADVAQSTHVLLSTPALDAVFTDLEILAAIFAAAIHDVDHPGVSNQFLINTNSELALMYNDESVLENHHLAVGFKLLQEEHCDIFMNLTKKQRQTLRKMVIDMVLATDMSKHMSLLADLKTMVETKKVTSSGVLLLDNYTDRIQVLRNMVHCADLSNPTKSLELYRQWTDRIMEEFFQQGDKERERGMEISPMCDKHTASVEKSQVGFIDYIVHPLWETWADLVQPDAQDILDTLEDNRNWYQSMIPQSPSPPLDEQNRDCQGLMEKFQFELTLDEEDSEGPEKEGEGHSYFSSTKTLCVIDPENRDSLGETDIDIATEDKSPVDT

SEQ ID NO: 5946 - protein, 998 aa, Homo sapiens
MARARPPPPPSPPPGLLPLLPPLLLLPLLLLPAGCRALEETLMDTKWVTSELAWTSHPESGWEEVSGYDEAMNPIRTYQVCNVRESSQNNWLRTGFIWRRDVQRVYVELKFTVRDCNSIPNIPGSCKETFNLFYYEADSDVASASSPFWMENPYVKVDTIAPDESFSRLDAGRVNTKVRSFGPLSKAGFYLAFQDQGACMSLISVRAFYKKCASTTAGFALFPETLTGAEPTSLVIAPGTCIPNAVEVSVPLKLYCNGDGEWMVPVGACTCATGHEPAAKESQCRPCPPGSYKAKQGEGPCLPCPPNSRTTSPAASICTCHNNFYRADSDSADSACTTVPSPPRGVISNVNETSLILEWSEPRDLGGRDDLLYNVICKKCHGAGGASACSRCDDNVEFVPRQLGLTERRVHISHLLAHTRYTFEVQAVNGVSGKSPLPPRYAAVNITTNQAAPSEVPTLRLHSSSGSSLTLSWAPPERPNGVILDYEMKYFEKSEGIASTVTSQMNSVQLDGLRPDARYVVQVRARTVAGYGQYSRPAEFETTSERGSGAQQLQEQLPLIVGSATAGLVFVVAVVVIAIVCLRKQRHGSDSEYTEKLQQYIAPGMKVYIDPFTYEDPNEAVREFAKEIDVSCVKIEEVIGAGEFGEVCRGRLKQPGRREVFVAIKTLKVGYTERQRRDFLSEASIMGQFDHPNIIRLEGVVTKSRPVMILTEFMENCALDSFLRLNDGQFTVIQLVGMLRGIAAGMKYLSEMNYVHRDLAARNILVNSNLVCKVSDFGLSRFLEDDPSDPTYTSSLGGKIPIRWTAPEAIAYRKFTSASDVWSYGIVMWEVMSYGERPYWDMSNQDVINAVEQDYRLPPPMDCPTALHQLMLDCWVRDRNLRPKFSQIVNTLDKLIRNAASLKVIASAQSGMSQPLLDRTVPDYTTFTTVGDWLDAIKMGRYKESFVSAGFASFDLVAQMTAEDLLRIGVTLAGHQKKILSSIQDMRLQMNQTLPVQV

SEQ ID NO: 5947 - protein, 253 aa, Homo sapiens
MHSWERLAVLVLLGAAACAAPPRGRILGGREAEAHARPYMASVQLNGAHLCGGVLVAEQWVLSAAHCLEDAADGKVQVLLGAHSLSQPEPSKRLYDVLRAVPHPDSQPDTIDHDLLLLQLSEKATLGPAVRPLPWQRVDRDVAPGTLCDVAGWGIVNHAGRRPDSLQHVLLPVLDRATCNRRTHHDGAITERLMCAESNRRDSCKGDSGGPLVCGGVLEGVVTSGSRVCGNRKKPGIYTRVASYAAWIDSVLA

SEQ ID NO: 5948 - protein, 767 aa, Homo sapiens
MQSPAATAEGLSGPLFGAYTFPTFKFQPRHDSMDWRRISTLDVDRVARELDVATLQENIAGITFCNLDREVCSRCGQPVDPALLKVLRLAQLIIEYLLHCQDCLSASVAQLEARLQTSLGQQQRGQQELGRQADELKGVREESRRRRKMISTLQQLLMQTGTHSYHTCHLCDKTFMNATFLRGHIQRRHAGVAEGGKQKKQEQPVEEVLEELRAKLKWTQGELEAQREAERQRQLQEAELIHQREIEAKKEFDKWKEQEWTKLYGEIDKLKKLFWDEFKNVAKQNSTLEEKLRALQSHSVMESKLGSLRDEESEEWLRQARELQALREKTEIQKTEWKRKVKELHEEHMAEKKELQEENQRLQASLSQDQKKAAAQSQCQISTLRAQLQEQARIIASQEEMIQSLSLRKVEGIHKVPKAVDTEEDSPEEEMEDSQDEQHKVLAALRRNPTLLKHFRPILEDTLEEKLESMGIRKDAKGISIQTLRHLESLLRVQREQKARKFSEFLSLRGKLVKEVTSRAKERQENGAVVSQPDGQPSVKSQQSTLVTREAQPKTRTLQVALPSTPAEPPPPTRQSHGSHGSSLTQVSAPAPRPGLHGPSSTPPSSGPGMSTPPFSSEEDSEGDRVQRVSLQPPKVPSRMVPRPKDDWDWSDTETSEENAQPPGQGSGTLVQSMVKNLEKQLEAPAKKPAGGVSLFFMPNAGPQRAATPGRKPQLSEDESDLEISSLEDLPLDLDQREKPKPLSRSKLPEKFGTGPQSSGQPRVPAW

SEQ ID NO: 5949 - protein, 958 aa, Homo sapiens [sequence omitted]

SEQ ID NO: 5950 - protein, 1530 aa, Homo sapiens
MAPGWAGVGAAVRARLALALALASVLSGPPAVACPTKCTCSAASVDCHGLGLRAVPRGIPRNAERLDLDRNNITRITKMDFAGLKNLRVLHLEDNQVSVIERGAFQDLKQLERLRLNKNKLQVLPELLFQSTPKLTRLDLSENQIQGIPRKAFRGITDVKNLQLDNNHISCIEDGAFRALRDLEILTLNNNNISRILVTSFNHMPKIRTLRLHSNHLYCDCHLAWLSDWLRQRRTVGQFTLCMAPVHLRGFNVADVQKKEYVCPAPHSEPPSCNANSISCPSPCTCSNNIVDCRGKGLMEIPANLPEGIVEIRLEQNSIKAIPAGAFTQYKKLKRIDISKNQISDIAPDAFQGLKSLTSLVLYGNKITEIVKGLFDGLVSLQLLLLNANKINCLRVNTFQDLQNLNLLSLYDNKLQTISKGLFAPLQSIQTLHLAQNPFVCDCHLKWLADYLQDNPIETSGARCSSPRRLANKRISQIKSKKFRCSGSEDYRSRFSSECFMDLVCPEKCRCEGTIVDCSNQKLVRIPSHLPEYVTDLRLNDNEVSVLEATGIFKKLPNLRKINLSNNKIKEVREGAFDGAASVQELMLTGNQLETVHGRVFRGLSGLKTLMLRSNLIGCVSNDTFAGLSSVRLLSLYDNRITTITPGAFTTLVSLSTINLLSNPFNCNCHLAWLGKWLRKRRIVSGNPRCQKPFFLKEIPIQDVAIQDFTCDGNEESSCQLSPRCPEQCTCMETVVRCSNKGLRALPRGMPKDVTELYLEGNHLTAVPRELSALRHLTLIDLSNNSISMLTNYTFSNMSHLSTLILSYNRLRCIPVHAFNGLRSLRVLTLHGNDISSVPEGSFNDLTSLSHLALGTNPLHCDCSLRWLSEWVKAGYKEPGIARCSSPEPMADRLLLTTPTHRFQCKVLWFCCPGPVDINIVAKCNACLSSPCKNNGTCTQDPVELYRCACPYSYKGKDCTVPINTCIQNPCQHGGTCHLSDSHKDGFSCSCPLGFEGQRCEINPDDCEDNDCENNATCVDGINNYVCICPPNYTGELCDEVIDHCVPELNLCQHEAKCIPLDKGFSCECVPGYSGKLCETDNDDCVAHKCRHGAQCVDTINGYTCTCPQGFSGPFCEHPPPMVLLQTSPCDQYECQNGAQCIVVQQEPTCRCPPGFAGPRCEKLITVNFVGKDSYVELASAKVRPQANISLQVATDKDNGILLYKGDNDPLALELYQGHVRLVYDSLSSPPTTVYSVETVNDGQFHSVELVTLNQTLNLVVDKGTPKSLGKLQKQPAVGINSPLYLGGIPTSTGLSALRQGTDRPLGGFHGCIHEVRINNELQDFKALPPQSLGVSPGCKSCTVCKHGLCRSVEKDSVVCECRPGWTGPLCDQEARDPCLGHRCHHGKCVATGTSYMCKCAEGYGGDLCDNKNDSANACSAFKCHHGQCHISDQGEPYCLCQPGFSGEHCQQENPCLGQVVREVIRRQKGYASCATASKVPIMECRGGCGPQCCQPTRSKRRKYVFQCTDGSSFVEEVERHLECGCLACS

SEQ ID NO: 5951 - protein, 544 aa, Homo sapiens
MGPGARLAALLAVLALGTGDPERAAARGDTFSALTSVARALAPERRLLGLLRRYLRGEEARLRDLTRFYDKVLSLHEDSTTPVANPLLAFTLIKRLQSDWRNVVHSLEASENIRALKDGYEKVEQDLPAFEDLEGAARALMRLQDVYMLNVKGLARGVFQRVTGSAITDLYSPKRLFSLTGDDCFQVGKVAYDMGDYYHAIPWLEEAVSLFRGSYGEWKTEDEASLEDALDHLAFAYFRAGNVSCALSLSREFLLYSPDNKRMARNVLKYERLLAESPNHVVAEAVIQRPNIPHLQTRDTYEGLCQTLGSQPTLYQIPSLYCSYETNSNAYLLLQPIRKEVIHLEPYIALYHDFVSDSEAQKIRELAEPWLQRSVVASGEKQLQVEYRISKSAWLKDTVDPKLVTLNHRIAALTGLDVRPPYAEYLQVVNYGIGGHYEPHFDHATSPSSPLYRMKSGNRVATFMIYLSSVEAGGATAFIYANLSVPVVRNAALFWWNLHRSGEGDSDTLHAGCPVLVGDKWVANKWIHEYGQEFRRPCSSSPED

SEQ ID NO: 5952 - protein, 760 aa, Homo sapiens
MSTVEEDSDTVTVETVNSVTLTQDTEGNLILHCPQNEADEIDSEDSIEPPHKRLCLSSEDDQSIDDSTPCISVVALPLSENDQSFEVTMTATTEVADDEVTEGTVTQIQILQNEQLDEISPLGNEEVSAVSQAWFTTKEDKDSLTNKGHKWKQGMWSKEEIDILMNNIERYLKARGIKDATEIIFEMSKDERKDFYRTIAWGLNRPLFAVYRRVLRMYDDRNHVGKYTPEEIEKLKELRIKHGNDWATIGAALGRSASSVKDRCRLMKDTCNTGKWTEEEEKRLAEVVHELTSTEPGDIVTQGVSWAAVAERVGTRSEKQCRSKWLNYLNWKQSGGTEWTKEDEINLILRIAELDVADENDINWDLLAEGWSSVRSPQWLRSKWWTIKRQIANHKDVSFPVLIKGLKQLHENQKNNPTLLENKSGSGVPNSNTNSSVQHVQIRVARLEDNTAISSSPMAALQIPVQITHVSSADSPATVDSETITLNSGTLQTFEILPSFHLQPTGTPGTYLLQTSSSQGLPLTLTASPTVTLTAAAPASPEQIIVHALSPEHLLNTSDNVTVQCHTPRVIIQTVATEDITSSISQAELTVDSDIQSSDFPEPPDALEADTFPDEIHHPKMTVEPSFNDAHVSKFSDQNSTELMNSVMVRTEEEISDTDLKQEESPSDLASAYVTEGLESPTIEEQVDQTIDDETILIVPSPHGFIQASDVIDTESVLPLTTLTDPILQHHQEESNIIGSSLGSPVSEDSKDVEDLVNCH

SEQ ID NO: 5953 - protein, 783 aa, Homo sapiens
MARLGNCSLTWAALIILLLPGSLEECGHISVSAPIVHLGDPITASCIIKQNCSHLDPEPQILWRLGAELQPGGRQQRLSDGTQESIITLPHLNHTQAFLSCCLNWGNSLQILDQVELRAGYPPAIPHNLSCLMNLTTSSLICQWEPGPETHLPTSFTLKSFKSRGNCQTQGDSILDCVPKDGQSHCCIPRKHLLLYQNMGIWVQAENALGTSMSPQLCLDPMDVVKLEPPMLRTMDPSPEAAPPQAGCLQLCWEPWQPGLHINQKCELRHKPQRGEASWALVGPLPLEALQYELCGLLPATAYTLQIRCIRWPLPGHWSDWSPSLELRTTERAPTVRLDTWWRQRQLDPRTVQLFWKPVPLEEDSGRIQGYVVSWRPSGQAGAILPLCNTTELSCTFHLPSEAQEVALVAYNSAGTSRPTPVVFSESRGPALTRLHAMARDPHSLWVGWEPPNPWPQGYVIEWGLGPPSASNSNKTWRMEQNGRATGFLLKENIRPFQLYEIIVTPLYQDTMGPSQHVYAYSQEMAPSHAPELHLKHIGKTWAQLEWVPEPPELGKSPLTHYTIFWTNAQNQSFSAILNASSRGFVLHGLEPASLYHIHLMAASQAGATNSTVLTLMTLTPEGSELHIILGLFGLLLLLTCLCGTAWLCCSPNRKNPLWPSVPDPAHSSLGSWVPTIMEEDAFQLPGLGTPPITKLTVLEEDEKKPVPWESHNSSETCGLPTLVQTYVLQGDPRAVSTQPQSQSGTSDQAGPPRRSAYFKDQIMLHPAPPNGLLCLFPITSVL

SEQ ID NO: 5954 - protein, 129 aa, Homo sapiens
MSGRGKQGGKARAKAKSRSSRAGLQFPVGRVHRLLRKGNYAERVGAGAPVYMAAVLEYLTAEILELAGNAARDNKKTRIIPRHLQLAIRNDEELNKLLGKVTIAQGGVLPNIQAVLLPKKTESHKAKSK

SEQ ID NO: 5955 - protein, 64 aa, Homo sapiens
MFLQYYLNEQGDRVYTLKKFDPMGQQTCSAHPARFSPDDKYSRHRITIKKRFKVLMTQQPRPVL

SEQ ID NO: 5956 - protein, 353 aa, Homo sapiens
MRLPRRAALGLLPLLLLLPPAPEAAKKPTPCHRCRGLVDKFNQGMVDTAKKNFGGGNTAWEEKTLSKYESSEIRLLEILEGLCESSDFECNQMLEAQEEHLEAWWLQLKSEYPDLFEWFCVKTLKVCCSPGTYGPDCLACQGGSQRPCSGNGHCSGDGSRQGDGSCRCHMGYQGPLCTDCMDGYFSSLRNETHSICTACDESCKTCSGLTNRDCGECEVGWVLDEGACVDVDECAAEPPPCSAAQFCKNANGSYTCEECDSSCVGCTGEGPGNCKECISGYAREHGQCADVDECSLAEKTCVRKNENCYNTPGSYVCVCPDGFEETEDACVPPAEAEATEGESPTQLPSREDL

SEQ ID NO: 5957 - protein, 165 aa, Homo sapiens
MAKMNLSSYILILTFSLFSQGILLSASKSIRNLDDDMVFNTFRLGKGFQKEDTAEKSVIAPSLEQYKNDESSFMNEEENKVSKNTGSKHNFLNHGLPLNLAIKPYLALKGSVAFPAENGVQNTESTQEKREIGDEENSAKFPIGRRDFDMLRCMLGRVYRPCWQV

SEQ ID NO: 5958 - protein, 512 aa, Homo sapiens
MATANGAVENGQPDRKPPALPRPIRNLEVKFTKIFINNEWHESKSGKKFATCNPSTREQICEVEEGDKPDVDKAVEAAQVAFQRGSPWRRLDALSRGRLLHQLADLVERDRATLAALETMDTGKPFLHAFFIDLEGCIRTLRYFAGWADKIQGKTIPTDDNVVCFTRHEPIGVCGAITPWNFPLLMLVWKLAPALCCGNTMVLKPAEQTPLTALYLGSLIKEAGFPPGVVNIVPGFGPTVGAAISSHPQINKIAFTGSTEVGKLVKEAASRSNLKRVTLELGGKNPCIVCADADLDLAVECAHQGVFFNQGQCCTAASRVFVEEQVYSEFVRRSVEYAKKRPVGDPFDVKTEQGPQIDQKQFDKILELIESGKKEGAKLECGGSAMEDKGLFIKPTVFSEVTDNMRIAKEEIFGPVQPILKFKSIEEVIKRANSTDYGLTAAVFTKNLDKALKLASALESGTVWINCYNALYAQAPFGGFKMSGNGRELGEYALAEYTEVKTVTIKLGDKNP

SEQ ID NO: 5959 - protein, 233 aa, Homo sapiens
MEGGAYGAGKAGGAFDPYTLVRQPHTILRVVSWLFSIVVFGSIVNEGYLNSASEGEEFCIYNRNPNACSYGVAVGVLAFLTCLLYLALDVYFPQISSVKDRKKAVLSDIGVSAFWAFLWFVGFCYLANQWQVSKPKDNPLNEGTDAARAAIAFSFFSIFTWAGQAVLAFQRYQIGADSALFSQDYMDPSQDSSMPYAPYVEPTGPDPAGMGGTYQQPANTFDTEPQGYQSQGY

SEQ ID NO: 5960 - protein, 590 aa, Homo sapiens
MSDSPAGSNPRTPESSGSGSGGGGKRPAVPAAVSLLPPADPLRQANRLPIRVLKMLSAHTGHLLHPEYLQPLSSTPVSPIELDAKKSPLALLAQTCSQIGKPDPPPSSKLNSVAAAANGLGAEKDPGRSAPGAASAAAALKQLGDSPAEDKSSFKPYSKGSGGGDSRKDSGSSSVSSTSSSSSSSPGDKAGFRVPSAACPPFPPHGAPVSASSSSSSPGGSRGGSPHHSDCKNGGGVGGGELDKKDQEPKPSPEPAAVSRGGGGEPGAHGGAESGASGRKSEPPSALVGAGHVAPVSPYKPGHSVFPLPPSSIGYHGSIVGAYAGYPSQFVPGLDPSKSGLVGGQLSGGLGLPPGKPPSSSPLTGASPPSFLQGLCRDPYCLGGYHGASHLGGSSCSTCSAHDPAGPSLKAGGYPLVYPGHPLQPAALSSSAAQAALPGHPLYTYGFMLQNEPLPHSCNWVAASGPCDKRFATSEELLSHLRTHTALPGAEKLLAAYPGASGLGSAAAAAAAAASCHLHLPPPAAPGSPGSLSLRNPHTLGLSRYHPYGKSHLSTAGGLAVPSLPTAGPYYSPYALYGQRLASASALGYQ

SEQ ID NO: 5961 - protein, 654 aa, Homo sapiens
MSEASSEDLVPPLEAGAAPYREEEEAAKKKKEKKKKSKGLANVFCVFTKGKKKKGQPSSAEPEDAAGSRQGLDGPPPTVEELKAALERGQLEAARPLLALERELAAAAAAGGVSEEELVRRQSKVEALYELLRDQVLGVLRRPLEAPPERLRQALAVVAEQEREDRQAAAAGPGTSGLAATRPRRWLQLWRRGVAEAAEERMGQRPAAGAEVPESVFLHLGRTMKEDLEAVVERLKPLFPAEFGVVAAYAESYHQHFAAHLAAVAQFELCERDTYMLLLWVQNLYPNDIINSPKLVGELQGMGLGSLLPPRQIRLLEATFLSSEAANVRELMDRALELEARRWAEDVPPQRLDGHCHSELAIDIIQITSQAQAKAESITLDLGSQIKRVLLVELPAFLRSYQRAFNEFLERGKQLTNYRANVIANINNCLSFRMSMEQNWQVPQDTLSLLLGPLGELKSHGFDTLLQNLHEDLKPLFKRFTHTRWAAPVETLENIIATVDTRLPEFSELQGCFREELMEALHLHLVKEYIIQLSKGRLVLKTAEQQQQLAGYILANADTIQHFCTQHGSPATWLQPALPTLAEIIRLQDPSAIKIEVATYATCYPDFSKGHLSAILAIKGNLSNSEVKRIRSILDVSMGAQEPSRPLFSLIKVG

SEQ ID NO: 5962 - protein, 540 aa, Homo sapiens
MALTRPVRLFSLVTRLLLAPRRGLTVRSPDEPLPVVRIPVALQRQLEQRQSRRRNLPRPVLVRPGPLLVSARRPELNQPARLTLGRWERAPLASQGWKSRRARRDHFSIERAQQEAPAVRKLSSKGSFADLGLEPRVLHALQEAAPEVVQPTTVQSSTIPSLLRGRHVVCAAETGSGKTLSYLLPLLQRLLGQPSLDSLPIPAPRGLVLVPSRELAQQVRAVAQPLGRSLGLLVRDLEGGHGMRRIRLQLSRQPSADVLVATPGALWKALKSRLISLEQLSFLVLDEADTLLDESFLELVDYILEKSHIAEGPADLEDPFNPKAQLVLVGATFPEGVGQLLNKVASPDAVTTITSSKLHCIMPHVKQTFLRLKGADKVAELVHILKHRDRAERTGPSGTVLVFCNSSSTVNWLGYILDDHKIQHLRLQGQMPALMRVGIFQSFQKSSRDILLCTDIASRGLDSTGVELVVNYDFPPTLQDYIHRAGRVGRVGSEVPGTVISFVTHPWDVSLVQKIELAARRRRSLPGLASSVKEPLPQAT

SEQ ID NO: 5963 - protein, 2944 aa, Homo sapiens
MTLRLLVAALCAGILAEAPRVRAQHRERVTCTRLYAADIVFLLDGSSSIGRSNFREVRSFLEGLVLPFSGAASAQGVRFATVQYSDDPRTEFGLDALGSGGDVIRAIRELSYKGGNTRTGAAILHVADHVFLPQLARPGVPKVCILITDGKSQDLVDTAAQRLKGQGVKLFAVGIKNADPEELKRVASQPTSDFFFFVNDFSILRTLLPLVSRRVCTTAGGVPVTRPPDDSTSAPRDLVLSEPSSQSLRVQWTAASGPVTGYKVQYTPLTGLGQPLPSERQEVNVPAGETSVRLRGLRPLTEYQVTVIALYANSIGEAVSGTARTTALEGPELTIQNTTAHSLLVAWRSVPGATGYRVTWRVLSGGPTQQQELGPGQGSVLLRDLEPGTDYEVTVSTLFGRSVGPATSLMARTDASVEQTLRPVILGPTSILLSWNLVPEARGYRLEWRRETGLEPPQKVVLPSDVTRYQLDGLQPGTEYRLTLYTLLEGHEVATPATVVPTGPELPVSPVTDLQATELPGQRVRVSWSPVPGATQYRIIVRSTQGVERTLVLPGSQTAFDLDDVQAGLSYTVRVSARVGPREGSASVLTVRREPETPLAVPGLRVVVSDATRVRVAWGPVPGASGFRISWSTGSGPESSQTLPPDSTATDITGLQPGTTYQVAVSVLRGREEGPAAVIVARTDPLGPVRTVHVTQASSSSVTITWTRVPGATGYRVSWHSAHGPEKSQLVSGEATVAELDGLEPDTEYTVHVRAHVAGVDGPPASVVVRTAPEPVGRVSRLQILNASSDVLRITWVGVTGATAYRLAWGRSEGGPMRHQILPGNTDSAEIRGLEGGVSYSVRVTALVGDREGTPVSIVVTTPPEAPPALGTLHVVQRGEHSLRLRWEPVPRAQGFLLHWQPEGGQEQSRVLGPELSSYHLDGLEPATQYRVRLSVLGPAGEGPSAEVTARTESPRVPSIELRVVDTSIDSVTLAWTPVSRASSYILSWRPLRGPGQEVPGSPQTLPGISSSQRVTGLEPGVSYIFSLTPVLDGVRGPEASVTQTPVCPRGLADVVFLPHATQDNAHRAEATRRVLERLVLALGPLGPQAVQVGLLSYSHRPSPLFPLNGSHDLGIILQRIRDMPYMDPSGNNLGTAVVTAHRYMLAPDAPGRRQHVPGVMVLLVDEPLRGDIFSPIREAQASGLNVVMLGMAGADPEQLRRLAPGMDSVQTFFAVDDGPSLDQAVSGLATALCQASFTTQPRPEPCPVYCPKGQKGEPGEMGLRGQVGPPGDPGLPGRTGAPGPQGPPGSATAKGERGFPGADGRPGSPGRAGNPGTPGAPGLKGSPGLPGPRGDPGERGPRGPKGEPGAPGQVIGGEGPGLPGRKGDPGPSGPPGPRGPLGDPGPRGPPGLPGTAMKGDKGDRGERGPPGPGEGGIAPGEPGLPGLPGSPGPQGPVGPPGKKGEKGDSEDGAPGLPGQPGSPGEQGPRGPPGAIGPKGDRGFPGPLGEAGEKGERGPPGPAGSRGLPGVAGRPGAKGPEGPPGPTGRQGEKGEPGRPGDPAVVGPAVAGPKGEKGDVGPAGPRGATGVQGERGPPGLVLPGDPGPKGDPGDRGPIGLTGRAGPPGDSGPPGEKGDPGRPGPPGPVGPRGRDGEVGEKGDEGPPGDPGLPGKAGERGLRGAPGVRGPVGEKGDQGDPGEDGRNGSPGSSGPKGDRGEPGPPGPPGRLVDTGPGAREKGEPGDRGQEGPRGPKGDPGLPGAPGERGIEGFRGPPGPQGDPGVRGPAGEKGDRGPPGLDGRSGLDGKPGAAGPSGPNGAAGKAGDPGRDGLPGLRGEQGLPGPSGPPGLPGKPGEDGKPGLNGKNGEPGDPGEDGRKGEKGDSGASGREGRDGPKGERGAPGILGPQGPPGLPGPVGPPGQGFPGVPGGTGPKGDRGETGSKGEQGLPGERGLRGEPGSVPNVDRLLETAGIKASALREIVETWDESSGSFLPVPERRRGPKGDSGEQGPPGKEGPIGFPGERGLKGDRGDPGPQGPPGLALGERGPPGPSGLAGEPGKPGIPGLPGRAGGVGEAGRPGERGERGEKGERGEQGRDGPPGLPGTPGPPGPPGPKVSVDEPGPGLSGEQGPPGLKGAKGEPGSNGDQGPKGDRGVPGIKGDRGEPGPRGQDGNPGLPGERGMAGPEGKPGLQGPRGPPGPVGGHGDPGPPGAPGLAGPAGPQGPSGLKGEPGETGPPGRGLTGPTGAVGLPGPPGPSGLVGPQGSPGLPGQVGETGKPGAPGRDGASGKDGDRGSPGVPGSPGLPGPVGPKGEPGPTGAPGQAVVGLPGAKGEKGAPGGLAGDLVGEPGAKGDRGLPGPRGEKGEAGRAGEPGDPGEDGQKGAPGPKGFKGDPGVGVPGSPGPPGPPGVKGDLGLPGLPGAPGVVGFPGQTGPRGEMGQPGPSGERGLAGPPGREGIPGPLGPPGPPGSVGPPGASGLKGDKGDPGVGLPGPRGERGEPGIRGEDGRPGQEGPRGLTGPPGSRGERGEKGDVGSAGLKGDKGDSAVILGPPGPRGAKGDMGERGPRGLDGDKGPRGDNGDPGDKGSKGEPGDKGSAGLPGLRGLLGPQGQPGAAGIPGDPGSPGKDGVPGIRGEKGDVGFMGPRGLKGERGVKGACGLDGEKGDKGEAGPPGRPGLAGHKGEMGEPGVPGQSGAPGKEGLIGPKGDRGFDGQPGPKGDQGEKGERGTPGIGGFPGPSGNDGSAGPPGPPGSVGPRGPEGLQGQKGERGPPGERVVGAPGVPGAPGERGEQGRPGPAGPRGEKGEAALTEDDIRGFVRQEMSQHCACQGQFIASGSRPLPSYAADTAGSQLHAVPVLRVSHAEEEERVPPEDDEYSEYSEYSVEEYQDPEAPWDSDDPCSLPLDEGSCTAYTLRWYHRAVTGSTEACHPFVYGGCGGNANRFGTREACERRCPPRVVQSQGTGTAQD

SEQ ID NO: 5964 - protein, 262 aa, Homo sapiens
MAWKSSVIMQMGRFLLLVILFLPREMTSSVLTVNGKTENYILDTTPGSQASLICAVQNHTREEELLWYREEGRVDLKSGNKINSSSVCVSSISENDNGISFTCRLGRDQSVSVSVVLNVTFPPLLSGNDFQTVEEGSNVKLVCNVKANPQAQMMWYKNSSLLDLEKSRHQIQQTSESFQLSITKVEKPDNGTYSCIAKSSLKTESLDFHLIVKDKTVGVPIEPIIAACVVIFLTLCFGLIARRKKIMKLCMKDKDPHSETAL

SEQ ID NO: 5965 - protein, 616 aa, Homo sapiens
MSSLAVRDPAMDRSLRSVFVGNIPYEATEEQLKDIFSEVGSVVSFRLVYDRETGKPKGYGFCEYQDQETALSAMRNLNGREFSGRALRVDNAASEKNKEELKSLGPAAPIIDSPYGDPIDPEDAPESITRAVASLPPEQMFELMKQMKLCVQNSHQEARNMLLQNPQLAYALLQAQVVMRIMDPEIALKILHRKIHVTPLIPGKSQSVSVSGPGPGPGPGLCPGPNVLLNQQNPPAPQPQHLARRPVKDIPPLMQTPIQGGIPAPGPIPAAVPGAGPGSLTPGGAMQPQLGMPGVGPVPLERGQVQMSDPRAPIPRGPVTPGGLPPRGLLGDAPNDPRGGTLLSVTGEVEPRGYLGPPHQGPPMHHASGHDTRGPSSHEMRGGPLGDPRLLIGEPRGPMIDQRGLPMDGRGGRDSRAMETRAMETEVLETRVMERRGMETCAMETRGMEARGMDARGLEMRGPVPSSRGPMTGGIQGPGPINIGAGGPPQGPRQVPGISGVGNPGAGMQGTGIQGTGMQGAGIQGGGMQGAGIQGVSIQGGGIQGGGIQGASKQGGSQPSSFSPGQSQVTPQDQEKAALIMQVLQLTADQIAMLPPEQRQSILILKEQIQKSTGAS

SEQ ID NO: 5966 - protein, 77 aa, Homo sapiens
MPKCPKCNKEVYFAERVTSLGKDWHRPCLKCEKCGKTLTSGGHAEHEGKPYCNHPCYAAMFGPKGFGRGGAESHTFK

SEQ ID NO: 5967 - protein, 529 aa, Homo sapiens [sequence omitted]

SEQ ID NO: 5968 - protein, 684 aa, Homo sapiens
MACLGFLLPVGFLLLISTVAGGKYGVAHVVSENWSKDYCILFSSDYITLPRDLHHAPLLPLYDGTKAPWCPGEDSPHQAQLRSPSQRPLRQTTAMVMRGNCSFHTKGWLAQGQGAHGLLIVSRVSDQQCSDTTLAPQDPRQPLADLTIPVAMLHYADMLDILSHTRGEAVVRVAMYAPPEPIIDYNMLVIFILAVGTVAAGGYWAGLTEANRLQRRRARRGGGSGGHHQLQEAAAAEGAQKEDNEDIPVDFTPAMTGVVVTLSCSLMLLLYFFYDHFVYVTIGIFGLGAGIGLYSCLSPLVCRLSLRQYQRPPHSLWASLPLPLLLLASLCATVIIFWVAYRNEDRWAWLLQDTLGISYCLFVLHRVRLPTLKNCSSFLLALLAFDVFFVFVTPFFTKTGESIMAQVALGPAESSSHERLPMVLKVPRLRVSALTLCSQPFSILGFGDIVVPGFLVAYCCRFDVQVCSRQIYFVACTVAYAVGLLVTFMAMVLMQMGQPALLYLVSSTLLTSLAVAACRQELSLFWTGQGRAKMCGLGCAPSAGSRQKQEGAADAHTASTLERGTSRGAGDLDSNPGEDTTEIVTISENEATNPEDRSDSSEGWSDAHLDPNELPFIPPGASEELMPLMPMAMLIPLMPLMPPPSELGHVHAQAQAHETGLPWAGLHKRKGLKVRKSMSTQAPL

SEQ ID NO: 5969 - protein, 402 aa, Homo sapiens
MMVALRGASALLVLFLAAFLPPPQCTQDPAMVHYIYQRFRVLEQGLEKCTQATRAYIQEFQEFSKNISVMLGRCQTYTSEYKSAVGNLALRVERAQREIDYIQYLREADECIESEDKTLAEMLLQEAEEEKKIRTLLNASCDNMLMGIKSLKIVKKMMDTHGSWMKDAVYNSPKVYLLIGSRNNTVWEFANIRAFMEDNTKPAPRKQILTLSWQGTGQVIYKGFLFFHNQATSNEIIKYNLQKRTVEDRMLLPGGVGRALVYQHSPSTYIDLAVDEHGLWAIHSGPGTHSHLVLTKIEPGTLGVEHSWDTPCRSQDAEASFLLCGVLYVVYSTGGQGPHRITCIYDPLGTISEEDLPNLFFPKRPRSHSMIHYNPRDKQLYAWNEGNQIIYKLQTKRKLPLK

SEQ ID NO: 5970 - protein, 342 aa, Homo sapiens
MAQVLIVGAGMTGSLCAALLRRQTSGPLYLAVWDKAEDSGGRMTTACSPHNPQCTADLGAQYITCTPHYAKKHQRFYDELLAYGVLRPLSSPIEGMVMKEGDCNFVAPQGISSIIKHYLKESGAEVYFRHRVTQINLRDDKWEVSKQTGSPEQFDLIVLTMPVPEILQLQGDITTLISECQRQQLEAVSYSSRYALGLFYEAGTKIDVPWAGQYITSNPCIRFVSIDNKKRNIESSEIGPSLVIHTTVPFGVTYLEHSIEDVQELVFQQLENILPGLPQPIATKCQKWRHSQVTNAAANCPGQMTLHHKPFLACGGDGFTQSNFDGCITSALCVLEALKNYI

SEQ ID NO: 5971 - protein, 1464 aa, Homo sapiens [sequence omitted]

SEQ ID NO: 5972 - protein, 586 aa, Homo sapiens
MGPLTFRDVKIEFSLEEWQCLDTAQRNLYRDVMLENYRNLVFLGIAVSKPDLITWLEQGKEPWNLKRHEMVDKTPVMCSHFAQDVWPEHSIKDSFQKVILRTYGKYGHENLQLRKDHKSVDACKVYKGGYNGLNQCLTTTDSKIFQCDKYVKVFHKFPNVNRNKIRHTGKKPFKCKNRGKSFCMLSQLTQHKKIHTREYSYKCEECGKAFNWSSTLTKHKIIHTGEKPYKCEECGKAFNRSSNLTKHKIIHTGEKPYKCEECGKAFNRSSTLTKHKRIHTEEKPYKCEECGKAFNQFSILNKHKRIHMEDKPYKCEECGKAFRVFSILKKHKIIHTGEKPYKCEECGKAFNQFSNLTKHKIIHTGEKPYKCDECGKAFNQSSTLTKHKRIHTGEKPYKCEECGKAFKQSSTLTEHKIIHTGEKPYKCEKCGKAFSWSSAFTKHKRNHMEDKPYKCEECGKAFSVFSTLTKHKIIHTREKPYKCEECGKAFNQSSIFTKHKIIHTEGKSYKCEKCGNAFNQSSNLTARKIIYTGEKPYKYEECDKAFNKFSTLITHQIIYTGEKPCKHECGRAFNKSSNYTKEKLQT

SEQ ID NO: 5973 - protein, 913 aa, Homo sapiens
MSRFFTTGSDSESESSLSGEELVTKPVGGNYGKQPLLLSEDEEDTKRVVRSAKDKRFEELTNLIRTIRNAMKIRDVTKCLEEFELLGKAYGKAKSIVDKEGVPRFYIRILADLEDYLNELWEDKEGKKKMNKNNAKALSTLRQKIRKYNRDFESHITSYKQNPEQSADEDAEKNEEDSEGSSDEDEDEDGVSAATFLKKKSEAPSGESRKFLKKMDDEDEDSEDSEDDEDWDTGSTSSDSDSEEEEGKQTALASRFLKKAPTTDEDKKAAEKKREDKAKKKHDRKSKRLDEEEEDNEGGEWERVRGGVPLVKEKPKMFAKGTEITHAVVIKKLNEILQARGKKGTDRAAQIELLQLLVQIAAENNLGEGVIVKIKFNIIASLYDYNPNLATYMKPEMWGKCLDCINELMDILFANPNIFVGENILEESENLHNADQPLRVRGCILTLVERMDEEFTKIMQNTDPHSQEYVEHLKDEAQVCAIIERVQRYLEEKGTTEEVCRIYLLRILHTYYKFDYKAHQRQLTPPEGSSKSEQDQAENEGEDSAVLMERLCKYIYAKDRTDRIRTCAILCHIYHHALHSRWYQARDLMLMSHLQDNIQHADPPVQILYNRTMVQLGICAFRQGLTKDAHNALLDIQSSGRAKELLGQGLLLRSLQERNQEQEKVERRRQVPFHLHINLELLECVYLVSAMLLEIPYMAAHESDARRRMISKQFHHQLRVGERQPLLGPPESMREHVVAASKAMKMGDWKTCHSFIINEKMNGKVWDLFPEADKVRTMLVRKIQEESLRTYLFTYSSVYDSISMETLSDMFELDLPTVHSIISKMIINEELMASLDQPTQTVVMHRTEPTAQQNLALQLAEKLGSLVENNERVFDHKQGTYGGYFRDQKDGYRKNEGYMRRGGYRQQQSQTAY

SEQ ID NO: 5974 - protein, 273 aa, Homo sapiens
MRLPGVPLARPALLLLLPLLAPLLGTGAPAELRVRVRLPDGQVTEESLQADSDADSISLELRKPDGTLVSFTADFKKDVKVFRALILGELEKGQSQFQALCFVTQLQHNEIIPSEAMAKLRQKNPRAVRQAEEVRGLEHLHMDVAVNFSQGALLSPHLHNVCAEAVDAIYTRQEDVRFWLEQGVDSSVFEALPKASEQAELPRCRQVGDHGKPCVCRYGLSLAWYPCMLKYCHSRDRPTPYKCGIRSCQKSYSFDFYVPQRQLCLWDEDPYPG

SEQ ID NO: 5975 - protein, 450 aa, Homo sapiens
MLVTAYLAFVGLLASCLGLELSRCRAKPPGRACSNPSFLRFQLDFYQVYFLALAADWLQAPYLYKLYQHYYFLEGQIAILYVCGLASTVLFGLVASSLVDWLGRKNSCVLFSLTYSLCCLTKLSQDYFVLLVGRALGGLSTALLFSAFEAWYIHEHVERHDFPAEWIPATFARAAFWNHVLAVVAGVAAEAVASWIGLGPVAPFVAAIPLLALAGALALRNWGENYDRQRAFSRTCAGGLRCLLSDRRVLLLGTIQALFESVIFIFVFLWTPVLDPHGAPLGIIFSSFMAASLLGSSLYRIATSKRYHLQPMHLLSLAVLIVVFSLFMLTFSTSPGQESPVESFIAFLLIELACGLYFPSMSFLRRKVIPETEQAGVLNWFRVPLHSLACLGLLVLHDSDRKTGTRNMFSICSAVMVMALLAVVGLFTVVRHDAELRVPSPTEEPYAPEL

SEQ ID NO: 5976 - protein, 455 aa, Homo sapiens
MGWGGGGGCTPRPPIHQQPPERRVVTVVFLGLLLDLLAFTLLLPLLPGLLESHGRAHDPLYGSWQGGVDWFATAIGMPVEKRYNSVLFGGLIGSAFSVLQFLCAPLTGATSDCLGRRPVMLLCLMGVATSYAVWATSRSFAAFLASRLIGGISKGNVSLSTAIVADLGSPLARSQGMAVIGVAFSLGFTLGPMLGASLPLEMAPWFALLFAASDLLFIFCFLPETLPLEKRAPSIALGFRDAADLLSPLALLRFSAVARGQDPPSGDRLSSLRRLGLVYFLYLFLFSGLEYTLSFLTHQRFQFSSLQQGKMFFLIGLTMATIQGAYARRIHPGGEVAAVKRALLLLVPAFLLIGWGRSLPVLGLGLLLYSFAAAVVVPCLSSVVAGYGSPGQKGTVMGTLRSLGALARAAGPLVAASVYWLAGAQACFTTWSGLFLLPFFLLQKLSYPAQTLKAE

SEQ ID NO: 5977 - protein, 458 aa, Homo sapiens
MRGPAVLLTVALATLLAPGAGAPVQSQGSQNKLLLVSFDGFRWNYDQDVDTPNLDAMARDGVKARYMTPAFVTMTSPCHFTLVTGKYIENHGVVHNMYYNTTSKVKLPYHATLGIQRWWDNGSVPIWITAQRQGLRAGSFFYPGGNVTYQGVAVTRSRKEGIAHNYKNETEWRANIDTVMAWFTEEDLDLVTLYFGEPDSTGHRYGPESPERREMVRQVDRTVGYLRESIARNHLTDRLNLIITSDHGMTTVDKRAGDLVEFHKFPNFTFRDIEFELLDYGPNGMLLPKEGRLEKVYDALKDAHPKLHVYKKEAFPEAFHYANNPRVTPLLMYSDLGYVIHGRINVQFNNGEHGFDNKDMDMKTIFRAVGPSFRAGLEVEPFESVHVYELMCRLLGIVPEANDGHLATLLPMLHTESALPPDGRPTLLPKGRSALPPSSRPLLVMGLLGTVILLSEVA

SEQ ID NO: 5978 - protein, 353 aa, Homo sapiens
MPWPLLLLLAVSGAQTTRPCFPGCQCEVETFGLFDSFSLTRVDCSGLGPHIMPVPIPLDTAHLDLSSNRLEMVNESVLAGPGYTTLAGLDLSHNLLTSISPTAFSRLRYLESLDLSHNGLTALPAESFTSSPLSDVNLSHNQLREVSVSAFTTHSQGRALHVDLSHNLIHRLVPHPTRAGLPAPTIQSLNLAWNRLHAVPNLRDLPLRYLSLDGNPLAVIGPGAFAGLGGLTHLSLASLQRLPELAPSGFRELPGLQVLDLSGNPKLNWAGAEVFSGLSSLQELDLSGTNLVPLPEALLLHLPALQSVSVGQDVRCRRLVREGTYPRRPGSSPKVALHCVDTRDSAARGPTIL

SEQ ID NO: 5979 - protein, 638 aa, Homo sapiens
MSALAGEDVWRCPGCGDHIAPSQIWYRTVNETWHGSCFRCSECQDSLTNWYYEKDGKLYCPKDYWGKFGEFCHGCSLLMTGPFMVAGEFKYHPECFACMSCKVIIEDGDAYALVQHATLYCGKCHNEVVLAPMFERLSTESVQEQLPYSVTLISMPATTEGRRGFSVSVESACSNYATTVQVKEVNRMHISPNNRNAIHPGDRILEINGTPVRTLRVEEVEDAISQTSQTLQLLIEHDPVSQRLDQLRLEARLAPHMQNAGHPHALSTLDTKENLEGTLRRRSLRRSNSISKSPGPSSPKEPLLFSRDISRSESLRCSSSYSQQIFRPCDLIHGEVLGKGFFGQAIKVTHKATGKVMVMKELIRCDEETQKTFLTEVKVMRSLDHPNVLKFIGVLYKDKKLNLLTEYIEGGTLKDFLRSMDPFPWQQKVRFAKGIASGMAYLHSMCIIHRDLNSHNCLIKLDKTVVVADFGLSRLIVEERKRAPMEKATTKKRTLRKNDRKKRYTVVGNPYWMAPEMLNGKSYDETVDIFSFGIVLCEIIGQVYADPDCLPRTLDFGLNVKLFWEKFVPTDCPPAFFPLAAICCRLEPESRPAFSKLEDSFEALSLYLGELGIPLPAELEELDHTVSMQYGLTRDSPP

SEQ ID NO: 5980 - protein, 322 aa, Homo sapiens
MADRDSGSEQGGAALGSGGSLGHPGSGSGSGGGGGGGGGGGGSGGGGGGAPGGLQHETQELASKRVDIQNKRFYLDVKQNAKGRFLKIAEVGAGGNKSRLTLSMSVAVEFRDYLGDFIEHYAQLGPSQPPDLAQAQDEPRRALKSEFLVRENRKYYMDLKENQRGRFLRIRQTVNRGPGLGSTQGQTIALPAQGLIEFRDALAKLIDDYGVEEEPAELPEGTSLTVDNKRFFFDVGSNKYGVFMRVSEVKPTYRNSITVPYKVWAKFGHTFCKYSEEMKKIQEKQREKRAACEQLHQQQQQQQEETAAATLLLQGEEEGEED

SEQ ID NO: 5981 - protein, 276 aa, Homo sapiens
MCIIFFKFDPRPVSKNAYRLILAANRDEFYSRPSKLADFWGNNNEILSGLDMEEGKEGGTWLGISTRGKLAALTNYLQPQLDWQARGRGELVTHFLTTDVDSLSYLKKVSMEGHLYNGFNLIAADLSTAKGDVICYYGNRGEPDPIVLTPGTYGLSNALLETPWRKLCFGKQLFLEAVERSQALPKDVLIASLLDVLNNEEAQLPDPAIEDQGGEYVQPMLSKYAAVCVRCPGYGTRTNTIILVDADGHVTFTERSMMDKDLSHWETRTYEFTLQS

SEQ ID NO: 5982 - protein, 277 aa, Homo sapiens
MNGFASLLRRNQFILLVLFLLQIQSLGLDIDSRPTAEVCATHTISPGPKGDDGEKGDPGEEGKHGKVGRMGPKGIKGELGDMGDQGNIGKTGPIGKKGDKGEKGLLGIPGEKGKAGTVCDCGRYRKFVGQLDISIARLKTSMKFVKNVIAGIRETEEKFYYIVQEEKNYRESLTHCRIRGGMLAMPKDEAANTLIADYVAKSGFFRVFIGVNDLEREGQYMFTDNTPLQNYSNWNEGEPSDPYGHEDCVEMLSSGRWNDTECHLTMYFVCEFIKKKK

SEQ ID NO: 5983 - protein, 842 aa, Homo sapiens
MAVRPGLWPALLGIVLAAWLRGSGAQQSATVANPVPGANPDLLPHFLVEPEDVYIVKNKPVLLVCKAVPATQIFFKCNGEWVRQVDHVIERSTDGSSGLPTMEVRINVSRQQVEKVFGLEEYWCQCVAWSSSGTTKSQKAYIRIAYLRKNFEQEPLAKEVSLEQGIVLPCRPPEGIPPAEVEWLRNEDLVDPSLDPNVYITREHSLVVRQARLADTANYTCVAKNIVARRRSASAAVIVYVDGSWSPWSKWSACGLDCTHWRSRECSDPAPRNGGEECQGTDLDTRNCTSDLCVHTASGPEDVALYVGLIAVAVCLVLLLLVLILVYCRKKEGLDSDVADSSILTSGFQPVSIKPSKADNPHLLTIQPDLSTTTTTYQGSLCPRQDGPSPKFQLTNGHLLSPLGGGRHTLHHSSPTSEAEEFVSRLSTQNYFRSLPRGTSNMTYGTFNFLGGRLMIPNTGISLLIPPDAIPRGKIYEIYLTLHKPEDVRLPLAGCQTLLSPIVSCGPPGVLLTRPVILAMDHCGEPSPDSWSLRLKKQSCEGSWEDVLHLGEEAPSHLYYCQLEASACYVFTEQLGRFALVGEALSVAAAKRLKLLLFAPVACTSLEYNIRVYCLHDTHDALKEVVQLEKQLGGQLIQEPRVLHFKDSYHNLRLSIHDVPSSLWKSKLLVSYQEIPFYHIWNGTQRYLHCTFTLERVSPSTSDLACKLWVWQVEGDGQSFSINFNITKDTRFAELLALESEAGVPALVGPSAFKIPFLIRQKIISSLDPPCRRGADWRTLAQKLHLDSHLSFFASKPSPTAMILNLWEARHFPNGNLSQLAAAVAGLGQPDAGLFTVSEAEC

SEQ ID NO: 5984 - protein, 578 aa, Homo sapiens
MAEESRKPSAPSPPDQTPEEDLVIVKVEEDHGWDQESSLHESNPLGQEVFRLRFRQLRYQETLGPREALIQLRALCHQWLRPDLNTKEQILELLVLEQFLTILPEELQTLVKEHQLENGEEVVTLLEDLERQIDILGRPVSARVHGHRVLWEEVVHSASAPEPPNTQLQSEATQHKSPVPQESQERAMSTSQSPTRSQKGSSGDQEMTATLLTAGFQTLEKIEDMAVSLIREEWLLDPSQKDLCRDNRPENFRNMFSLGGETRSENRELASKQVISTGIQPHGETAAKCNGDVIRGLEHEEARDLLGRLERQRGNPTQERRHKCDECGKSFAQSSGLVRHWRIHTGEKPYQCNVCGKAFSYRSALLSHQDIHNKVKRYHCKECGKAFSQNTGLILHQRIHTGEKPYQCNQCGKAFSQSAGLILHQRIHSGERPYECNECGKAFSHSSHLIGHQRIHTGEKPYECDECGKTFRRSSHLIGHQRSHTGEKPYKCNECGRAFSQKSGLIEHQRIHTGERPYKCKECGKAFNGNTGLIQHLRIHTGEKPYQCNECGKAFIQRSSLIRHQRIHSGEKSESISV

SEQ ID NO: 5985 - protein, 479 aa, Homo sapiens
MVRIQRRKLLASCLCVTATVFLLVTLQVMVELGKFERKEFKSSSLQDGHTKMEEAPTHLNSFLKKEGLTFNRKRKWELDSYPIMLWWSPLTGETGRLGQCGADACFFTINRTYLHHHMTKAFLFYGTDFNIDSLPLPRKAHHDWAVFHEESPKNNYKLFHKPVITLFNYTATFSRHSHLPLTTQYLESIEVLKSLRYLVPLQSKNKLRKRLAPLVYVQSDCDPPSDRDSYVRELMTYIEVDSYGECLRNKDLPQQLKNPASMDADGFYRIIAQYKFILAFENAVCDDYITEKFWRPLKLGVVPVYYGSPSITDWLPSNKSAILVSEFSHPRELASYIRRLDSDDRLYEAYVEWKLKGEISNQRLLTALRERKWGVQDVNQDNYIDAFECMVCTKVWANIRLQEKGLPPKRWEAEDTHLSCPEPTVFAFSPLRTPPLSSLREMWISSFEQSKKEAQALRWLVDRNQNFSSQEFWGLVFKD

SEQ ID NO: 5986 - protein, 125 aa, Homo sapiens
MARSATLAAAALALCLLLAPPGLAWYKPAAGHSSYSVGRAAGLLSGLRRSPYARRSQPYRGAEPPGGAGASPELQLHPRLRSLAVCVQDVAPNLQRCERLPDGRGTYQCKANVFLSLRAADCLAA

SEQ ID NO: 5987 - protein, 814 aa, Homo sapiens
MAVQRAASPRRPPAPLWPRLLLPLLLLLLPAPSEGLGHSAELAFAVEPSDDVAVPGQPIVLDCRVEGTPPVRITWRKNGVELPESTHSTLLANGSLMIRHFRLEPGGSPSDEGDYECVAQNRFGLVVSRKARIQAATMSDFHVHPQATVGEEGGVARFQCQIHGLPKPLITWEKNRVPIDTDNERYTLLPKGVLQITGLRAEDGGIFHCVASNIASIRISHGARLTVSGSGSGAYKEPAILVGPENLTLTVHQTAVLECVATGNPRPIVSWSRLDGRPIGVEGIQVLGTGNLIISDVTVQHSGVYVCAANRPGTRVRRTAQGRLVVQAPAEFVQHPQSISRPAGTTAMFTCQAQGEPPPHVTWLKNGQVLGPGGHVRLKNNNSTLTISGIGPEDEAIYQCVAENSAGSSQASARLTVLWAEGLPGPPRNVRAVSVSSTEVRVSWSEPLANTKEIIGYVLHIRKAADPPELEYQEAVSKSTFQHLVSDLEPSTAYSFYIKAYTPRGASSASVPTLASTLGEAPAPPPLSVRVLGSSSLQLLWEPWPRLAQHEGGFKLFYRPASKTSFTGPILLPGTVSSYNLSQLDPTAVYEVKLLAYNQHGDGNATVRFVSLRGASERTALSPPCDCRKEEAANQTSTTGIVIGIHIGVTCIIFCVLFLLFGQRGRVLLCKDVENQLSPPQGPRSQRDPGILALNGARRGQRGQLGRDEKRVDMKELEQLFPPASAAGQPDPRPTQDPAAPAPCEETQLSVLPLQGCGLMEGKTTEAKTTEATAPCAGLAAAPPPPDGGPGLLSEGQASRPAAARVTQPAHSEQ

SEQ ID NO: 5988 - protein, 604 aa, Homo sapiens
MAGDVEGFCSSIHDTSVSAGFRALYEEGLLLDVTLVIEDHQFQAHKALLATQSDYFRIMFTADMRERDQDKIHLKGLTATGFSHVLQFMYYGTIELSMNTVHEILQAAMYVQLIEVVKFCCSFLLAKICLENCAEIMRLLDDFGVNIEGVREKLDTFLLDNFVPLMSRPDFLSYLSFEKLMSYLDNDHLSRFPEIELYEAVQSWLRHDRRRWRHTDTIIQNIRFCLMTPTSVFEKVKTSEFYRYSRQLRYEVDQALNYFQNVHQQPLLDMKSSRIRSAKPQTTVFRGMIGHSMVNSKILLLKKPRVWWELEGPQVPLRPDCLAIVNNFVFLLGGEELGPDGEFHASSKVFRYDPRQNSWLQMADMSVPRSEFAVGVIGKFIYAVAGRTRDETFYSTERYDITNDKWEFVDPYPVNKYGHEGTVLNNKLFITGGITSSSTSKQVCVFDPSKEGTIEQRTRRTQVVTNCWENKSKMNYARCFHKMISYNGKLYVFGGVCVILRASFESQGCPSTEVYNPETDQWTILASMPIGRSGHGVTVLDKQIMVLGGLCYNGHYSDSILTFDPDENKWKEDEYPRMPCKLDGLQVCNLHFPDYVLDEVRRCN

SEQ ID NO: 5989 - protein, 766 aa, Homo sapiens
MGRRRLLVWLCAVAALLSGAQARGTPLLARPAPPGASRYSLYTTGWRPRLRPGPHKALCAYVVHRNVTCILQEGAESYVKAEYRQCRWGPKCPGTVTYRTVLRPKYKVGYKTVTDLAWRCCPGFTGKRCPEHLTDHGAASPQLEPEPQIPSGQLDPGPRPPSYSRAAPSPHGRKGPGLFGERLERLEGDVQRLAQTYGTLSGLVASHEDPNRMTGGPRAPAVPVGFGVIPEGLVGPGDRARGPLTPPLDEILSKVTEVSNTLQTKVQLLDKVHGLALGHEAHLQRLREAPPSPLTSLALLEEYVDRRLHRLWGSLLDGFEQKLQGVQSECDLRVQEVRRQCEEGQAASRRLHQSLDGRELALRQELSQLGSQLQGLSVSGRGSCCGQLALINARMDGLERALQAVTETQRGPGAPAGDELTRLSAAMLEGGVDGLLEGLETLNGTEGGARGCCLRLDMGGWGVGGFGTMLEERVQSLEERLATLAGELSHDSASPGRSARPLVQTELAVLEQRLVSLETSCTPSTTSAILDSLVAEVKAWQSRSEALLRQVASHAALLQQLNGTVAEVQGQLAEGTGSSLQGEITLLKVNLNSVSKSLTGLSDSVSQYSDAFLAANTSLDERERKVEAEVQAIQEQVSSQGSRLQAGHRQVLNLRGELEQLKAGVAKVASGLSRCQDTAQKLQHTVGHFDQRVAQVEGACRRLGLLAAGLDSLPTEPLRPREGLWSHVDQLNRTLAQHTQDIARLRDDLLDCQAQLAEQVRPGQAN

SEQ ID NO: 5990 - protein, 1009 aa, Homo sapiens
MSGVSEPLSRVKLGTLRRPEGPAEPMVVVPVDVEKEDVRILKVCFYSNSFNPGKNFKLVKCTVQTEIREIITSILLSGRIGPNIRLAECYGLRLKHMKSDEIHWLHPQMTVGEVQDKYECLHVEAEWRYDLQIRYLPEDFMESLKEDRTTLLYFYQQLRNDYMQRYASKVSEGMALQLGCLELRRFFKDMPHNALDKKSNFELLEKEVGLDLFFPKQMQENLKPKQFRKMIQQTFQQYASLREEECVMKFFNTLAGFANIDQETYRCELIQGWNITVDLVIGPKGIRQLTSQDAKPTCLAEFKQIRSIRCLPLEEGQAVLQLGIEGAPQALSIKTSSLAEAENMADLIDGYCRLQGEHQGSLIIHPRKDGEKRNSLPQIPMLNLEARRSHLSESCSIESDIYAEIPDETLRRPGGPQYGIAREDVVLNRILGEGFFGEVYEGVYTNHKGEKINVAVKTCKKDCTLDNKEKFMSEAVIMKNLDHPHIVKLIGIIEEEPTWIIMELYPYGELGHYLERNKNSLKVLTLVLYSLQICKAMAYLESINCVHRDIAVRNILVASPECVKLGDFGLSRYIEDEDYYKASVTRLPIKWMSPESINFRRFTTASDVWMFAVCMWEILSFGKQPFFWLENKDVIGVLEKGDRLPKPDLCPPVLYTLMTRCWDYDPSDRPRFTELVCSLSDVYQMEKDIAMEQERNARYRTPKILEPTAFQEPPPKPSRPKYRPPPQTNLLAPKLQFQVPEGLCASSPTLTSPMEYPSPVNSLHTPPLHRHNVFKRHSMREEDFIQPSSREEAQQLWEAEKVKMRQILDKQQKQMVEDYQWLRQEEKSLDPMVYMNDKSPLTPEKEVGYLEFTGPPQKPPRLGAQSIQPTANLDRTDDLVYLNVMELVRAVLELKNELCQLPPEGYVVVVKNVGLTLRKLIGSVDDLLPSLPSSSRTEIEGTQKLLNKDLAELINKMRLAQQNAVTSLSEECKRQMLTASHTLAVDAKNLLDAVDQAKVLANLAHPPAE

SEQ ID NO: 5991 - protein, 139 aa, Homo sapiens
MTHSLVCPETVSRVSSVLNRNTRQFGKKHLFDQDEETCWNSDQGPSQWVTLEFPQLIRVSQLQIQFQGGFSSRRGCLEGSQGTQALHKIVDFYPEDNNSLQTFPIPAAEVDRLKVTFEDATDFFGRVVIYHLRVLGEKV

SEQ ID NO: 5992 - protein, 270 aa, Homo sapiens
MDSLEWNWALVYELSGEHHDEEWSVKTYQEVAQKFVETHPEFIGIKIIYSDHRSKDVAVIAESIRMAMGLRIKFPTVVAGFDLVGHEDTGHSLHDYKEALMIPAKDGVKLPYFFHAGETDWQGTSIDRNILDALMLNTTRIGHGFALSKHPAVRTYSWKKDIPIEVCPISNQVLKLVSDLRNHPVATLMATGHPMVISSDDPAMFGAKGLSYDFYEVFMGIGGMKADLRTLKQLAMNSIKYSTLLESEKNTFMEIWKKRWDKFIADVATK

SEQ ID NO: 5993 - protein, 660 aa, Homo sapiens
MGLQTTKWPSHGAFFLKSWLIISLGLYSQVSKLLACPSVCRCDRNFVYCNERSLTSVPLGIPEGVTVLYLHNNQINNAGFPAELHNVQSVHTVYLYGNQLDEFPMNLPKNVRVLHLQENNIQTISRAALAQLLKLEELHLDDNSISTVGVEDGAFREAISLKLLFLSKNHLSSVPVGLPVDLQELRVDENRIAVISDMAFQNLTSLERLIVDGNLLTNKGIAEGTFSHLTKLKEFSIVRNSLSHPPPDLPGTHLIRLYLQDNQINHIPLTAFSNLRKLERLDISNNQLRMLTQGVFDNLSNLKQLTARNNPWFCDCSIKWVTEWLKYIPSSLNVRGFMCQGPEQVRGMAVRELNMNLLSCPTTTPGLPLFTPAPSTASPTTQPPTLSIPNPSRSYTPPTPTTSKLPTIPDWDGRERVTPPISERIQLSIHFVNDTSIQVSWLSLFTVMAYKLTWVKMGHSLVGGIVQERIVSGEKQHLSLVNLEPRSTYRICLVPLDAFNYRAVEDTICSEATTHASYLNNGSNTASSHEQTTSHSMGSPFLLAGLIGGAVIFVLVVLLSVFCWHMHKKGRYTSQKWKYNRGRRKDDYCEAGTKKDNSILEMTETSFQIVSLNNDQLLKGDFRLQPIYTPNGGINYTDCHIPNNMRYCNSSVPDLEHCHT

SEQ ID NO: 5994 - protein, 2139 aa, Homo sapiens
MAGASRHPTGTPRQLLVALACLLLSRPALQGRASSLGTEPDPALYLPARGALDGTRPDGPSVLIANPGLRVPLGRSLWLDPLRDLVIGVQPGDRCEVTVLDALPRLKGALSPRRFPCTFGPRQVQYTHFGSHSPGRARVLLQLRYDAPTHTLVLPFTLAVDLVFSQLELVTRNRPLVVEKLRSWSRAIDRRVLDFASLKSGATATRRCRLTPLPHEDGPLPKYGRLVDAVGAPLPRGKGVDCEAFLRAGVRYQHTATSSPNRDYVPMMVELLGPEGQDAGSAGVLVREHFQLLVRIRGGAENTPPRPSFMATMMMEVDPLVLTALTPDALAAEDVESDPGDLVFNILNAPTHPPGHPGQQGYVVSTDDPLGLPVSFFTQQELRELKIAYQPPAENSHGERLFQLELEVVDGDGAASDPFAFMVTVKSMNTLVPVASHNRGLVLFEGQSRPLSSTHSIPISDKDNLEEVKMAAVRGLRHGQLVVFGAPAGCKYFTPADLAAGRVVYQHDGSNTYSDNIIFRMEDGHHQVDFLFPLTILPVDDEPPMVNTNTGLSLTEGQVVQISPFVLSATDIDSEDSTIHFVLENQPLKGNEEEPQWELAPGSSHSGHYLGDLLLQQAELPLSTEDEDWHYMEKEGLYEKVVTEWLQRDIMEGRLFYRHLGPHSPQSVMVQLAFHVQDDHDPPNLSKQHIFTIKVQPVDILSPQLYPGTTLEMTVQEYQLTHFQKNFLRYIDQDSDDQNLWYTLLTLPTDTDGNHQVRAGEIVLTDSPDTLIMHFTQAQVNQHKVAYQPPQKLGIAPRVVQFTYQVEDAAGNSVPGTFTLFLQPVDNQPPEVTNRGFAILEGGSFNLSSNELHVTDPDTDIDQIVFILVRGPQHGHLQYFKRCMVPGESFMQADVINGSVSYQHGRDQTTTSDTFHLEVSDGVHHIPITIPISVHPNVANRSPRISLRSSSLLDVSIDVLENKATEITMGVIHGKRKDVGDLMLSFIVKDSPKLGTILVNGLPTERFTQEDLINGRVAYAHTAGEVGFQKQHDAFSLILSKDSYQWVVGNSIIEKVQVQVTVLPVDNVGPKVFVGESFIVYEGEKNSLTLQHLHVEDVDTHQDELLCTVTSQPASGYLEKIASAPGSKMSQSGSPISAFSLRDIQVRHINYVQSIHKGVEPQEDQFTFYCSDGINFSPNVFFPIIILPTNDEQPKLFAHEFKVLEGMSLVIDTQLLNGADADLPPNELHFQLTALPRHGRIIQQLATGSQPIHSFTLKEIQEASTIVYEHDDSETKEDSFEVWLSDGKHTTHRKVPIVVTLVDDETPHLTVNNGLKVEKGHSEIITNRILKATDLDSDDKSLSFVLHSGPQQGLLQRLRKPRGEVRNNLTLGMNFTQDEINRGLICYIHTGQEGIVDIIKFDVTDGVNTLTDHYFYVTIGNLDSVFPEVISKRITLIEGARVTLTNNLLTNSDINSSDEHHFSITRAPSLGHLESSDYAGEPIASFTQLQLASNKISYVHTSNDEKKMDSFEFQVIGELYPVFRTFRIFITDVDNKKPILTIHRLTLQKEDSQLITLLELTVEDSDTPDDLILFTITQVPMHGKILYNGSRPVTTFTKQDLNKNLISYKHDGSETTEDSFSLTVTDGTHTDFYVLPDTALATHKPQVMRVQIRSLDNRLPQITTNRGAPALKRLHTGHMGFLITSKSLKAEDQDSPHRLLKYKVTRGPEHGFIIKTGLGNQSTRVFTQADIDEMKISYVLNEGSNASKDIFYFSVEDNGGNKLTNQPFHLNWAWICLEKEYYIVDEDSTFLEVTLTRRGYLGETSFISIGTKDETAKKDKDFKWKTNKQIQFNPGQTTATWRVRIIPDNEYETSETFQIILSEPLMAVLEFPEMATVEIVDPGDESTVYIPEAEYKIEEDIGELLIPVRRSGDASQELIVICSTRQGSATGTISSTVLFSDYISRPEDHTSILHFDKNETQKTCQVLIIDDSLYEEEESFSVSLRLPVGGQLGARFPTTKVTILADRYDEPVLHFGDAEYHVNESARYVEVCVWRRGTDLSQPSSIAVRSRKSEQESAEAGTDYVGISRNLDFAPGVRMQTFQVTILDDLGQPTLEGPEKFELLLQMPMGAVLGEPNKTTIFIEDTITDCKQSACSSFD

SEQ ID NO: 5995 - protein, 63 aa, Homo sapiens
MAAATLTSKLYSLLFRRTSTFALTIIVGVMFFERAFDQGADAIYDHINEGKLWKHIKHKYENK

SEQ ID NO: 5996 - protein, 549 aa, Homo sapiens
MATPRGLGALLLLLLLPTSGQEKPTEGPRNTCLGSNNMYDIFNLNDKALCFTKCRQSGSDSCNVENLQRYWLNYEAHLMKEGLTQKVNTPFLKALVQNLSTNTAEDFYFSLEPSQVPRQVMKDEDKPPDRVRLPKSLFRSLPGNRSVVRLAVTILDIGPGTLFKGPRLGLGDGSGVLNNRLVGLSVGQMHVTKLAEPLEIVFSHQRPPPNMTLTCVFWDVTKGTTGDWSSEGCSTEVRPEGTVCCCDHLTFFALLLRPTLDQSTVHILTRISQAGCGVSMIFLAFTIILYAFLRLSRERFKSEDAPKIHVALGGSLFLLNLAFLVNVGSGSKGSDAACWARGAVFHYFLLCAFTWMGLEAFHLYLLAVRVFNTYFGHYFLKLSLVGWGLPALMVIGTGSANSYGLYTIRDRENRTSLELCWFREGTTMYALYITVHGYFLITFLFGMVVLALVVWKIFTLSRATAVKERGKNRKKVLTLLGLSSLVGVTWGLAIFTPLGLSTVYIFALFNSLQGVFICCWFTILYLPSQSTTVSSSTARLDQAHSASQE

SEQ ID NO: 5997 - protein, 250 aa, Homo sapiens
MACWWPLLLELWTVMPTWAGDELLNICMNAKHHKRVPSPEDKLYEECIPWKDNACCTLTTSWEAHLDVSPLYNFSLFHCGLLMPGCRKHFIQAICFYECSPNLGPWIQPVGSLGWEVAPSGQGERVVNVPLCQEDCEEWWEDCRMSYTCKSNWRGGWDWSQGKNRCPKGAQCLPFSHYFPTPADLCEKTWSNSFKASPERRNSGRCLQKWFEPAQGNPNVAVARLFASSAPSWELSYTIMVCSLFLPFLS

SEQ ID NO: 5998 - protein, 425 aa, Homo sapiens
MSSILPFTPPIVKRLLGWKKGEQNGQEEKWCEKAVKSLVKKLKKTGQLDELEKAITTQNVNTKCITIPRSLDGRLQVSHRKGLPHVIYCRLWRWPDLHSHHELRAMELCEFAFNMKKDEVCVNPYHYQRVETPVLPPVLVPRHTEIPAEFPPLDDYSHSIPENTNFPAGIEPQSNIPETPPPGYLSEDGETSDHQMNHSMDAGSPNLSPNPMSPAHNNLDLQPVTYCEPAFWCSISYYELNQRVGETFHASQPSMTVDGFTDPSNSERFCLGLLSNVNRNAAVELTRRHIGRGVRLYYIGGEVFAECLSDSAIFVQSPNCNQRYGWHPATVCKIPPGCNLKIFNNQEFAALLAQSVNQGFEAVYQLTRMCTIRMSFVKGWGAEYRRQTVTSTPCWIELHLNGPLQWLDKVLTQMGSPSIRCSSVS

SEQ ID NO: 5999 - protein, 518 aa, Homo sapiens
MGALARALLLPLLAQWLLRAAPELAPAPFTLPLRVAAATNRVVAPTPGPGTPAERHADGLALALEPALASPAGAANFLAMVDNLQGDSGRGYYLEMLIGTPPQKLQILVDTGSSNFAVAGTPHSYIDTYFDTERSSTYRSKGFDVTVKYTQGSWTGFVGEDLVTIPKGFNTSFLVNIATIFESENFFLPGIKWNGILGLAYATLAKPSSSLETFFDSLVTQANIPNVFSMQMCGAGLPVAGSGTNGGSLVLGGIEPSLYKGDIWYTPIKEEWYYQIEILKLEIGGQSLNLDCREYNADKAIVDSGTTLLRLPQKVFDAVVEAVARASLIPEFSDGFWTGSQLACWTNSETPWSYFPKISIYLRDENSSRSFRITILPQLYIQPMMGAGLNYECYRFGISPSTNALVIGATVMEGFYVIFDRAQKRVGFAASPCAEIAGAAVSEISGPFSTEDVASNCVPAQSLSEPILWIVSYALMSVCGAILLVLIVLLLLPFRCQRRPRDPEVVNDESSLVRHRWK

SEQ ID NO: 6000 - protein, 352 aa, Homo sapiens
MLLFSVLLLLSLVTGTQLGPRTPLPEAGVAILGRARGAHRPQPPHPPSPVSECGDRSIFEGRTRYSRITGGMEAEVGEFPWQVSIQARSEPFCGGSILNKWWILTAAHCLYSEELFPEELSVVLGTNDLTSPSMEIKEVASIILHKDFKRANMDNDIALLLLASPIKLDDLKVPICLPTQPGPATWRECWVAGWGQTNAADKNSVKTDLMKAPMVIMDWEECSKMFPKLTKNMLCAGYKNESYDACKGDSGGPLVCTPEPGEKWYQVGIISWGKSCGEKNTPGIYTSLVNYNLWIEKVTQLEGRPFNAEKRRTSVKQKPMGSPVSGVPEPGSPRSWLLLCPLSHVLFRAILY

SEQ ID NO: 6001 - protein, 396 aa, Homo sapiens
MSVAFASARPRGKGEVTQQTIQKMLDENHHLIQCILEYQSKGKTAECTQYQQILHRNLVYLATIADSNQNMQSLLPAPPTQNMNLGPGALTQSGSSQGLHSQGSLSDAISTGLPPSSLLQGQIGNGPSHVSMQQTAPNTLPTTSMSISGPGYSHAGPASQGVPMQGQGTIGNYVSRTNINMQSNPVSMMQQQAATSHYSSAQGGSQHYQGQSSIAMMGQGSQGSSMMGQRPMAPYRPSQQGSSQQYLGQEEYYGEQYSHSQGAAEPMGQQYYPDGHGDYAYQQSSYTEQSYDRSFEESTQHYYEGGNSQYSQQQAGYQQGAAQQQTYSQQQYPSQQSYPGQQQGYGSAQGAPSQYPGYQQGQGQQYGSYRAPQTAPSAQQQRPYGYEQGQYGNYQQ

SEQ ID NO: 6002 - protein, 105 aa, Homo sapiens
MADGSGWQPPRPCEAYRAEWKLCRSARHFLHHYYVHGERPACEQWQRDLASCRDWEERRNAEAQQSLCESERARVRAARKHILVWAPRQSPPPDWHLPLPQEKDE

SEQ ID NO: 6003 - protein, 911 aa, Homo sapiens
MEASWRQVAGGRGRSRGRATAAPSGNGVHLRGAGGGREKGSVGAVPSGTSPGGVATTAAAGSRHSPAGSQALQTTAASELMSQKKFEEIKKANQAAARKLVEEQFSSSSEEGDEDFEGKQGKILANTFITYTTQTDGDTRELERTKQYVNEAFQAGAMTCLICIASVKRNQAVWSCSGCFCIFHMPCIQKWAKDSQFLVSSVTDDDFGKKDCPWPCPKCRFEYKRSETPSRYYCYCGKVEDPPLDPWLVPHSCGQVCEREFKPPCGHKCLLLCHPGPCPPCPKMVTTTCYCKKAKPIPRRCSAKEWSCQLPCGQKLLCGQHKCENPCHAGSCQPCPRVSRQKCVCGKKVAERSCASPLWHCDQVCGKTLPCGNHTCEQVCHVGACGECPRSGKRFCPCQKSKFSLPCTEDVPTCGDSCDKVLECGIHRCSQRCHRGPCETCRQEVEKHCRCGKHTKRMPCHKPYLCETKCVKMRDCQKHQCRRKCCPGNCPPCDQNCGRTLGCRNHKCPSVCHRGSCYPCPETVDVKCNCGNTKVTVPCGRERTTRPPKCKEQCSRPPTCHHTSQEKHRCHFGSCPPCHQPCQKVLEKCGHLCPAPCHDQALIKQTGRHQPTGPWEQPSEPAFIQTALPCPPCQVPIPMECLGKHEVSPLPCHAVGPYSCKRVCGRILDCQNHTCMKECHKVTKTDGCTGKNKAGPECLHCEEGCSKSRPLGCLHPCILRCHPGECPPCVQMLRIKCHCKITSLYVECRKITTADVNEKNLLSCCKNQCPKELPCGHRCKEMCHPGECPFNCNQKVKLRCPCKRIKKELQCNKVRENQVSIECDTTCKEMKRKASEIKEAEAKAALEEEKRRQQAELEAFENRLKGRRKKNRKRDEVAVELSLWQKHKYYLISVCGVVVVVFAWYITHDVN

SEQ ID NO: 6004 - protein, 256 aa, Homo sapiens
MAAGSRTSLLLAFGLLCLSWLQEGSAFPTIPLSRLFDNAMLRARRLYQLAYDTYQEFEEAYILKEQKYSFLQNPQTSLCFSESIPTPSNRVKTQQKSNLELLRISLLLIQSWLEPVQLLRSVFANSLVYGASDSNVYRHLKDLEEGIQTLMWVRVAPGIPNPGAPLASRDWGEKHCCPLFSSQALTQENSPYSSFPLVNPPGLSLQPGGEGGKWMNERGREQCPSAWPLLLFLHFAEAGRWQPPDWADLQSVLQQV

SEQ ID NO: 6005 - protein, 406 aa, Homo sapiens
MQLFLLLCLVLLSPQGASLHRHHPREMKKRVEDLHVGATVAPSSRRDFTFDLYRALASAAPSQSIFFSPVSISMSLAMLSLGAGSSTKMQILEGLGLNLQKSSEKELHRGFQQLLQELNQPRDGFQLSLGNALFTDLVVDLQDTFVSAMKTLYLADTFPTNFRDSAGAMKQINDYVAKQTKGKIVDLLKNLDSNAVVIMVNYIFFKAKWETSFNHKGTQEQDFYVTSETVVRVPMMSREDQYHYLLDRNLSCRVVGVPYQGNATALFILPSEGKMQQVENGLSEKTLRKWLKMFKKRQLELYLPKFSIEGSYQLEKVLPSLGISNVFTSHADLSGISNHSNIQVSEMVHKAVVEVDESGTRAAAATGTIFTFRSARLNSQRLVFNRPFLMFIVDNNILFLGKVNRP

SEQ ID NO: 6006 - protein, 121 aa, Homo sapiens
MASCLALRMALLLVSGVLAPAVLTDDVPQEPVPTLWNEPAELPSGEGPVESTSPGREPVDTGPPAPTVAPGPEDSTAQERLDQGGGSLGPGAIAAIVIAALLATCVVLALVVVALRKFSAS

SEQ ID NO: 6007 - protein, 544 aa, Homo sapiens
MSSPGPSQPPAEDPPWPARLLRAPLGLLRLDPSGGALLLCGLVALLGWSWLRRRRARGIPPGPTPWPLVGNFGHVLLPPFLRRRSWLSSRTRAAGIDPSVIGPQVLLAHLARVYGSIFSFFIGHYLVVVLSDFHSVREALVQQAEVFSDRPRVPLISIVTKEKGVVFAHYGPVWRQQRKFSHSTLRHFGLGKLSLEPKIIEEFKYVKAEMQKHGEDPFCPFSIISNAVSNIICSLCFGQRFDYTNSEFKKMLGFMSRGLEICLNSQVLLVNICPWLYYLPFGPFKELRQIEKDITSFLKKIIKDHQESLDRENPQDFIDMYLLHMEEERKNNSNSSFDEEYLFYIIGDLFIAGTDTTTNSLLWCLLYMSLNPDVQEKVHEEIERVIGANRAPSLTDKAQMPYTEATIMEVQRLTVVVPLAIPHMTSENTVLQGYTIPKGTLILPNLWSVHRDPAIWEKPEDFYPNRFLDDQGQLIKKETFIPFGIGKRVCMGEQLAKMELFLMFVSLMQSFAFALPEDSKKPLLTGRFGLTLAPHPFNITISRR

SEQ ID NO: 6008 - protein, 717 aa, Homo sapiens
MKSQEEVEVAGIKLCKAMSLGSVTFTDVAIDFSQDEWEWLNLAQRSLYKKVMLENYRNLVSVGLCISKPDVISLLEQEKDPWVIKGGMNRGLCPDLECVWVTKSLSLNQDIYEEKLPPAIIMERLKSYDLECSTLGKNWKCEDLFERELVNQKTHFRQETITHIDTLIEKRDHSNKSGTVFHLNTLSYIKQIFPMEERIFNFHTDKKSLKTHSVVKKHKQDRGEKKLLKCNDCEKIFSKISTLTLHQRIHTGEKPYECIECGKAFSQSAHLAQHQRIHTGEKPFECTECGKAFSQNAHLVQHQRVHTGEKPYQCKQCNKAFSQLAHLAQHQRVHTGEKPYECIECGKAFSDCSSLAHHRRIHTGKRPYECIDCGKAFRQNASLIRHRRYYHTGEKPFDCIDCGKAFTDHIGLIQHKRTHTGERPYKCNVCGKAFSHGSSLTVHQRIHTGEKPYECNICEKAFSHRGSLTLHQRVHTGEKPYECKECGKAFRQSTHLAHHQRIHTGEKPYECKECSKTFSQNAHLAQHQKIHTGEKPYECKECGKAFSQIAHLVQHQRVHTGEKPYECIECGKAFSDGSYLVQHQRLHSGKRPYECLECGKAFRQRASLICHQRCHTGEKPYECNVCGKAFSHRKSLTLHQRIHTGEKPYECKECSKAFSQVAHLTLHKRIHTGERPYECKECGKAFRQSVHLAHHQRIHTGESSVILSSALPYHQVL

SEQ ID NO: 6009 - protein, 73 aa, Homo sapiens
MRIAVLLFAIFFFMSQVLPARGKFKEICERPNGSCRDFCLETEIHVGRCLNSQPCCLPLGHQPRIESTTPKKD

SEQ ID NO: 6010 - protein, 810 aa, Homo sapiens
MPNQGEDCYFFFYSTCTKGDSCPFRHCEAAIGNETVCTLWQEGRCFRQVCRFRHMEIDKKRSEIPCYWENQPTGCQKLNCAFHHNRGRYVDGLFLPPSKTVLPTVPESPEEEVKASQLSVQQNKLSVQSNPSPQLRSVMKVESSENVPSPTHPPVVINAADDDEDDDDQFSEEGDETKTPTLQPTPEVHNGLRVTSVRKPAVNIKQGECLNFGIKTLEEIKSKKMKEKSKKQGEGSSGVSSLLLHPEPVPGPEKENVRTVVRTVTLSTKQGEEPLVRLSLTERLGKRKFSAGGDSDPPLKRSLAQRLGKKVEAPETNIDKTPKKAQVSKSLKERLGMSADPDNEDATDKVNKVGEIHVKTLEEILLERASQKRGELQTKLKTEGPSKTDDSTSGARSSSTIRIKTFSEVLAEKKHRQQEAERQKSKKDTTCIKLKIDSEIKKTVVLPPIVASRGQSEEPAGKTKSMQEVHIKTLEEIKLEKALRVQQSSESSTSSPSQHEATPGARRLLRITKRTGMKEEKNLQEGNEVDSQSSIRTEAKEASGETTGVDITKIQVKRCETMREKHMQKQQEREKSVLTPLRGDVASCNTQVAEKPVLTAVPGITRHLTKRLPTKSSQKVEVETSGIGDSLLNVKCAAQTLEKRGKAKPKVNVKPSVVKVVSSPKLAPKRKAVEMHAAVIAAVKPLSSSSVLQEPPAKKAAVAVVPLVSEDKSVTVPEAENPRDSLVLPPTQSSSDSSPPEVSGPSSSQMSMKTRRLSSASTGKPPLSVEDDFEKLIWEISGGKLEAEIDLDPGKDEDDLLLELSEMIDS

SEQ ID NO: 6011 - protein, 101 aa, Homo sapiens
MERPDKAALNALQPPEFRNESSLASTLKTLLFFTALMITVPIGLYFTTKSYIFEGALGMSNRDSYFYAAIVAVVAVHVVLALFVYVAWNEGSRQWREGKQD

SEQ ID NO: 6012 - protein, 1012 aa, Homo sapiens
MDALDASKLLDEELYSRQLYVLGSPAMQRIQGARVLVSGLQGLGAEVAKNLVLMGVGSLTLHDPHPTCWSDLAAQFLLSEQDLERSRAEASQELLAQLNRAVQVVVHTGDITEDLLLDFQVVVLTAAKLEEQLKVGTLCHKHGVCFLAADTRGLVGQLFCDFGEDFTVQDPTEAEPLTAAIQHISQGSPGILTLRKGANTHYFRDGDLVTFSGIEGMVELNDCDPRSIHVREDGSLEIGDTTTFSRYLRGGAITEVKRPKTVRHKSLDTALLQPHVVAQSSQEVHHAHCLHQAFCALHKFQHLHGRPPQPWDPVDAETVVGLARDLEPLKRTEEEPLEEPLDEALVRTVALSSAGVLSPMVAMLGAVAAQEVLKAISRKFMPLDQWLYFDALDCLPEDGELLPSPEDCALRGSRYDGQIAVFGAGFQEKLRRQHYLLVGAGAIGCELLKVFALVGLGAGNSGGLTVVDMDHIERSNLSRQFLFRSQDVGRPKAEVAAAAARGLNPDLQVIPLTYPLDPTTEHIYGDNFFSRVDGVAAALDSFQARRYVAARCTHYLKPLLEAGTSGTWGSATVFMPHVTEAYRAPASAAASEDAPYPVCTVRYFPSTAEHTLQWARHEFEELFRLSAETINHHQQAHTSLADMDEPQTLTLLKPVLGVLRVRPQNWQDCVAWALGHWKLCFHYGIKQLLRHFPPNKVLEDGTPFWSGPKQCPQPLEFDTNQDTHLLYVLAAANLYAQMHGLPGSQDWTALRELLKLLPQPDPQQMAPIFASNLELASASAEFGPEQQKELNKALEVWSVGPPLKPLMFEKDDDSNFHVDFVVAAASLRCQNYGIPPVNRAQSKRIVGQIIPAIATTTAAVAGLLGLELYKVVSGPRPRSAFRHSYLHLAENYLIRYMPFAPAIQTFHHLKWTSWDRLKVPAGQPERTLESLLAHLQEQHGLRVRILLHGSALLYAAGWSPEKQAQHLPLRVTELVQQLTGQAPAPGQRVLVLELSCEGDDEDTAFPPLHYEL

SEQ ID NO: 6013 - protein, 256 aa, Homo sapiens
MAPGSRTSLLLAFALLCLPWLQEAGAVQTVPLSRLFDHAMLQAHRAHQLAIDTYQEFEETYIPKDQKYSFLHDSQTSFCFSDSIPTPSNMEETQQKSNLELLRISLLLIESWLEPVRFLRSMFANNLVYDTSDSDDYHLLKDLEEGIQTLMGVRVAPGVTNPGTPLASRAGGEKYCCPLFSSKALTQENSPYSSFRLVNPPGLSLHPEGEGGKWINERGREQCPSAWPLLLFLHFAEAGRRQPPDWADPQADLQQV

SEQ ID NO: 6014 - protein, 603 aa, Homo sapiens
MATIEEIAHQIIEQQMGEIVTEQQTGQKIQIVTALDHNTQGKQFILTNHDGSTPSKVILARQDSTPGKVFLTTPDAAGVNQLFFTTPDLSAQHLQLLTDNSPDQGPNKVFDLCVVCGDKASGRHYGAVTCEGCKGFFKRSIRKNLVYSCRGSKDCIINKHHRNRCQYCRLQRCIAFGMKQDSVQCERKPIEVSREKSSNCAASTEKIYIRKDLRSPLTATPTFVTDSESTRSTGLLDSGMFMNIHPSGVKTESAVLMTSDKAESCQGDLSTLANVVTSLANLGKTKDLSQNSNEMSMIESLSNDDTSLCEFQEMQTNGDVSRAFDTLAKALNPGESTACQSSVAGMEGSVHLITGDSSINYTEKEGPLLSDSHVAFRLTMPSPMPEYLNVHYIGESASRLLFLSMHWALSIPSFQALGQENSISLVKAYWNELFTLGLAQCWQVMNVATILATFVNCLHNSLQQDKMSTERRKLLMEHIFKLQEFCNSMVKLCIDGYEYAYLKAIVLFSPDHPSLENMEQIEKFQEKAYVEFQDYITKTYPDDTYRLSRLLLRLPALRLMNATITEELFFKGLIGNIRIDSVIPHILKMEPADYNSQIIGHSI

SEQ ID NO: 6015 - protein, 881 aa, Homo sapiens
MAGAAPRVRYLAGFCCPLGGLAAGKPRVLCHEAEVFLSTGSELVYVYDQEGGLLTAAFRFPDQVWHLELLAPRRLLYALCARRGLYCLSLDHPGRSRSTSQDDRDSEDGDQPSPVIPVDPDACILPDAALCAFTLLDSVLVTLVQGPARWKMQLFEQPCPGEDPRPGGQIGEVELSSYTPPAGVPGKPAAPHFLPVLCSVSPSGSRVPHDLLGGSGGFTLEDALFGLLFGADATLLQSPVVLCGLPDGQLCCVILKALVTSRSAPGDPNALVKILHHLEEPVIFIGALKTEPQAAEAAENFLPDEDVHCDCLVAFGHHGRMLAIKASWDESGKLVPELREYCLPGPVLCAACGGGGRVYHSTPSDLCVVDLSRGSTPLGPEQPEEGPGGLPPMLCPASLNICSVVSLSASPRTHEGGTKLLALSAKGRLMTCSLDLDSEMPGPARMTTESAGQKIKELLSGIGNISERVSFLKKAVDQRNKALTSLNEAMNVSCALLSSGTGPRPISCTTSTTWSRLQTQDVLMATCVLENSSSFSLDQGWTLCIQVLTSSCALDLDSACSAITYTIPVDQLGPGARREVTLPLGPGENGGLDLPVTVSCTLFYSLREVVGGALAPSDSEDPFLDECPSDVLPEQEGVCLPLSRHTVDMLQCLRFPGLAPPHTRAPSPLGPTRDPVATFLETCREPGSQPAGPASLRAEYLPPSVASIKVSAELLRAALKDGHSGVPLCCATLQWLLAENAAVDVVRARALSSIQGVAPDGANVHLIVREVAMTDLCPAGPIQAVEIQVESSSLADICRAHHAVVGRMQTMVTEQATQGSSAPDLRVQYLRQIHANHETLLREVQTLRDRLCTEDEASSCATAQRLLQVYRQLRHPSLILL

SEQ ID NO: 6016 - protein, 417 aa, Homo sapiens
MAAPGSARRPLLLLLLLLLLGLMHCASAAMFMVKNGNGTACIMANFSAAFSVNYDTKSGPKNMTFDLPSDATVVLNRSSCGKENTSDPSLVIAFGRGHTLTLNFTRNATRYSVQLMSFVYNLSDTHLFPNASSKEIKTVESITDIRADIDKKYRCVSGTQVHMNNVTVTLHDATIQAYLSNSSFSRGETRCEQDRPSPTTAPPAPPSPSPSPVPKSPSVDKYNVSGTNGTCLLASMGLQLNLTYERKDNTTVTRLLNINPNKTSASGSCGAHLVTLELHSEGTTVLLFQFGMNASSSRFFLQGIQLNTILPDARDPAFKAANGSLRALQATVGNSYKCNAEEHVRVTKAFSVNIFKVWVQAFKVEGGQFGSVEECLLDENSMLIPIAVGGALAGLVLIVLIAYLVGRKRSHAGYQTI

SEQ ID NO: 6017 - protein, 449 aa, Homo sapiens
MRECISVHVGQAGVQIGNACWELFCLEHGIQADGTFDAQASKINDDDSFTTFFSETGNGKHVPRAVMIDLEPTVVDEVRAGTYRQLFHPEQLITGKEDAANNYARGHYTVGKESIDLVLDRIRKLTDACSGLQGFLIFHSFGGGTGSGFTSLLMERLSLDYGKKSKLEFAIYPAPQVSTAVVEPYNSILTTHTTLEHSDCAFMVDNEAIYDICRRNLDIERPTYTNLNRLISQIVSSITASLRFDGALNVDLTEFQTNLVPYPRIHFPLVTYAPIISAEKAYHEQLSVAEITSSCFEPNSQMVKCDPRHGKYMACCMLYRGDVVPKDVNVAIAAIKTKRTIQFVDWCPTGFKVGINYQPPTVVPGGDLAKVQRAVCMLSNTTAIAEAWARLDHKFDLMYAKRAFVHWYVGEGMEEGEFSEAREDLAALEKDYEEVGTDSFEEENEGEEF

SEQ ID NO: 6018 - protein, 524 aa, Homo sapiens
MSGKRKRVVLTIKDKLDIIKKLEDGGSSKQLAVIYGIGETTVRDIRKNKEKIITYASSSDSTSLLAKRKSMKPSMYEELDRAMLEWFNQQRAKGNPISGPICAKRAEFFFYALGMDGDFNPSAGWLTRFKQRHSIREINIRNERLNGDETAVEDFCNNFRDFIERENLQPEQIYNADETGLFWKCLPSRISVIKGKCTVPGHKSIEERVTIMCCANATGLHKLKLCVVGKAKKPRSFKSTDTLNLPVSYFSQKGAWMDLSIFRQWFDKIFVPQVREYLRSKGLQEKAVLLLDNSPTHPNENVLRSDDGQIFAKYLPPNVASLIQPSDQGVIATMKRNYRAGLLQNNLEEGNDLKSFWKKLTLLDALYEIAMAWNLVKPVTISRAWKKILPMVEEKESLDFDVEDISVATVAAILQHTKGLENVTTENLEKWLEVDSTEPGYEVLTDSEIIRRAQGQADESSENEEEEIELIPEKHINHAAALQWTENLLDYLEQQGDMILPDRLVIRKLRATIRNKQKMTKSSQ

SEQ ID NO: 6019 - protein, 428 aa, Homo sapiens
MGEAPSPAPALWDWDYLDRCFARHRVCISFGLWICASSCWIAAHALLLYLRCAQKPRQDQSALCAACCLLTSLCDTVGALLARQLTIQVFTGAYLAAIDLVNFMFILFPVCGSKFKSNSDREARERKRRRQLRASVFALALPLSLGPCWALWVAVPKASATIRGPQRRLLASLLQENTEILGYLLGSVAAFGSWASRIPPLSRICRGKTFPSIHLWTRLLSALAGLLYASAIVAHDQHPEYLLRATPWFLTSLGRAALDLAIIFLSCVMKSKMRQALGFAKEARESPDTQALLTCAEKEEENQENLDWVPLTTLSHCKSLRTMTAISRYMELTIEPVQQAGCSATRLPGDGQTSAGDASLQDPPSYPPVQVIRARVSSGSSSEVSSINSDLEWDPEDVNLEGSKENVELLGSQVHQDSVRTAHLSDDD

SEQ ID NO: 6020 - protein, 293 aa, Homo sapiens
MGSRAELCTLLGGFSFLLLLIPGEGAKGGSLRESQGVCSKQTLVVPLHYNESYSQPVYKPYLTLCAGRRICSTYRTMYRVMWREVRREVQQTHAVCCQGWKKRHPGALTCEAICAKPCLNGGVCVRPDQCECAPGWGGKHCHVDVDECRTSITLCSHHCFNTAGSFTCGCPHDLVLGVDGRTCMEGSPEPPTSASILSVAVREAEKDERALKQEIHELRGRLERLEQWAGQAGAWVRAVLPVPPEELQPEQVAELWGRGDRIESLSDQVLLLEERLGACSCEDNSLGLGVNHR

SEQ ID NO: 6021 - protein, 569 aa, Homo sapiens
MHTLTGFSLVSLLSFGYLSWDWAKPSFVADGPGEAGEQPSAAPPQPPHIIFILTDDQGYHDVGYHGSDIETPTLDRLAAKGVKLENYYIQPICTPSRSQLLTGRYQIHTGLQHSIIRPQQPNCLPLDQVTLPQKLQEAGYSTHMVGKWHLGFYRKECLPTRRGFDTFLGSLTGNVDYYTYDNCDGPGVCGFDLHEGENVAWGLSGQYSTMLYAQRASHILASHSPQRPLFLYVAFQAVHTPLQSPREYLYRYRTMGNVARRKYAAMVTCMDEAVRNITWALKRYGFYNNSVIIFSSDNGGQTFSGGSNWPLRGRKGTYWEGGVRGLGFVHSPLLKRKQRTSRALMHITDWYPTLVGLAGGTTSAADGLDGYDVWPAISEGRASPRTEILHNIDPLYNHAQHGSLEGGFGIWNTAVQAAIRVGEWKLLTGDPGYGDWIPPQTLATFPGSWWNLERMASVRQAVWLFNISADPYEREDLAGQRPDVVRTLLARLAEYNRTAIPVRYPAENPRAHPDFNGGAWGPWASDEEEEEEEGRARSFSRGRRKKKCKICKLRSFFRKLNTRLMSQRI

SEQ ID NO: 6022 - protein, 206 aa, Homo sapiens [sequence omitted]

SEQ ID NO: 6023 - protein, 530 aa, Homo sapiens
MDDLQSQNLSMDMTDSPPALANNRLENGMAQLITTEAWNINSTDLVKKALVTVPAPSILNPPAESQSGMALKVAATVLQPLCLGESPVVMPIHMQVEGSSAPELNPNGNATYVMTTQGPVQLPVVLEQHVFQHLNSPLVLPQEAPCSSSTIHNNLFQGAEDPEAQPQLLDLRIPSQPQEPTLPFEAVLQNLFPSQGTLGPPPCQPPPGYAPVPPQPFSSPLSPLVPPATLLVPYPVIVPLPVPVPIPIPIPMPQSSESKFSSSFPKPPSSFGLHPFKGTQTPLEKDELKPFDILQPKEYFQLSRHTVIKMGSENEALDLSMKSVPWLKAGEVSPPIFQEDAALDLSVAAHRKSEPPPETLYDSGASVDSSGHTVMEKLPSGMEISFAPATSHEAPAMMDSHISSSDAATEMLSQPNHPSGEVKAENNIEMVGESQAAKVIVSVEDAVPTIFCGKIKGLSGVSTKNFSFKREDSVLQGYDINSQGEESMGNAEPLRKPIKNRSIKLKKVNSQEIHMLPIKKQRLATFFPRK

SEQ ID NO: 6024 - protein, 442 aa, Homo sapiens
MENWSKDITHSYLEQETTGINKSTQPDEQLTMNSEKSMHRKSTELVNEITCENTEWPGQRSTNFQIISSYPDDESVYCTTEKYNVMEHRHNDMHYECMTPCQVTSDSDKEKTIAFLLKELDILRTSNKKLQQKLAKEDKEQRKLKFKLELQEKETEAKIAEKTAALVEEVYFAQKERDEAVMSRLQLAIEERDEAIARAKHMEMSLKVLENINPEENDMTLQELLNRINNADTGIAIQKNGAIIVDRIYKTKECKMRITAEEMSALIEERDAALSKCKRLEQELHHVKEQNQTSANNMRHLTAENNQERALKAKLLSMQQARETAVQQYKKLEEEIQTLRVYYSLHKSLSQEENLKDQFNYTLSTYEEALKNRENIVSITQQQNEELATQLQQALTERANMELQLQHAREASQVANEKVQKLERLVDVLRKKVGTGTMRTVI

SEQ ID NO: 6025 - protein, 218 aa, Homo sapiens
MGTRDDEYDYLFKVVLIGDSGVGKSNLLSRFTRNEFNLESKSTIGVEFATRSIQVDGKTIKAQIWDTAGQERYRAITSAYYRGAVGALLVYDIAKHLTYENVERWLKELRDHADSNIVIMLVGNKSDLRHLRAVPTDEARAFAEKNNLSFIETSALDSTNVEEAFKNILTEIYRIVSQKQIADRAAHDESPGNNVVDISVPPTTDGQKPNKLQCCQNL

SEQ ID NO: 6026 - protein, 275 aa, Homo sapiens
MWRAGSMSAELGVGCALRAVNERVQQAVARRPRDLPAIQPRLVAVSKTKPADMVIEAYGHGQRTFGENYVQELLEKASNPKILSLCPEIKWHFIGHLQKQNVNKLMAVPNLFMLETVDSVKLADKVNSSWQRKGSPERLKVMVQINTSGEESKHGLPPSETIAIVEHINAKCPNLEFVGLMTIGSFGHDLSQGPNPDFQLLLSLREELCKKLNIPADQVELSMGMSADFQHAVEVGSTNVRIGSTIFGERDYSKKPTPDKCAADVKAPLEVAQEH

SEQ ID NO: 6027 - protein, 912 aa, Homo sapiens
MSAPPVLRPPSPLLPVAAAAAAAAAALVPGSGPGPAPFLAPVAAPVGGISFHLQIGLSREPVLLLQDSSGDYSLAHVREMACSIVDQKFPECGFYGMYDKILLFRHDPTSENILQLVKAASDIQEGDLIEVVLSASATFEDFQIRPHALFVHSYRAPAFCDHCGEMLWGLVRQGLKCEGCGLNYHKRCAFKIPNNCSGVRRRRLSNVSLTGVSTIRTSSAELSTSAPDEPLLQKSPSESFIGREKRSNSQSYIGRPIHLDKILMSKVKVPHTFVIHSYTRPTVCQYCKKLLKGLFRQGLQCKDCRFNCHKRCAPKVPNNCLGEVTINGDLLSPGAESDVVMEEGSDDNDSERNSGLMDDMEEAMVQDAEMAMAECQNDSGEMQDPDPDHEDANRTISPSTSNNIPLMRVVQSVKHTKRKSSTVMKEGWMVHYTSKDTLRKRHYWRLDSKCITLFQNDTGSRYYKEIPLSEILSLEPVKTSALIPNGANPHCFEITTANVVYYVGENVVNPSSPSPNNSVLTSGVGADVARMWEIAIQHALMPVIPKGSSVGTGTNLHRDISVSISVSNCQIQENVDISTVYQIFPDEVLGSGQFGIVYGGKHRKTGRDVAIKIIDKLRFPTKQESQLRNEVAILQNLHHPGVVNLECMFETPERVFVVMEKLHGDMLEMILSSEKGRLPEHITKFLITQILVALRHLHFKNIVHCDLKPENVLLASADPFPQVKLCDFGFARIIGEKSFRRSVVGTPAYLAPEVLRNKGYNRSLDMWSVGVIIYVSLSGTFPFNEDEDIHDQIQNAAFMYPPNPWKEISHEAIDLINNLLQVKMRKRYSVDKTLSHPWLQDYQTWLDLRELECKIGERYITHESDDLRWEKYAGEQGLQYPTHLINPSASHSDTPETEETEMKALGERVSIL

SEQ ID NO: 6028 - protein, 308 aa, Homo sapiens
MRLLPEWFLLLFGPWLLRKAVSAQIPESGRPQYLGLRPAAAGAGAPGQQLPEPRSSDGLGVGRAWSWAWPTNHTGALARAGAAGALPAQRTKRKPSIKAARAKKIFGWGDFYFRVHTLKFSLLVTGKIVDHVNGTFSVYFRHNSSSLGNLSVSIVPPSKRVEFGGVWLPGPVPHPLQSTLALEGVLPGLGPPLGMAAAAAGPGLGGSLGGALAGPLGGALGVPGAKESRAFNCHVEYEKTNRARKHRPCLYDPSQVCFTEHTQSQAAWLCAKPFKVICIFVSFLSFDYKLVQKVCPDYNFQSEHPYFG

SEQ ID NO: 6029 - protein, 985 aa, Homo sapiens
MHHGTGPQNVQHQLQRSRACPGSEGEEQPAHPNPPPSPAAPFAPSASPSAPQSPSYQIQQLMNRSPATGQNVNITLQSVGPVVGGNQQITLAPLPLPSPTSPGFQFSAQPRRFEHGSPSYIQVTSPLSQQVQTQSPTQPSPGPGQALQNVRAGAPGPGLGLCSSSPTGGFVDASVLVRQISLSPSSGGHFVFQDGSGLTQIAQGAQVQLQHPGTPITVRERRPSQPHTQSGGTIHHLGPQSPAAAGGAGLQPLASPSHITTANLPPQISSIIQGQLVQQQQVLQGPPLPRPLGFERTPGVLLPGAGGAAGFGMTSPPPPTSPSRTAVPPGLSSLPLTSVGNTGMKKVPKKLEEIPPASPEMAQMRKQCLDYHYQEMQALKEVFKEYLIELFFLQHFQGNMMDFLAFKKKHYAPLQAYLRQNDLDIEEEEEEEEEEEEKSEVINDEVKVVTGKDGQTGTPVAIATQLPPKVSAAFSSQQQPFQQALAGSLVAGAGSTVETDLFKRQQAMPSTGMAEQSKRPRLEVGHQGVVFQHPGADAGVPLQQLMPTAQGGMPPTPQAAQLAGQRQSQQQYDPSTGPPVQNAASLHTPLPQLPGRLPPAGVPTAALSSALQFAQQPQVVEAQTQLQIPVKTQQPNVPIPAPPSSQLPIPPSQPAQLALHVPTPGKVQVQASQLSSLPQMVASTRLPVDPAPPCPRPLPTSSTSSLAPVSGSGPGPSPARSSPVNRPSSATNKALSPVTSRTPGVVASAPTKPQSPAQNATSSQDSSQDTLTEQITLENQVHQRIAELRKAGLWSQRRLPKLQEAPRPKSHWDYLLEEMQWMATDFAQERRWKVAAAKKLVRTVVRHHEEKQLREERGKKEEQSRLRRIAASTAREIECFWSNIEQVVEIKLRVELEEKRKKALNLQKVSRRGKELRPKGFDALQESSLDSGMSGRKRKASISLTDDEVDDEEETIEEEEANEGVVDHQTELSNLAKEGRLLLPY

SEQ ID NO: 6030 - protein, 715 aa, Homo sapiens
MAANMYRVGDYVYFENSSSNPYLIRRIEELNKTANGNVEAKVVCFYRRRDISSTLIALADKHATLSVCYKAGPGADNGEEGEIEEEMENPEMVDLPEKLKHQLRHRELFLSRQLESLPATHIRGKCSVTLLNETESLKSYLEREDFFFYSLVYDPQQKTLLADKGEIRVGNRYQADITDLLKEGEEDGRDQSRLETQVWEAHNPLTDKQIDQFLVVARSVGTFARALDCSSSVRQPSLHMSAAAASRDITLFHAMDTLHKNIYDISKAISALVPQGGPVLCRDEMEEWSASEANLFEEALEKYGKDFTDIQQDFLPWKSLTSIIEYYYMWKTTDRYVQQKRLKAAEAESKLKQVYIPNYNKPNPNQISVNNVKAGVVNGTGAPGQSPGAGRACESCYTTQSYQWYSWGPPNMQCRLCASCWTYWKKYGGLKMPTRLDGERPGPNRSNMSPHGLPARSSGSPKFAMKTRQAFYLHTTKLTRIARRLCREILRPWHAARHPYLPINSAAIKAECTARLPEASQSPLVLKQAVRKPLEAVLRYLETHPRPPKPDPVKSVSSVLSSLTPAKVAPVINNGSPTILGKRSYEQHNGVDGNMKKRLLMPSRGLANHGQARHMGPSRNLLLNGKSYPTKVRLIRGGSLPPVKRRRMNWIDAPDDVFYMATEETRKIRKLLSSSETKRAARRPYKPIALRQSQALPPRPPPPAPVNDEPIVIED

SEQ ID NO: 6031 - protein, 445 aa, Homo sapiens
MAAPTPARPVLTHLLVALFGMGSWAAVNGIWVELPVVVKELPEGWSLPSYVSVLVALGNLGLLVVTLWRRLAPGKDEQVPIRVVQVLGMVGTALLASLWHHVAPVAGQLHSVAFLALAFVLALACCASNVTFLPFLSHLPPRFLRSFFLGQGLSALLPCVLALVQGVGRLECPPAPINGTPGPPLDFLERFPASTFFWALTALLVASAAAFQGLLLLLPPPPSVPTGELGSGLQVGAPGAEEEVEESSPLQEPPSQAAGTTPGPDPKAYQLLSARSACLLGLLAATNALTNGVLPAVQSFSCLPYGRLAYHLAVVLGSAANPLACFLAMGVLCRSLAGLGGLSLLGVFCGGYLMALAVLSPCPPLVGTSAGVVLVVLSWVLCLGVFSYVKVAASSLLHGGGRPALLAAGVAIQVGSLLGAVAMFPPTSIYHVFHSRKDCADPCDS

SEQ ID NO: 6032 - protein, 200 aa, Homo sapiens
MKLDMTGDCTPVLVLMAAVLTVTGAVPVARLHGALPDARGCHIAQFKSLSPQELQAFKRAKDALEESLLLKDCRCHSRLFPRTWDLRQLQVRERPMALEAELALTLKVLEATADTDPALVDVLDQPLHTLHHILSQFRACIQPQPTAGPRTRGRLHHWLYRLQEAPKKESPGCLEASVTFNLFRLLTRDLNCVASGDLCV

SEQ ID NO: 6033 - protein, 188 aa, Homo sapiens
MPRPGSAQRWAAVAGRWGCRLLALLLLVPGPGGASEITFELPDNAKQCFYEDIAQGTKCTLEFQVITGGHYDVDCRLEDPDGKVLYKEMKKQYDSFTFTASKNGTYKFCFSNEFSTFTHKTVYFDFQVGEDPPLFPSENRVSALTQMESACVSIHEALKSVIDYQTHFRLREAQGRSRAEDLNTRVAY

SEQ ID NO: 6034 - protein, 715 aa, Homo sapiens
MSKAHKPWPYRRRSQFSSRKYLKKEMNSFQQQPPPFGTVPPQMMFPPNWQGAEKDAAFLAKDFNFLTLNNQPPPGNRSQPRAMGPENNLYSQYEQKVRPCIDLIDSLRALGVEQDLALPAIAVIGDQSSGKSSVLEALSGVALPRGSGIVTRCPLVLKLKKQPCEAWAGRISYRNTELELQDPGQVEKEIHKAQNVMAGNGRGISHELISLEITSPEVPDLTIIDLPGITRVAVDNQPRDIGLQIKALIKKYIQRQQTINLVVVPCNVDIATTEALSMAHEVDPEGDRTIGILTKPDLMDRGTEKSVMNVVRNLTYPLKKGYMIVKCRGQQEITNRLSLAEATKKEITFFQTHPYFRVLLEEGSATVPRLAERLTTELIMHIQKSLPLLEGQIRESHQKATEELRRCGADIPSQEADKMFFLIEKIKMFNQDIEKLVEGEEVVRENETRLYNKIREDFKNWVGILATNTQKVKNIIHEEVEKYEKQYRGKELLGFVNYKTFEIIVHQYIQQLVEPALSMLQKAMEIIQQAFINVAKKHFGEFFNLNQTVQSTIEDIKVKHTAKAENMIQLQFRMEQMVFCQDQIYSVVLKKVREEIFNPLGTPSQNMKLNSHFPSNESSVSSFTEIGIHLNAYFLETSKRLANQIPFIIQYFMLRENGDSLQKAMMQILQEKNRYSWLLQEQSETATKRRILKERIYRLTQARHALCQFSSKEIH

SEQ ID NO: 6035 - protein, 609 aa, Homo sapiens
MPHLLVTFRDVAIDFSQEEWECLDPAQRDLYRDVMLENYSNLISLDLESSCVTKKLSPEKEIYEMESLQWENMGKRINHHLQYNGLGDNMECKGNLEGQEASQEGLYMCVKITCEEKATESHSTSSTFHRIIPTKEKLYKCKECRQGFSYLSCLIQHEENHNIEKCSEVKKHRNTFSKKPSYIQHQRIQTGEKPYECMECGKAFGRTSDLIQHQKIHTNEKPYQCNACGKAFIRGSQLTEHQRVHTGEKPYECKKCGKAFSYCSQYTLHQRIHSGEKPYECKDCGKAFILGSQLTYHQRIHSGEKPYECKECGKAFILGSHLTYHQRVHTGEKPYICKECGKAFLCASQLNEHQRIHTGEKPYECKECGKTFFRGSQLTYHLRVHSGERPYKCKECGKAFISNSNLIQHQRIHTGEKPYKCKECGKAFICGKQLSEHQRIHTGEKPFECKECGKAFIRVAYLTQHEKIHGEKHYECKECGKTFVRATQLTYHQRIHTGEKPYKCKECDKAFIYGSQLSEHQRIHRGEKPYECKQCGKAFIRGSHLTEHLRTHTGEKPYECKECGRAFSRGSELTLHQRIHTGEKPYTCVQCGKDFRCPSQLTQHTRLHN

SEQ ID NO: 6036 - protein, 424 aa, Homo sapiens
MQRLQVVLGHLRGPADSGWMPQAAPCLSGAPQASAADVVVVHGRRTAICRAGRGGFKDTTPDELLSAVMTAVLKDVNLRPEQLGDICVGNVLQPGAGAIMARIAQFLSDIPETVPLSTVNRQCSSGLQAVASIAGGIRNGSYDIGMACGVESMSLADRGNPGNITSRLMEKEKARDCLIPMGITSENVAERFGISREKQDTFALASQQKAARAQSKGCFQAEIVPVTTTVHDDKGTKRSITVTQDEGIRPSTTMEGLAKLKPAFKKDGSTTAGNSSQVSDGAAAILLARRSKAEELGLPILGVLRSYAVVGVPPDIMGIGPAYAIPVALQKAGLTVSDVDIFEINEAFASQAAYCVEKLRLPPEKVNPLGGAVALGHPLGCTGARQVITLLNELKRRGKRAYGVVSMCIGTGMGAAAVFEYPGN

SEQ ID NO: 6037 - protein, 179 aa, Homo sapiens
MVQAWYMDDAPGDPRQPHRPDPGRPVGLEQLRRLGVLYWKLDADKYENDPELEKIRRERNYSWMDIITICKDKLPNYEEKIKMFYEEHLHLDDEIRYILDGSGYFDVRDKEDQWIRIFMEKGDMVTLPAGIYHRFTVDEKNYTKAMRLFVGEPVWTAYNRPADHFEARGQYVKFLAQTA

SEQ ID NO: 6038 - protein, 504 aa, Homo sapiens
MLYFSLFWAARPLQRCGQLVRMAIRAQHSNAAQTQTGEANRGWTGQESLSDSDPEMWELLQREKDRQCRGLELIASENFCSRAALEALGSCLNNKYSEGYPGKRYYGGAEVVDEIELLCQRRALEAFDLDPAQWGVNVQPYSGSPANLAVYTALLQPHDRIMGLDLPDGGHLTHGYMSDVKRISATSIFFESMPYKLNPKTGLIDYNQLALTARLFRPRLIIAGTSAYARLIDYARMREVCDEVKAHLLADMAHISGLVAAKVIPSPFKHADIVTTTTHKTLRGARSGLIFYRKGVKAVDPKTGREIPYTFEDRINFAVFPSLQGGPHNHAIAAVAVALKQACTPMFREYSLQVLKNARAMADALLERGYSLVSGGTDNHLVLVDLRPKGLDGARAERVLELVSITANKNTCPGDRSAITPGGLRLGAPALTSRQFREDDFRRVVDFIDEGVNIGLEVKSKTAKLQDFKSFLLKDSETSQRLANLRQRVEQFARAFPMPGFDEH

SEQ ID NO: 6039 - protein, 364 aa, Homo sapiens
MSGPRAGFYRQELNKTVWEVPQRLQGLRPVGSGAYGSVCSAYDARLRQKVAVKKLSRPFQSLIHARRTYRELRLLKHLKHENVIGLLDVFTPATSIEDFSEVYLVTTLMGADLNNIVKCQALSDEHVQFLVYQLLRGLKYIHSAGIIHRDLKPSNVAVNEDCELRILDFGLARQADEEMTGYVATRWYRAPEIMLNWMHYNQTVDIWSVGCIMAELLQGKALFPGSDYIDQLKRIMEVVGTPSPEVLAKISSEHARTYIQSLPPMPQKDLSSIFRGANPLAIDLLGRMLVLDSDQRVSAAEALAHAYFSQYHDPEDEPEAEPYDESVEAKERTLEEWKELTYQEVLSFKPPEPPKPPGSLEIEQ

SEQ ID NO: 6040 - protein, 219 aa, Homo sapiens
MALSWLQRVELALFAAAFLCGAVAAAAMTRTQGSFSGRCPLYGVATLNGSSLALSRPSAPSLCYFVAGASGLLALYCLLLLLFWIYSSCIEDSHRGAIGLRIALAISAIAVFLVLVSACILRFGTRSLCNSIISLNTTISCSEAQKIPWTPPGTALQFYSNLHNAETSSWVNLVLWCVVLVLQVVQWKSEATPYRPLERGDPEWSSETDALVGSRLSHS

SEQ ID NO: 6041 - protein, 533 aa, Homo sapiens
MATSFRTASCWGLLSFKDISMEFTWDEWQLLDSTQKYLYRDVILENYHNLISVGYHGTKPDLIFKLEQGEDPWIINAKISRQSCPDGWEEWYQNNQDELESIERSYACSVLGRLNLSKTHDSSRQRLYNTRGKSLTQNSAPSRSYLRKNPDKFHGYEEPYFLKHQRAHSIEKNCVCSECGKAFRCKSQLIVHLRIHTGERPYECSKCERAFSAKSNLNAHQRVHTGEKPYSCSECEKVFSFRSQLIVHQEIHTGGKPYGCSECGKAYSWKSQLLLHQRSHTGVKPYECSECGKAFSLKSPFVVHQRTHTGVKPHKCSECGKAFRSKSYLLVHIRMHTGEKPYQCSDCGKAFNMKTQLIVHQGVHTGNNPYQCGECGKAFGRKEQLTAHLRAHAGEKPYGCSECGKAFSSKSYLVIHRRTHTGERPYECSLCERAFCGKSQLIIHQRTHSTEKPYECNECEKAYPRKASLQIHQKTHSGEKPFKCSECGKAFTQKSSLSEHQRVHTGEKPWKCSECGKSFCWNSGLRIHRKTHK

SEQ ID NO: 6042 - protein, 333 aa, Homo sapiens
MRIWWLLLAIEICTGNINSQDTCRQGHPGIPGNPGHNGLPGRDGRDGAKGDKGDAGEPGRPGSPGKDGTSGEKGERGADGKVEAKGIKGDQGSRGSPGKHGPKGLAGPMGEKGLRGETGPQGQKGNKGDVGPTGPEGPRGNIGPLGPTGLPGPMGPIGKPGPKGEAGPTGPQGEPGVRGIRGWKGDRGEKGKIGETLVLPKSAFTVGLTVLSKFPSSDMPIKFDKILYNEFNHYDTAAGKFTCHIAGVYYFTYHITVFSRNVQVSLVKNGVKILHTKDAYMSSEDQASGGIVLQLKLGDEVWLQVTGGERFNGLFADEDDDTTFTGFLLFSSP

SEQ ID NO: 6043 - protein, 385 aa, Homo sapiens
MAAALFVLLGFALLGTHGASGAAGFVQAPLSQQRWVGGSVELHCEAVGSPVPEIQWWFEGQGPNDTCSQLWDGARLDRVHIHATYHQHAASTISIDTLVEEDTGTYECRASNDPDRNHLTRAPRVKWVRAQAVVLVLEPGTVFTTVEDLGSKILLTCSLNDSATEVTGHRWLKGGVVLKEDALPGQKTEFKVDSDDQWGEYSCVFLPEPMGTANIQLHGPPRVKAVKSSEHINEGETAMLVCKSESVPPVTDWAWYKITDSEDKALMNGSESRFFVSSSQGRSELHIENLNMEADPGQYRCNGTSSKGSDQAIITLRVRSHLAALWPFLGIVAEVLVLVTIIFIYEKRRKPEDVLDDDDAGSAPLKSSGQHQNDKGKNVRQRNSS

SEQ ID NO: 6044 - protein, 448 aa, Homo sapiens
MDPKYFILILFCGHLNNTFFSKTETITTEKQSQPTLFTSSMSQVLANSQNTTGNPLGQPTQFSDTFSGQSISPAKVTAGQPTPAVYTSSEKPEAHTSAGQPLAYNTKQPTPIANTSSQQAVFTSARQLPSARTSTTQPPKSFVYTFTQQSSSVQIPSRKQITVHNPSTQPTSTVKNSPRSTPGFILDTTSNKQTPQKNNYNSIAAILIGVLLTSMLVAIIIIVLWKCLRKPVLNDQNWAGRSPFADGETPDICMDNIRENEISTKRTSIISLTPWKPSKSTLLADDLEIKLFESSENIEDSNNPKTEKIKDQVNGTSEDSADGSTVGTAVSSSDDADLPPPPPLLDLEGQESNQSDKPTMTIVSPLPNDSTSLPPSLDCLNQDCGDHKSEIIQSFPPLDSLNLPLPPVDFMKNQEDSNLEIQCQEFSIPPNSDQDLNESLPPPPAELL

SEQ ID NO: 6045 - protein, 653 aa, Homo sapiens
MIPPQEASARRREIEDKLKQEEETLSFIRDSLEKSDQLTKNMVSILSSFESRLMKLENSIIPVHKQTENLQRLQENVEKTLSCLDHVISYYHVASDTEKIIREGPTGRLEEYLGSMAKIQKAVEYFQDNSPDSPELNKVKLLFERGKEALESEFRSLMTRHSKVVSPVLILDLISGDDDLEAQEDVTLEHLPESVLQDVIRISRWLVEYGRNQDFMNVYYQIRSSQLDRSIKGLKEHFHKSSSSSGVPYSPAIPNKRKDTPTKKPVKRPGRDDMLDVETDAYIHCVSAFVKLAQSEYQLLADIIPEHHQKKTFDSLIQDALDGLMLEGENIVSAARKAIVRHDFSTVLTVFPILRHLKQTKPEFDQVLQGTAASTKNKLPGLITSMETIGAKALEDFADNIKNDPDKEYNMPKDGTVHELTSNAILFLQQLLDFQETAGAMLASQETSSSATSYSSEFSKRLLSTYICKVLGNLQLNLLSKSKVYEDPALSAIFLHNNYNYILKSLEKSELIQLVAVTQKTAERSYREHIEQQIQTYQRSWLKVTDYIAEKNLPVFQPGVKLRDKERQIIKERFKGFNDGLEELCKIQKAWAIPDTEQRDRIRQAQKTIVKETYGAFLQKFGSVPFTKNPEKYIKYGVEQVGDMIDRLFDTSA

SEQ ID NO: 6046 - protein, 488 aa, Homo sapiens
MAGKGSSGRRPLLLGLLVAVATVHLVICPYTKVEESFNLQATHDLLYHWQDLEQYDHLEFPGVVPRTFLGPVVIAVFSSPAVYVLSLLEMSKFYSQLIVRGVLGLGVIFGLWTLQKEVRRHFGAMVATMFCWVTAMQFHLMFYCTRTLPNVLALPVVLLALAAWLRHEWARFIWLSAFAIIVFRVELCLFLGLLLLLALGNRKVSVVRALRHAVPAGILCLGLTVAVDSYFWRQLTWPEGKVLWYNTVLNKSSNWGTSPLLWYFYSALPRGLGCSLLFIPLGLVDRRTHAPTVLALGFMALYSLLPHKELRFIIYAFPMLNITAARGCSYLLNNYKKSWLYKAGSLLVIGHLVVNAAYSATALYVSHFNYPGGVAMQRLHQLVPPQTDVLLHIDVAAAQTGVSRFLQVNSAWRYDKREDVQPGTGMLAYTHILMEAAPGLLALYRDTHRVLASVVGTTGVSLNLTQLPPFNVHLQTKLVLLERLPRPS

SEQ ID NO: 6047 - protein, 198 aa, Homo sapiens [sequence omitted]

SEQ ID NO: 6048 - protein, 396 aa, Homo sapiens
MGALARALLLPLLAQWLLRAAPELAPAPFTLPLRVAAATNRVVAPTPGPGTPAERHADGLALALEPALASPAGAANFLAMVDNLQGDSGRGYYLEMLIGTPPQKLQILVDTGSSNFAVAGTPHSYIDTYFDTERSSTYRSKGFDVTVKYTQGSWTGFVGEDLVTIPKGFNTSFLVNIATIFESENFFLPGIKWNGILGLAYATLAKPSSSLETFFDSLVTQANIPNVFSMQMCGAGLPVAGSGTNGGSLVLGGIEPSLYKGDIWYTPIKEEWYYQIEILKLEIGGQSLNLDCREYNADKAIVDSGTTLLRLPQKVFDAVVEAVARASLIPEFSDGFWTGSQLACWTNSETPWSYFPKISIYLRDENSSRSFRITILPQKLQVLQCLKFPGLSQQRM

SEQ ID NO: 6049 - protein, 186 aa, Homo sapiens
MVRPKKVCFSESSLPTGDRTRRSYYLNEIQSFAGAEKDARVVGEIAFQLDRRILAYVFPGVTRLYGFTVANIPEKIEQTSTKSLDGSVDERKLRELTQRYLALSARLEKLGYSRDVHPAFSEFLINTYGILKQRPDLRANPLHSSPAALRKLVIDVVPPKFLGDSLLLLNCLCELSKEDGKPLFAW

SEQ ID NO: 6050 - protein, 191 aa, Homo sapiens
MGGSGSRLSKELLAEYQDLTFLTKQEILLAHRRFCELLPQEQRSVESSLRAQVPFEQILSLPELKANPFKERICRVFSTSPAKDSLSFEDFLDLLSVFSDTATPDIKSHYAFRIFDFDDDGTLNREDLSRLVNCLTGEGEDTRLSASEMKQLIDNILEESDIDRDGTINLSEFQHVISRSPDFASSFKIVL

SEQ ID NO: 6051 - protein, 173 aa, Homo sapiens
MVSWMICRLVVLVFGMLCPAYASYKAVKTKNIREYVRWMMYWIVFALFMAAEIVTDIFISWFPFYYEIKMAFVLWLLSPYTKGASLLYRKFVHPSLSRHEKEIDAYIVQAKERSYETVLSFGKRGLNIAASAAVQAATKGTGPGACRTATPRMSVGQILRQSPGRQPGPERSP

SEQ ID NO: 6052 - protein, 772 aa, Homo sapiens
MGDEDDDESCAVELRITEANLTGHEEKVSVENFELLKVLGTGAYGKVFLVRKAGGHDAGKLYAMKVLRKAALVQRAKTQEHTRTERSVLELVRQAPFLVTLHYAFQTDAKLHLILDYVSGGEMFTHLYQRQYFKEAEVRVYGGEIVLALEHLHKLGIIYRDLKLENVLLDSEGHIVLTDFGLSKEFLTEEKERTFSFCGTIEYMAPEIIRSKTGHGKAVDWWSLGILLFELLTGASPFTLEGERNTQAEVSRRILKCSPPFPPRIGPVAQDLLQRLLCKDPKKRLGAGPQGAQEVRNHPFFQGLDWVALAARKIPAPFRPQIRSELDVGNFAEEFTRLEPVYSPPGSPPPGDPRIFQGYSFVAPSILFDHNNAVMTDGLEAPGAGDRPGRAAVARSAMMQDSPFFQQYELDLREPALGQGSFSVCRRCRQRQSGQEFAVKILSRRLEANTQREVAALRLCQSHPNVVNLHEVHHDQLHTYLVLELLRGGELLEHIRKKRHFSESEASQILRSLVSAVSFMHEEAGVVHRDLKPENILYADDTPGAPVKIIDFGFARLRPQSPGVPMQTPCFTLQYAAPELLAQQGYDESCDLWSLGVILYMMLSGQVPFQGASGQGGQSQAAEIMCKIREGRFSLDGEAWQGVSEEAKELVRGLLTVDPAKRLKLEGLRGSSWLQDGSARSSPPLRTPDVLESSGPAVRSGLNATFMAFNRGKREGFFLKSVENAPLAKRRKQKLRSATASRRGSPAPANPGRAPVASKGAPRRANGPLPPS

SEQ ID NO: 6053 - protein, 545 aa, Homo sapiens
MPPFLLLTCLFITGTSVSPVALDPCSAYISLNEPWRNTDHQLDESQGPPLCDNHVNGEWYHFTGMAGDAMPTFCIPENHCGTHAPVWLNGSHPLEGDGIVQRQACASFNGNCCLWNTTVEVKACPGGYYVYRLTKPSVCFHVYCGHFYDICDEDCHGSCSDTSECTCAPGTVLGPDRQTCFDENECEQNNGGCSEICVNLKNSYRCECGVGRVLRSDGKTCEDVEGCHNNNGGCSHSCLGSEKGYQCECPRGLVLSEDNHTCQVPVLCKSNAIEVNIPRELVGGLELFLTNTSCRGVSNGTHVNILFSLKTCGTVVDVVNDKIVASNLVTGLPKQTPGSSGDFIIRTSKLLIPVTCEFPRLYTISEGYVPNLRNSPLEIMSRNHGIFPFTLEIFKDNEFEEPYREALPTLKLRDSLYFGIEPVVHVSGLESLVESCFATPTSKIDEVLKYYLIRDGCVSDDSVKQYTSRDHLAKHFQVPVFKFVGKDHKEVFLHCRVLVCGVLDERSRCAQGCHRRMRRGAGGEDSAGLQGQTLTGGPIRIDWED

SEQ ID NO: 6054 - protein, 524 aa, Homo sapiens
MLTCNKAGSRMVVDAANSNGPFQPVVLLHIRDVPPADQEKLFIQKLRQCCVLFDFVSDPLSDLKWKEVKRAALSEMVEYITHNRNVITEPIYPEVVHMFAVNMFRTLPPSSNPTGAEFDPEEDEPTLEAAWPHLQLVYEFFLRFLESPDFQPNIAKKYIDQKFVLQLLELFDSEDPRERDFLKTTLHRIYGKFLGLRAYIRKQINNIFYRFIYETEHHNGIAELLEILGSIINGFALPLKEEHKIFLLKVLLPLHKVKSLSVYHPQLAYCVVQFLEKDSTLTEPVVMALLKYWPKTHSPKEVMFLNELEEILDVIEPSEFVKIMEPLFRQLAKCVSSPHFQVAERALYYWNNEYIMSLISDNAAKILPIMFPSLYRNSKTHWNKTIHGLIYNALKLFMEMNQKLFDDCTQQFKAEKLKEKLKMKEREEAWVKIENLAKANPQYTVYSQASTMSIPVAMETDGPLFEDVQMLRKTVKDEAHQAQKDPKKDRPLARRKSELPQDPHTKKALEAHCRADELASQDGR

SEQ ID NO: 6055 - protein, 289 aa, Homo sapiens
MKTLPAMLGTGKLFWVFFLIPYLDIWNIHGKESCDVQLYIKRQSEHSILAGDPFELECPVKYCANRPHVTWCKLNGTTCVKLEDRQTSWKEEKNISFFILHFEPVLPNDNGSYRCSANFQSNLIESHSTTLYVTDVKSASERPSKDEMASRPWLLYRLLPLGGLPLLITTCFCLFCCLRRHQGKQNELSDTAGREINLVDAHLKSEQTEASTRQNSQVLLSETGIYDNDPDLCFRMQEGSEVYSNPCLEENKPGIVYASLNHSVIGPNSRLARNVKEAPTEYASICVRS

SEQ ID NO: 6056 - protein, 1437 aa, Homo sapiens
MKDIDIGKEYIIPSPGYRSVRERTSTSGTHRDREDSKFRRTRPLECQDALETAARAEGLSLDASMHSQLRILDEEHPKGKYHHGLSALKPIRTTSKHQHPVDNAGLFSCMTFSWLSSLARVAHKKGELSMEDVWSLSKHESSDVNCRRLERLWQEELNEVGPDAASLRRVVWIFCRTRLILSIVCLMITQLAGFSGPAFMVKHLLEYTQATESNLQYSLLLVLGLLLTEIVRSWSLALTWALNYRTGVRLRGAILTMAFKKILKLKNIKEKSLGELINICSNDGQRMFEAAAVGSLLAGGPVVAILGMIYNVIILGPTGFLGSAVFILFYPAMMFASRLTAYFRRKCVAATDERVQKMNEVLTYIKFIKMYAWVKAFSQSVQKIREEERRILEKAGYFQSITVGVAPIVVVIASVVTFSVHMTLGFDLTAAQAFTVVTVFNSMTFALKVTPFSVKSLSEASVAVDRFKSLFLMEEVHMIKNKPASPHIKIEMKNATLAWDSSHSSIQNSPKLTPKMKKDKRASRGKKEKVRQLQRTEHQAVLAEQKGHLLLDSDERPSPEEEEGKHIHLGHLRLQRTLHSIDLEIQEGKLVGICGSVGSGKTSLISAILGQMTLLEGSIAISGTFAYVAQQAWILNATLRDNILFGKEYDEERYNSVLNSCCLRPDLAILPSSDLTEIGERGANLSGGQRQRISLARALYSDRSIYILDDPLSALDAHVGNHIFNSAIRKHLKSKTVLFVTHQLQYLVDCDEVIFMKEGCITERGTHEELMNLNGDYATIFNNLLLGETPPVEINSKKETSGSQKKSQDKGPKTGSVKKEKAVKPEEGQLVQLEEKGQGSVPWSVYGVYIQAAGGPLAFLVIMALFMLNVGSTAFSTWWLSYWIKQGSGNTTVTRGNETSVSDSMKDNPHMQYYASIYALSMAVMLILKAIRGVVFVKGTLRASSRLHDELFRRILRSPMKFFDTTPTGRILNRFSKDMDEVDVRLPFQAEMFIQNVILVFFCVGMIAGVFPWFLVAVGPLVILFSVLHIVSRVLIRELKRLDNITQSPFLSHITSSIQGLATIHAYNKGQEFLHRYQELLDDNQAPFFLFTCAMRWLAVRLDLISIALITTTGLMIVLMHGQIPPAYAGLAISYAVQLTGLFQFTVRLASETEARFTSVERINHYIKTLSLEAPARIKNKAPSPDWPQEGEVTFENAEMRYRENLPLVLKKVSFTIKPKEKIGIVGRTGSGKSSLGMALFRLVELSGGCIKIDGVRISDIGLADLRSKLSIIPQEPVLFSGTVRSNLDPFNQYTEDQIWDALERTHMKECIAQLPLKLESEVMENGDNFSVGERQLLCIARALLRHCKILILDEATAAMDTETDLLIQETIREAFADCTMLTIAHRLHTVLGSDRIMVLAQGQVVEFDTPSVLLSNDSSRFYAMFAAAENKVAVKG

SEQ ID NO: 6057 - protein, 675 aa, Homo sapiens
MNDISQKAEILLSSSKPVPKTYVPKLGKGDVKDKFEAMQRAREERNQRRSRDEKQRRKEQYIREREWNRRKQEIKEMLASDDEEDVSSKVEKAYVPKLTGTVKGRFAEMEKQRQEEQRKRTEEERKRRIEQDMLEKRKIQRELAKRAEQIEDINNTGTESASEEGDDSLLITVVPVKSYKTSGKMKKNFEDLEKEREEKERIKYEEDKRIRYEEQRPSLKEAKCLSLVMDDEIESEAKKESLSPGKLKLTFEELERQRQENRKKQAEEEARKRLEEEKRAFEEARRQMVNEDEENQDTAKIFKGYRPGKLKLSFEEMERQRREDEKRKAEEEARRRIEEEKKAFAEARRNMVVDDDSPEMYKTISQEFLTPGKLEINFEELLKQKMEEEKRRTEEERKHKLEMEKQEFEQLRQEMGEEEEENETFGLSREYEELIKLKRSGSIQAKNLKSKFEKIGQLSEKEIQKKIEEERARRRAIDLEIKEREAENFHEEDDVDVRPARKSEAPFTHKVNMKARFEQMAKAREEEEQRRIEEQKLLRMQFEQREIDAALQKKREEEEEEEGSIMNGSTAEDEEQTRSGAPWFKKPLKNTSVVDSEPVRFTVKVTGEPKPEITWWFEGEILQDGEDYQYIERGETYCLYLPETFPEDGGEYMCKAVNNKGSAASTCILTIESKN

SEQ ID NO: 6058 - protein, 468 aa, Homo sapiens
MAARLVSRCGAVRAAPHSGPLVSWRRWSGASTDTVYDVVVSGGGLVGAAMACALGYDIHFHDKKILLLEAGPKKVLEKLSETYSNRVSSISPGSATLLSSFGAWDHICNMRYRAFRRMQVWDACSEALIMFDKDNLDDMGYIVENDVIMHALTKQLEAVSDRVTVLYRSKAIRYTWPCPFPMADSSPWVHITLGDGSTFQTKLLIGADGHNSGVRQAVGIQNVSWNYDQSAVVATLHLSEATENNVAWQRFLPSGPIALLPLSDTLSSLVWSTSHEHAAELVSMDEEKFVDAVNSAFWSDADHTDFIDTAGAMLQYAVSLLKPTKVSARQLPPSVARVDAKSRVLFPLGLGHAAEYVRPRVALIGDAAHRVHPLAGQGVNMGFGDISSLAHHLSTAAFNGKDLGSVSHLTGYETERQRHNTALLAATDLLKRLYSTSASPLVLLRTWGLQATNAVSPLKEQIMAFASK

SEQ ID NO: 6059 - protein, 561 aa, Homo sapiens
MRHCINCCIQLLPDGAHKQQVNCQGGPHHGHQACPTCKGENKILFRVDSKQMNLLAVLEVRTEGNENWGGFLRFKKGKRCSLVFGLIIMTLVMASYILSGAHQELLISSPFHYGGFPSNPSLMDSENPSDTKEHHHQSSVNNISYMKDYPSIKLIINSITTRIEFTTRQLPDLEDLKKQELHMFSVIPNKFLPNSKSPCWYEEFSGQNTTDPYLTNSYVLYSKRFRSTFDALRKAFWGHLAHAHGKHFRLRCLPHFYIIGQPKCGTTDLYDRLRLHPEVKFSAIKEPHWWTRKRFGIVRLRDGLRDRYPVEDYLDLFDLAAHQIHQGLQASSAKEQSKMNTIIIGEASASTMWDNNAWTFFYDNSTDGEPPFLTQDFIHAFQPNARLIVMLRDPVERLYSDYLYFASSNKSADDFHEKVTEALQLFENCMLDYSLRACVYNNTLNNAMPVRLQVGLYAVYLLDWLSVFDKQQFLILRLEDHASNVKYTMHKVFQFLNLGPLSEKQEALMTKSPASNARRPEDRNLGPMWPITQKILRDFYRPFNARLAQVLADEAFAWKTT

SEQ ID NO: 6060 - protein, 136 aa, Homo sapiens
MSAALLRRGLELLAASEAPRDPPGQAKPRGAPVKRPRKTKAIQAQKLRNSAKGKVPKSALDEYRKRECRDHLRVNLKFLTRTRSTVAESVSQQILRQNRGRKACDRPVAKTKKKKAEGTVFTEEDFQKFQQEYFGS

SEQ ID NO: 6061 - protein, 345 aa, Homo sapiens
MDGEDIPDFSSLKEETAYWKELSLKYKQSFQEARDELVEFQEGSRELEAELEAQLVQAEQRNRDLQADNQRLKYEVEALKEKLEHQYAQSYKQVSVLEDDLSQTRAIKEQLHKYVRELEQANDDLERAKRATIVSLEDFEQRLNQAIERNAFLESELDEKESLLVSVQRLKDEARDLRQELAVRERQQEVTRKSAPSSPTLDCEKMDSAVQASLSLPATPVGKGTENTFPSPKAIPNGFGTSPLTPSARISALNIVGDLLRKVGALESKLAACRNFAKDQASRKSYISGNVNCGVLNGNGTKFSRSGHTSFFDKGAVNGFDPAPPPPGLGSSRPSSAPGMLPLSV

SEQ ID NO: 6062 - protein, 187 aa, Homo sapiens
MAYSTVQRVALASGLVLALSLLLPKAFLSRGKRQEPPPTPEGYPEETYPIYDLSDCIKRRQETILVDYPDPKELSAEEIAERMGMIEEEESDHLGWESLPTDPRAQEDNSVTSCDPKPETCSCCFHEDEDPAVLAENAGFSADSYPEQEETTKEEWSQDFKDEGLGISTDKAYTGSMLRKRNPQGLE

SEQ ID NO: 6063 - protein, 147 aa, Homo sapiens
MVHLTPEEKSAVTALWGKVNVDEVGGEALGRLLVVYPWTQRFFESFGDLSTPDAVMGNPKVKAHGKKVLGAFSDGLAHLDNLKGTFATLSELHCDKLHVDPENFRLLGNVLVCVLAHHFGKEFTPPVQAAYQKVVAGVANALAHKYH

SEQ ID NO: 6064 - protein, 372 aa, Homo sapiens
MATSPQKSPSVPKSPTPKSPPSRKKDDSFLGKLGGTLARRKKAKEVSELQEEGMNAINLPLSPIPFELDPEDTMLEENEVRTMVDPNSRSDPKLQELMKVLIDWINDVLVGERIIVKDLAEDLYDGQVLQKLFEKLESEKLNVAEVTQSEIAQKQKLQTVLEKINETLKLPPRSIKWNVDSVHAKSLVAILHLLVALSQYFRAPIRLPDHVSIQVVVVQKREGILQSRQIQEEITGNTEALSGRHERDAFDTLFDHAPDKLNVVKKTLITFVNKHLNKLNLEVTELETQFADGVYLVLLMGLLEGYFVPLHSFFLTPDSFEQKVLNVSFAFELMQDGGLEKPKPRPEDIVNCDLKSTLRVLYNLFTKYRNVE

SEQ ID NO: 6065 - protein, 306 aa, Homo sapiens
MRSAAVLALLLCAGQVTALPVNSPMNKGDTEVMKCIVEVISDTLSKPSPMPVSQECFETLRGDERILSILRHQNLLKELQDLALQGAKERAHQQKKHSGFEDELSEVLENQSSQAELKGRSEALAVDGAGKPGAEEAQDPEGKGEQEHSQQKEEEEEMAVVPQGLFRGGKSGELEQEEERLSKEWEDSKRWSKMDQLAKELTAEKRLEGQEEEEDNRDSSMKLSFRARAYGFRGPGPQLRRGWRPSSREDSLEAGLPLQVRGYPEEKKEEEGSANRRPEDQELESLSAIEAELEKVAHQLQALRRG

SEQ ID NO: 6066 - protein, 170 aa, Homo sapiens
MNCRELPLTLWVLISVSTAESCTSRPHITVVEGEPFYLKHCSCSLAHEIETTTKSWYKSSGSQEHVELNPRSSSRIALHDCVLEFWPVELNDTGSYFFQMKNYTQKWKLNVIRRNKHSCFTERQVTSKIVEVKKFFQITCENSYYQTLVNSTSLYKIGPPICRKTSSGLH

SEQ ID NO: 6067 - protein, 915 aa, Homo sapiens
MPSLPAPPAPLLLLGLLLLGSRPARGAGPEPPVLPIRSEKEPLPVRGAAGCTFGGKVYALDETWHPDLGEPFGVMRCVLCACEAPQWGRRTRGPGRVSCKNIKPECPTPACGQPRQLPGHCCQTCPQERSSSERQPSGLSFEYPRDPEHRSYSDRGEPGAEERARGDGHTDFVALLTGPRSQAVARARVSLLRSSLRFSISYRRLDRPTRIRFSDSNGSVLFEHPAAPTQDGLVCGVWRAVPRLSLRLLRAEQLHVALVTLTHPSGEVWGPLIRHRALAAETFSAILTLEGPPQQGVGGITLLTLSDTEDSLHFLLLFRGLLEPRSGGLTQVPLRLQILHQGQLLRELQANVSAQEPGFAEVLPNLTVQEMDWLVLGELQMALEWAGRPGLRISGHIAARKSCDVLQSVLCGADALIPVQTGAAGSASLTLLGNGSLIYQAVGICPGLGARGAHMLLQNELFLNVGTKDFPDGELRGHVAALPYCGHSARHDTLPVPLAGALVLPPVKSQAAGHAWLSLDTHCHLHYEVLLAGLGGSEQGTVTAHLLGPPGTPGPRRLLKGFYGSEAQGVVKDLEPELLRHLAKGMASLMITTKGSPRGELRGQVHIANQCEVGGLRLEAAGAEGVRALGAPDTASAAPPVVPGLPALAPAKPGGPGRPRDPNTCFFEGQQRPHGARWAPNYDPLCSLCTCQRRTVICDPVVCPPPSCPHPVQAPDQCCPVCPEKQDVRDLPGLPRSRDPGEGCYFDGDRSWRAAGTRWHPVVPPFGLIKCAVCTCKGGTGEVHCEKVQCPRLACAQPVRVNPTDCCKQCPVGSGAHPQLGDPMQADGPRGCRFAGQWFPESQSWHPSVPPFGEMSCITCRCGAGVPHCERDDCSLPLSCGSGKESRCCSRCTAHRRPAPETRTDPELEKEAEGS

SEQ ID NO: 6068 - protein, 262 aa, Homo sapiens
MAAASAGATRLLLLLLMAVAAPSRARGSGCRAGTGARGAGAEGREGEACGTVGLLLEHSFEIDDSANFRKRGSLLWNQQDGTLSLSQRQLSEEERGRLRDVAALNGLYRVRIPRRPGALDGLEAGGYVSSFVPACSLVESHLSDQLTLHVDVAGNVVGVSVVTHPGGCRGHEVEDVDLELFNTSVQLQPPTTAPGPETAAFIERLEMEQAQKAKNPQEQKSFFAKYWMYIIPVVLFLMMSGAPDTGGQGGGGGGGGGGGSGR

SEQ ID NO: 6069 - protein, 846 aa, Homo sapiens
MAEPPSPVHCVAAAAPTATVSEKEPFGKLQLSSRDPPGSLSAKKVRTEEKKAPRRVNGEGGSGGNSRQLQPPAAPSPQSYGSPASWSFAPLSAAPSPSSSRSSFSFSAGTAVPSSASASLSQPVPRKLLVPPTLLHAQPHHLLLPAAAAAASANAKSRRPKEKREKERRRHGLGGAREAGGASREENGEVKPLPRDKIKDKIKERDKEKEREKKKHKVMNEIKKENGEVKILLKSGKEKPKTNIEDLQIKKVKKKKKKKHKENEKRKRPKMYSKSIQTICSGLLTDVEDQAAKGILNDNIKDYVGKNLDTKNYDSKIPENSEFPFVSLKEPRVQNNLKRLDTLEFKQLIHIEHQPNGGASVIHAYSNELSHLSPMEMERFAEEFVGLVFSENENSAAFYVMGIVHGAATYLPDFLDYFSFNFPNSPVKMEILGKKDIETTTMSNFHAQVKRTYSHGTYRAGPMRQISLVGAVDEEVGDYFPEFLDMLEESPFLKCTLPWGTLSSLKLQSRKDSDDGPIMWVRPGEQMIPVADMPKSPFKRKRTTNEIKNLQYLPRTSEPREMLFEDRTRAHADHIGQGFERQTTAAVGVLKAVHCGEWPDQPRITKDVICFHAEDFLEVVQRMQLDLHEPPLSQCVQWVDDAKLNQLRREGIRYARIQLYDNDIYFIPRNVVHQFKTVSAVCSLAWHIRLKLYHSEEDTSQNTATHETGTSSDSTSSVLGPHTDNMICAVSKASLDSVFSDKLHSKYELQQIKHEPIASVRIKEEPVNVNIPEKTTALNNMDGKNVKAKLDHVQFAEFKIDMDSKFENSNKDLKEELCPGNLSLVDTRQHSSAHSNQDKKDDDILC

SEQ ID NO: 6070 - protein, 169 aa, Homo sapiens
MANYIHVPPGSPEVPKLNVTVQDQEEHRCREGALSLLQHLRPHWDPQEVTLQLFTDGITNKLIGCYVGNTMEDVVLVRIYGNKTELLVDRDEEVKSFRVLQAHGCAPQLYCTFNNGLCYEFIQGEALDPKHVCNPAIFSLSSLTLCKGKTTRCFGLTGCRGSRLLLSFF

SEQ ID NO: 6071 - protein, 113 aa, Homo sapiens
MLPCLALLLLMELSVCTVAGDGGEEQTLSTEAETWVIVALEEGAGPSIQLQLQEVKTGKASQFFGLMGKRVGGRPLIQPRRKKAYQLEHTFQGLLGKRSLFTEGREDEAQGSE

SEQ ID NO: 6072 - protein, 433 aa, Homo sapiens
MVWKVAVFLSVALGIGAVPIDDPEDGGKHWVVIVAGSNGWYNYRHQADACHAYQIIHRNGIPDEQIVVMMYDDIAYSEDNPTPGIVINRPNGTDVYQGVPKDYTGEDVTPQNFLAVLRGDAEAVKGIGSGKVLKSGPQDHVFIYFTDHGSTGILVFPNEDLHVKDLNETIHYMYKHKMYRKMVFYIEACESGSMMNHLPDNINVYATTAANPRESSYACYYDEKRSTYLGDWYSVNWMEDSDVEDLTKETLHKQYHLVKSHTNTSHVMQYGNKTISTMKVMQFQGMKRKASSPVPLPPVTHLDLTPSPDVPLTIMKRKLMNTNDLEESRQLTEEIQRHLDARHLIEKSVRKIVSLLAASEAEVEQLLSERAPLTGHSCYPEALLHFRTHCFNWHSPTYEYALRHLYVLVNLCEKPYPLHRIKLSMDHVCLGHY

SEQ ID NO: 6073 - protein, 136 aa, Homo sapiens
MASGNARIGKPAPDFKATAVVDGAFKEVKLSDYKGKYVVLFFYPLDFTFVCPTEIIAFSNRAEDFRKLGCEVLGVSVDSQFTHLAWINTPRKEGGLGPLNIPLLADVTRRLSEDYGVLKTDEGIAYSLSRWLEAWQ

SEQ ID NO: 6074 - protein, 538 aa, Homo sapiens
MAGARAAAAAASAGSSASSGNQPPQELGLGELLEEFSRTQYRAKDGSGTGGSKVERIEKRCLELFGRDYCFSVIPNTNGDICGHYPRHIVFLEYESSEKEKDTFESTVQVSKLQDLIHRSKMARCRGRFVCPVILFKGKHICRSATLAGWGELYGRSGYNYFFSGGADDAWADVEDVTEEDCALRSGDTHLFDKVRGYDIKLLRYLSVKYICDLMVENKKVKFGMNVTSSEKVDKAQRYADFTLLSIPYPGCEFFKEYKDRDYMAEGLIFNWKQDYVDAPLSIPDFLTHSLNIDWSQYQCWDLVQQTQNYLKLLLSLVNSDDDSGLLVHCISGWDRTPLFISLLRLSLWADGLIHTSLKPTEILYLTVAYDWFLFGHMLVDRLSKGEEIFFFCFNFLKHITSEEFSALKTQRRKSLPARDGGFTLEDICMLRRKDRGSTTSLGSDFSLVMESSPGATGSFTYEAVELVPAGAPTQAAWLAALSDRETRLQEVRSAFLAAYSSTVGLRAVAPSPSGAIGGLLEQFARGVGLRSISSNAL

SEQ ID NO: 6075 - protein, 125 aa, Homo sapiens
MWPLALVIASLTLALSGVNYPKTLQCANIQLRSDEECRQVYPGKITDNMLCAGTKEGGKDSCEGDSGGPLVCNRTLYGIVSWGDFPCGQPDRPGVYTRVSRYVLWIRETIRKYETQQQKWLKGPQ

SEQ ID NO: 6076 - protein, 735 aa, Homo sapiens
MIPPQEASARRREIEDKLKQEEETLSFIRDSLEKSDQLTKNMVSILSSFESRLMKLENSIIPVHKQTENLQRLQENVEKTLSCLDHVISYYHVASDTEKIIREGPTGRLEEYLGSMAKIQKAVEYFQDNSPDSPELNKVKLLFERGKEALESEFRSLMTRHSKVVSPVLILDLISGDDDLEAQEDVTLEHLPESVLQDVIRISRWLVEYGRNQDFMNVYYQIRSSQLDRSIKGLKEHFHKSSSSSGVPYSPAIPNKRKDTPTKKPVKRPGTIRKAQNLLKQYSQHGLDGKKGGSNLIPLEGLLPCTPRGGLPGPWINAACVCAADISPGHEHDFRVKHLSEALNDKHGPLAGRDDMLDVETDAYIHCVSAFVKLAQSEYQLLADIIPEHHQKKTFDSLIQDALDGLMLEGENIVSAARKAIVRHDFSTVLTVFPILRHLKQTKPEFDQVLQGTAASTKNKLPGLITSMETIGAKALEDFADNIKNDPDKEYNMPKDGTVHELTSNAILFLQQLLDFQETAGAMLASQETSSSATSYSSEFSKRLLSTYICKVLGNLQLNLLSKSKVYEDPALSAIFLHNNYNYILKSLEKSELIQLVAVTQKTAERSYREHIEQQIQTYQRSWLKVTDYIAEKNLPVFQPGVKLRDKERQIIKERFKGFNDGLEELCKIQKAWAIPDTEQRDRIRQAQKTIVKETYGAFLQKFGSVPFTKNPEKYIKYGVEQVGDMIDRLFDTSA

SEQ ID NO: 6077 - protein, 330 aa, Homo sapiens
MSPLSAARAALRVYAVGAAVILAQLLRRCRGGFLEPVFPPRPDRVAIVTGGTDGIGYSTAKHLARLGMHVIIAGNNDSKAKQVVSKIKEETLNDKVEFLYCDLASMTSIRQFVQKFKMKKIPLHVLINNAGVMMVPQRKTRDGFEEHFGLNYLGHFLLTNLLLDTLKESGSPGHSARVVTVSSATHYVAELNMDDLQSSACYSPHAAYAQSKLALVLFTYHLQRLLAAEGSHVTANVVDPGVVNTDVYKHVFWATRLAKKLLGWLLFKTPDEGAWTSIYAAVTPELEGVGGHYLYNEKETKSLHVTYNQKLQQQLWSKSCEMTGVLDVTL

SEQ ID NO: 6078 - protein, 239 aa, Homo sapiens
MGLIWLLLLSLLEPGWPAAGPGARLRRDAGGRGGVYEHLGGAPRRRKLYCATKYHLQLHPSGRVNGSLENSAYSILEITAVEVGIVAIRGLFSGRYLAMNKRGRLYASEHYSAECEFVERIHELGYNTYASRLYRTVSSTPGARRQPSAERLWYVSVNGKGRPRRGFKTRRTQKSSLFLPRVLDHRDHEMVRQLQSGLPRPPGKGVQPRRRRQKQSPDNLEPSHVQASRLGSQLEASAH

SEQ ID NO: 6079 - protein, 442 aa, Homo sapiens
MSAAQGWDRNRRRGGGAAGAGGGGSGAGGGSGGSGGRGTGQLNRFVQLSGRPHLPGKKKIRWDPVRRRFIQSCPIIRIPNRFLRGHRPPPARSGHRCVADNTNLYVFGGYNPDYDESGGPDNEDYPLFRELWRYHFATGVWHQMGTDGYMPRELASMSLVLHGNNLLVFGGTGIPFGESNGNDVHVCNVKYKRWALLSCRGKKPSRIYGQAMAIINGSLYVFGGTTGYIYSTDLHKLDLNTREWTQLKPNNLSCDLPEERYRHEIAHDGQRIYILGGGTSWTAYSLNKIHAYNLETNAWEEIATKPHEKIGFPAARRCHSCVQIKNDVFICGGYNGEVILGDIWKLNLQTFQWVKLPATMPEPVYFHCAAVTPAGCMYIHGGVVNIHENKRTGSLFKIWLVVPSLLELAWEKLLAAFPNLANLSRTQLLHLGLTQGLIERLK

SEQ ID NO: 6080 - protein, 295 aa, Homo sapiens
METPAWPRVPRPETAVARTLLLGWVFAQVAGASGTTNTVAAYNLTWKSTNFKTILEWEPKPVNQVYTVQISTKSGDWKSKCFYTTDTECDLTDEIVKDVKQTYLARVFSYPAGNVESTGSAGEPLYENSPEFTPYLETNLGQPTIQSFEQVGTKVNVTVEDERTLVRRNNTFLSLRDVFGKDLIYTLYYWKSSSSGKKTAKTNTNEFLIDVDKGENYCFSVQAVIPSRTVNRKSTDSPVECMGQEKGEFREIFYIIGAVVFVVIILVIILAISLHKCRKAGVGQSWKENSPLNVS

SEQ ID NO: 6081 - protein, 839 aa, Homo sapiens
MALTQGQVTFRDVAIEFSQEEWTCLDPAQRTLYRDVMLENYRNLASLGISCFDLSIISMLEQGKEPFTLESQVQIAGNPDGWEWIKAVITALSSEFVMKDLLHKGKSNTGEVFQTVMLERQESQDIEGCSFREVQKNTHGLEYQCRDAEGNYKGVLLTQEGNLTHGRDEHDKRDARNKLIKNQLGLSLQSHLPELQLFQYEGKIYECNQVEKSFNNNSSVSPPQQMPYNVKTHISKKYLKDFISSLLLTQGQKANNWGSPYKSNGCGMVFPQNSHLASHQRSHTKEKPYKCYECGKAFRTRSNLTTHQVIHTGEKRYKCNECGKVFSRNSQLSQHQKIHTGEKPYKCNECGKVFTQNSHLVRHRGIHTGEKPYKCNECGKAFRARSSLAIHQATHSGEKPYKCNECGKVFTQNSHLTNHWRIHTGEKPYKCNECGKAFGVRSSLAIHLVIHTGEKPYKCHECGKVFRRNSHLARHQLIHTGEKPYKCNECGKAFRAHSNLTTHQVIHTGEKPYKCNECGKVFTQNSHLANHQRIHTGVKPYMCNECGKAFSVYSSLTTHQVIHTGEKPYKCNECGKVFTQNSHLARHRGIHTGEKPYKCNECGKVFRHNSYLSRHQRIHTGEKPYKYNEYGKAFSEHSNLTTHQVIHTGEKPYKCNECGKVFTQNSHLARHRRVHTGGKPYQCNECGKAFSQTSKLARHQRVHTGEKPYECNQCGKAFSVRSSLTTHQAIHTGKKPYKCNECGKVFTQNSHLARHRGIHTGEKPYKCNECGKAFSQTSKLARHQRIHTGEKPYECGKPFSICSSLTTHQTIHTGGKPYKCNVWKVLKSEFKPCKPSQNS

SEQ ID NO: 6082 - protein, 544 aa, Homo sapiens
MTARTLSLMASLVAYDDSDSEAETEHAGSFNATGQQKDTSGVARPPGQDFASGTLDVPKAGAQPTKHGSCEDPGGYRLPLAQLGRSDWGSCPSQRLQWPGKEPQVTFPIKEPSCSSLWTSHVPASHMPLAAARFKQVKLSRNFPKSSFHAQSESETVGKNGSSFQKKKCEDCVVPYTPRRLRQRQALSTETGKGKDVEPQGPPAGRAPAPLYVGPGVSEFIQPYLNSHYKETTVPRKVLFHLRGHRGPVNTIQWCPVLSKSHMLLSTSMDKTFKVWNAVDSGHCLQTYSLHTEAVRAARWAPCGRRILSGGFDFALHLTDLETGTQLFSGRSDFRITTLKFHPKDHNIFLCGGFSSEMKAWDIRTGKVMRSYKATIQQTLDILFLREGSEFLSSTDASTRDSADRTIIAWDFRTSAKISNQIFHERFTCPSLALHPREPVFLAQTNGNYLALFSTVWPYRMSRRRRYEGHKVEGYSVGCECSPGGDLLVTGSADGRVLMYSFRTASRACTLQGHTQACVGTTYHPVLPSVLATCSWGGDMKIWH

SEQ ID NO: 6083 - protein, 578 aa, Homo sapiens
MGCGLNKLEKRDEKRPGNIYSTLKRPQVETKIDVSYEYRFLEFTTLSAAELPGSSAVRLASLRDLPAQLLELYQQGFSLAALHPFVQPTHEREKTPLEHIFRAILIKKTDRSQKTDLHNEGYILELDCCSSLDHPTDQKLIPEFIKKIQEAASQGLKFVGVIPQYHSSVNSAGSSAPVSTANSTEDARDAKNARGDHASLENEKPGTGDVCSAPAGRNQSPEPSSGPRGEVPLAKQPSSPSGEGDGGELSPQGVSKTLDGPESNPLEVHEEPLSGKMEIFTLFNKPKSHQKCRQYYPVTIPLHVSKNGQTVSGLDANWLEHMSDHFRKGGMLVNAVFYLGIVNDSLHGLTDGVFIFEAVSTEDSKTIQGYDAIVVEQWTVLEGVEVQTDYVPLLNSLAAYGWQLTCVLPTPVVKTTSEGSVSTKQIVFLQRPCLPQKIKKKESKFQWRFSREEMHNRQMRKSKGKLSARDKQQAEENEKNLEDQSSKAGDMGNCVSGQQQEGGVSEEMKGPVQEDKGEQLSPGGLLCGVGVEGEAVQNGPASHSRALVGICTGHSNPGEDARDGDAEEVRELGTVEEN

SEQ ID NO: 6084 - protein, 2155 aa, Homo sapiens
MELQRTSSISGPLSPAYTGQVPYNYNQLEGRFKQLQDEREAVQKKTFTKWVNSHLARVSCRITDLYTDLRDGRMLIKLLEVLSGERLPKPTKGRMRIHCLENVDKALQFLKEQRVHLENMGSHDIVDGNHRLTLGLIWTIILRFQIQDISVETEDNKEKKSAKDALLLWCQMKTAGYPNVNIHNFTTSWRDGMAFNALIHKHRPDLIDFDKLKKSNAHYNLQNAFNLAEQHLGLTKLLDPEDISVDHPDEKSIITYVVTYYHYFSKMKALAVEGKRIGKVLDNAIETEKMIEKYESLASDLLEWIEQTIIILNNRKFANSLVGVQQQLQAFNTYRTVEKPPKFTEKGNLEVLLFTIQSKMRANNQKVYMPREGKLISDINKAWERLEKAEHERELALRNELIRQEKLEQLARRFDRKAAMRETWLSENQRLVSQDNFGFDLPAVEAATKKHEAIETDIAAYEERVQAVVAVARELEAENYHDIKRITARKDNVIRLWEYLLELLRARRQRLEMNLGLQKIFQEMLYIMDWMDEMKVLVLSQDYGKHLLGVEDLLQKHTLVEADIGIQAERVRGVNASAQKFATDGEGYKPCDPQVIRDRVAHMEFCYQELCQLAAERRARLEESRRLWKFFWEMAEEEGWIREKEKILSSDDYGKDLTSVMRLLSKHRAFEDEMSGRSGHFEQAIKEGEDMIAEEHFGSEKIRERIIYIREQWANLEQLSAIRKKRLEEASLLHQFQADADDIDAWMLDILKIVSSSDVGHDEYSTQSLVKKHKDVAEEIANYRPTLDTLHEQASALPQEHAESPDVRGRLSGIEERYKEVAELTRLRKQALQDTLALYKMFSEADACELWIDEKEQWLNNMQIPEKLEDLEVIQHRFESLEPEMNNQASRVAVVNQIARQLMHSGHPSEKEIKAQQDKLNTRWSQFRELVDRKKDALLSALSIQNYHLECNETKSWIREKTKVIESTQDLGNDLAGVMALQRKLTGMERDLVAIEAKLSDLQKEAEKLESEHPDQAQAILSRLAEISDVWEEMKTTLKNREASLGEASKLQQFLRDLDDFQSWLSRTQTAIASEDMPNTLTEAEKLLTQHENIKNEIDNYEEDYQKMRDMGEMVTQGQTDAQYMFLRQRLQALDTGWNELHKMWENRQNLLSQSHAYQQFLRDTKQAEAFLNNQEYVLAHTEMPTTLEGAEAAIKKQEDFMTTMDANEEKINAVVETGRRLVSDGNINSDRIQEKVDSIDDRHRKNRETASELLMRLKDNRDLQKFLQDCQELSLWINEKMLTAQDMSYDEARNLHSKWLKHQAFMAELASNKEWLDKIEKEGMQLISEKPETEAVVKEKLTGLHKMWEVLESTTQTKAQRLFDANKAELFTQSCADLDKWLHGLESQIQSDDYGKDLTSVNILLKKQQMLENQMEVRKKEIEELQSQAQALSQEGKSTDEVDSKRLTVQTKFMELLEPLNERKHNLLASKEIHQFNRDVEDEILWVGERMPLATSTDHGHNLQTVQLLIKKNQTLQKEIQGHQPRIDDIFERSQNIVTDSSSLSAEAIRQRLADLKQLWGLLIEETEKRHRRLEEAHRAQQYYFDAAEAEAWMSEQELYMMSEEKAKDEQSAVSMLKKHQILEQAVEDYAETVHQLSKTSRALVADSHPESERISMRQSKVDKLYAGLKDLAEERRGKLDERHRLFQLNREVDDLEQWIAEREVVAGSHELGQDYEHVTMLQERFREFARDTGNIGQERVDTVNHLADELINSGHSDAATIAEWKDGLNEAWADLLELIDTRTQILAASYELHKFYHDAKEIFGRIQDKHKKLPEELGRDQNTVETLQRMHTTFEHDIQALGTQVRQLQEDAARLQAAYAGDKADDIQKRENEVLEAWKSLLDACESRRVRLVDTGDKFRFFSMVRDLMLWMEDVIRQIEAQEKPRDVSSVELLMNNHQGIKAEIDARNDSFTTCIELGKSLLARKHYASEEIKEKLLQLTEKRKEMIDKWEDRWEWLRLILEVHQFSRDASVAEAWLLGQEPYLSSREIGQSVDEVEKLIKRHEAFEKSAATWDERFSALERLTTLELLEVRRQQEEEERKRRPPSPEPSTKVSEEAESQQQWDTSKGEQVSQNGLPAEQGSPRVSYRSQTYQNYKNFNSRRTASDQPWSGL

SEQ ID NO: 6085 - protein, 955 aa, Homo sapiens
MWAGLLLRAACVALLLPGAPARGYTGRKPPGHFAAERRRLGPHVCLSGFGSGCCPGWAPSMGGGHCTLPLCSFGCGSGICIAPNVCSCQDGEQGATCPETHGPCGEYGCDLTCNHGGCQEVARVCPVGFSMTETAVGIRCTDIDECVTSSCEGHCVNTEGGFVCECGPGMQLSADRHSCQDTDECLGTPCQQRCKNSIGSYKCSCRTGFHLHGNRHSCVDVNECRRPLERRVCHHSCHNTVGSFLCTCRPGFRLRADRVSCEAFPKAVLAPSAILQPRQHPSKMLLLLPEAGRPALSPGHSPPSGAPGPPAGVRTTRLPSPTPRLPTSSPSAPVWLLSTLLATPVPTASLLGNLRPPSLLQGEVMGTPSSPRGPESPRLAAGPSPCWHLGAMHESRSRWTEPGCSQCWCEDGKVTCEKVRCEAACSHPIPSRDGGCCPSCTGCFHSGVVRAEGDVFSPPNENCTVCVCLAGNVSCISPECPSGPCQTPPQTDCCTCVPVRCYFHGRWYADGAVFSGGGDECTTCVCQNGEVECSFMPCPELACPREEWRLGPGQCCFTCQEPTPSTGCSLDDNGVEFPIGQIWSPGDPCELCICQADGSVSCKRTDCVDSCPHPIRIPGQCCPDCSAGCTYTGRIFYNNETFPSVLDPCLSCICLLGSVACSPVDCPITCTYPFHPDGECCPVCRDCNYEGRKVANGQVFTLDDEPCTRCTCQLGEVSCEKVPCQRACADPALLPGDCCSSCPDSLSPLEEKQGLSPHGNVAFSKAGRSLHGDTEAPVNCSSCPGPPTASPSRPVLHLLQLLLRTNLMKTQTLPTSPAGAHGPHSLALGLTATFPGEPGASPRLSPGPSTPPGAPTLPLASPGAPQPPPVTPERSFSASGAQIVSRWPPLPGTLLTEASALSMMDPSPSKTPITLLGPRVLSPTTSRLSTALAATTHPGPQQPPVGASRGEESTM

SEQ ID NO: 6086 - protein, 154 aa, Homo sapiens
MAQSINITELNLPQLEMLKNQLDQEVEFLSTSIAQLKVVQTKYVEAKDCLNVLNKSNEGKELLVPLTSSMYVPGKLHDVEHVLIDVGTGYYVEKTAEDAKDFFKRKIDFLTKQMEKIQPALQEKHAMKQAVMEMMSQKIQQLTALGAAQATAKA

SEQ ID NO: 6087 - protein, 2778 aa, Homo sapiens
MALGKVLAMALVLALAVLGSLSPGARAGDCKGQRQVLREAPGFVTDGAGNYSVNGNCEWLIEAPSPQHRILLDFLFLDTECTYDYLFVYDGDSPRGPLLASLSGSTRPPPIEASSGKMLLHLFSDANYNLLGFNASFRFSLCPGGCQSHGQCQPPGVCACEPGWGGPDCGLQECSAYCGSHGTCASPLGPCRCEPGFLGRACDLHLWENQGAGWWHNVSARDPAFSARIGAAGAFLSPPGLLAVFGGQDLNNALGDLVLYNFSANTWESWDLSPAPAARHSHVAVAWAGSLVLMGGELADGSLTNDVWAFSPLGRGHWELLAPPASSSSGPPGLAGHAAALVDDVWLYVSGGRTPHDLFSSGLFRFRLDSTSGGYWEQVIPAGGRPPAATGHSMVFHAPSRALLVHGGHRPSTARFSVRVNSTELFHVDRHVWTTLKGRDGLQGPRERAFHTASVLGNYMVVYGGNVHTHYQEEKCYEDGIFFYHLGCHQWVSGAELAPPGTPEGRAAPPSGRYSHVAAVLGGSVLLVAGGYSGRPRGDLMAYKVPPFVFQAPAPDYHLDYCSMYTDHSVCSRDPECSWCQGACQAAPPPGTPLGACPAASCLGLGRLLGDCQACLAFSSPTAPPRGPGTLGWCVHNESCLPRPEQARCRGEQISGTVGWWGPAPVFVTSLEACVTQSFLPGLHLLTFQQPPNTSQPDKEEVGRWVAHQEKETRRLQRPGSARLFPLPGRDHKYAVEIQGQLNGSAGPGHSELTLLWDRTGVPGGSEISFFFLEPYRSSSCTSYSSCLGCLADQGCGWCLTSATCHLRQGGAHCGDDGAGGSLLVLVPTLCPLCEEHRDCHACTQDPFCEWHQSTSRKGDAACSRRGRGRGALKSPEECPPLCSQRLTCEDCLANSSQCAWCQSTHTCFLFAAYLARYPHGGCRGWDDSVHSEPRCRSCDGFLTCHECLQSHECGWCGNEDNPTLGRCLQGDFSGPLGGGNCSLWVGEGLGLPVALPARWAYARCPDVDECRLGLARCHPRATCLNTPLSYECHCQRGYQGDGISHCNRTCLEDCGHGVCSGPPDFTCVCDLGWTSDLPPPTPAPGPPAPRCSRDCGCSFHSHCRKRGPGFCDECQDWTWGEHCERCRPGSFGNATGSRGCRPCQCNGHGDPRRGHCDNLSGLCFCQDHTEGAHCQLCSPGYYGDPRAGGSCFRECGGRALLTNVSSVALGSRRVGGLLPPGGGAARAGPGLSYCVWVVSATEELQPCAPGTLCPPLTLTFSPDSSTPCTLSYVLAFDGFPRFLDTGVVQSDRSLIAAFCGQRRDRPLTVQALSGLLVLHWEANGSSSWGFNASVGSARCGSGGPGSCPVPQECVPQDGAAGAGLCRCPQGWAGPHCRMALCPENCNAHTGAGTCNQSLGVCICAEGFGGPDCATKLDGGQLVWETLMDSRLSADTASRFLHRLGHTMVDGPDATLWMFGGLGLPQGLLGNLYRYSVSERRWTQMLAGAEDGGPGPSPRSFHAAAYVPAGRGAMYLLGGLTAGGVTRDFWVLNLTTLQWRQEKAPQTVELPAVAGHTLTARRGLSLLLVGGYSPENGFNQQLLEYQLATGTWVSGAQSGTPPTGLYGHSAVYHEATDSLYVFGGFRFHVELAAPSPELYSLHCPDRTWSLLAPSQGAKRDRMRNVRGSSRGLGQVPGEQPGSWGFREVRKKMALWAALAGTGGFLEEISPHLKEPRPRLFHASALLGDTMVVLGGRSDPDEFSSDVLLYQVNCNAWLLPDLTRSASVGPPMEESVAHAVAAVGSRLYISGGFGGVALGRLLALTLPPDPCRLLSSPEACNQSGACTWCHGACLSGDQAHRLGCGGSPCSPMPRSPEECRRLRTCSECLARHPRTLQPGDGEASTPRCKWCTNCPEGACIGRNGSCTSENDCRINQREVFWAGNCSEAACGAADCEQCTREGKCMWTRQFKRTGETRRILSVQPTYDWTCFSHSLLNVSPMPVESSPPLPCPTPCHLLPNCTSCLDSKGADGGWQHCVWSSSLQQCLSPSYLPLRCMAGGCGRLLRGPESCSLGCAQATQCALCLRRPHCGWCAWGGQDGGGRCMEGGLSGPRDGLTCGRPGASWAFLSCPPEDECANGHHDCNETQNCHDQPHGYECSCKTGYTMDNMTGLCRPVCAQGCVNGSCVEPDHCRCHFGFVGRNCSTECRCNRHSECAGVGARDHCLLCRNHTKGSHCEQCLPLFVGSAVGGGTCRPCHAFCRGNSHICISRKELQMSKGEPKKYSLDPEEIENWVTEGPSEDEAVCVNCQNNSYGEKCESCLQGYFLLDGKCTKCQCNGHADTCNEQDGTGCPCQNNTETGTCQGSSPSDRRDCYKYQCAKCRESFHGSPLGGQQCYRLISVEQECCLDPTSQTNCFHEPKRRALGPGRTVLFGVQPKFTNVDIRLTLDVTFGAVDLYVSTSYDTFVVRVAPDTGVHTVHIQPPPAPPPPPPPADGGPRGAGDPGGAGASSGPGAPAEPRVREVWPRGLITYVTVTEPSAVLVVRGVRDRLVITYPHEHHALKSSRFYLLLLGVGDPSGPGANGSADSQGLLFFRQDQAHIDLFVFFSVFFSCFFLFLSLCVLLWKAKQALDQRQEQRRHLQEMTKMASRPFAKVTVCFPPDPTAPASAWKPAGLPPPAFRRSEPFLAPLLLTGAGGPWGPMGGGCCPPAIPATTAGLRAGPITLEPTEDGMAGVATLLLQLPGGPHAPNGACLGSALVTLRHRLHEYCGGGGGAGGSGHGTGAGRKGLLSQDNLTSMSL

SEQ ID NO: 6088 - protein, 346 aa, Homo sapiens
MAPRSLLLLLSGALALTDTWAGSHSLRYFSTAVSRPGRGEPRYIAVEYVDDTQFLRFDSDAAIPRMEPREPWVEQEGPQYWEWTTGYAKANAQTDRVALRNLLRRYNQSEAGSHTLQGMNGCDMGPDGRLLRGYHQHAYDGKDYISLNEDLRSWTAADTVAQITQRFYEAEEYAEEFRTYLEGECLELLRRYLENGKETLQRADPPKAHVAHHPISDHEATLRCWALGFYPAEITLTWQRDGEEQTQDTELVETRPAGDGTFQKWAAVVVPPGEEQRYTCHVQHEGLPQPLILRWEQSPQPTIPIVGIVAGLVVLGAVVTGAVVAAVMWRKKSSDRNRGSYSQAAV

SEQ ID NO: 6089 - protein, 138 aa, Homo sapiens
MVAPAARVFLRAVRAALTSTVPDLLCLLARGSPRGLASGRLPLAVHSAQHGPGSGAPWLRIARRALRFVLSKHWGDDCYLTNRLWQDLKPPSHVENGQELRLAPPVQWALQVQGNQLQTAVLCLRMAPPEPAGSRQRI

SEQ ID NO: 6090 - protein, 529 aa, Homo sapiens
MALKWTSVLLLIHLGCYFSSGSCGKVLVWTGEYSHWMNMKTILKELVQRGHEVTVLASSASILFDPNDAFTLKLEVYPTSLTKTEFENIIMQQVKRWSDIQKDSFWLYFSQEQEILWEFHDIFRNFCKDVVSNKKVMKKLQESRFDIIFADAFFPCGELLAALLNIPFVYSLCFTPGYTIERHSGGLIFPPSYIPVVMSKLSDQMTFMERVKNMIYVLYFDFWFQMCDMKKWDQFYSEVLGRPTTLFETMGKADIWLMRNSWSFQFPHPFLPNIDFVGGLHCKPAKPLPKEMEEFVQSSGENGVVVFSLGSVISNMTAERANVIATALAKIPQKVLWRFDGNKPDALGLNTRLYKWIPQNDLLGLPKTRAFITHGGANGIYEAIYHGIPMVGIPLFWDQPDNIAHMKAKGAAVRLDFHTMSSTDLLNALKTVINDPSYKENVMKLSIIQHDQPVKPLHRAVFWIEFVMCHKGAKHLRVAARDLTWFQYHSLDVIGFLLACVATVIFVVTKFCLFCFWKFARKGKKGKRD

SEQ ID NO: 6091 - protein, 150 aa, Homo sapiens
MRKTRLWGLLWMLFVSELRAATKLTEEKYELKEGQTLDVKCDYTLEKFASSQKAWQIIRDGEMPKTLACTERPSKNSHPVQVGRIILEDYHDHGLLRVRMVNLQVEDSGLYQCVIYQPPKEPHMLFDRIRLVVTKGFRCSTLSFSWLVDS

SEQ ID NO: 6092 - protein, 945 aa, Homo sapiens
MGARSGARGALLLALLLCWDPRLSQAGTDSGSEVLPDSFPSAPAEPLPYFLQEPQDAYIVKNKPVELRCRAFPATQIYFKCNGEWVSQNDHVTQEGLDEATGLRVREVQIEVSRQQVEELFGLEDYWCQCVAWSSAGTTKSRRAYVRIAYLRKNFDQEPLGKEVPLDHEVLLQCRPPEGVPVAEVEWLKNEDVIDPTQDTNFLLTIDHNLIIRQARLSDTANYTCVAKNIVAKRRSTTATVIVYVNGGWSSWAEWSPCSNRCGRGWQKRTRTCTNPAPLNGGAFCEGQAFQKTACTTICPVDGAWTEWSKWSACSTECAHWRSRECMAPPPQNGGRDCSGTLLDSKNCTDGLCMQNKKTLSDPNSHLLEASGDAALYAGLVVAIFVVVAILMAVGVVVYRRNCRDFDTDITDSSAALTGGFHPVNFKTARPSNPQLLHPSVPPDLTASAGIYRGPVYALQDSTDKIPMTNSPLLDPLPSLKVKVYSSSTTGSGPGLADGADLLGVLPPGTYPSDFARDTHFLHLRSASLGSQQLLGLPRDPGSSVSGTFGCLGGRLSIPGTGVSLLVPNGAIPQGKFYEMYLLINKAESTLPLSEGTQTVLSPSVTCGPTGLLLCRPVILTMPHCAEVSARDWIFQLKTQAHQGHWEEVVTLDEETLNTPCYCQLEPRACHILLDQLGTYVFTGESYSRSAVKRLQLAVFAPALCTSLEYSLRVYCLEDTPVALKEVLELERTLGGYLVEEPKPLMFKDSYHNLRLSLHDLPHAHWRSKLLAKYQEIPFYHIWSGSQKALHCTFTLERHSLASTELTCKICVRQVEGEGQIFQLHTTLAETPAGSLDTLCSAPGSTVTTQLGPYAFKIPLSIRQKICNSLDAPNSRGNDWRMLAQKLSMDRYLNYFATKASPTGVILDLWEALQQDDGDLNSLASALEEMGKSEMLVAVATDGDC

SEQ ID NO: 6093 - protein, 78 aa, Homo sapiens
MALIRKTFYFLFAMFFILVQLPSGCQAGLDFSQPFPSGEFAVCESCKLGRGKCRKECLENEKPDGNCRLNFLCCRQRI

SEQ ID NO: 6094 - protein, 65 aa, Homo sapiens
MRTFLFLFAVLFFLTPAKNAFFDEKCNKLKGTCKNNCGKNEELIALCQKSLKCCRTIQPCGSIID

SEQ ID NO: 6095 - protein, 521 aa, Homo sapiens
MADNEKLDNQRLKNFKNKGRDLETMRRQRNEVVVELRKNKRDEHLLKRRNVPHEDICEDSDIDGDYRVQNTSLEAIVQNASSDNQGIQLSAVQAARKLLSSDRNPPIDDLIKSGILPILVHCLERDDNPSLQFEAAWALTNIASGTSEQTQAVVQSNAVPLFLRLLHSPHQNVCEQAVWALGNIIGDGPQCRDYVISLGVVKPLLSFISPSIPITFLRNVTWVMVNLCRHKDPPPPMETIQEILPALCVLIHHTDVNILVDTVWALSYLTDAGNEQIQMVIDSGIVPHLVPLLSHQEVKVQTAALRAVGNIVTGTDEQTQVVLNCDALSHFPALLTHPKEKINKEAVWFLSNITAGNQQQVQAVIDANLVPMIIHLLDKGDFGTQKEAAWAISNLTISGRKDQVAYLIQQNVIPPFCNLLTVKDAQVVQVVLDGLSNILKMAEDEAETIGNLIEECGGLEKIEQLQNHENEDIYKLAYEIIDQFFSSDDIDEDPSLVPEAIQGGTFGFNSSANVPTEGFQF

SEQ ID NO: 6096 - protein, 845 aa, Homo sapiens
MLSGVWFLSVLTVAGILQTESRKTAKDICKIRCLCEEKENVLNINCENKGFTTVSLLQPPQYRIYQLFLNGNLLTRLYPNEFVNYSNAVTLHLGNNGLQEIRTGAFSGLKTLKRLHLNNNKLEILREDTFLGLESLEYLQADYNYISAIEAGAFSKLNKLKVLILNDNLLLSLPSNVFRFVLLTHLDLRGNRLKVMPFAGVLEHIGGIMEIQLEENPWNCTCDLLPLKAWLDTITVFVGEIVCETPFRLHGKDVTQLTRQDLCPRKSASDSSQRGSHADTHVQRLSPTMNPALNPTRAPKASRPPKMRNRPTPRVTVSKDRQSFGPIMVYQTKSPVPLTCPSSCVCTSQSSDNGLNVNCQERKFTNISDLQPKPTSPKKLYLTGNYLQTVYKNDLLEYSSLDLLHLGNNRIAVIQEGAFTNLTSLRRLYLNGNYLEVLYPSMFDGLQSLQYLYLEYNVIKEIKPLTFDALINLQLLFLNNNLLRSLPDNIFGGTALTRLNLRNNHFSHLPVKGVLDQLPAFIQIDLQENPWDCTCDIMGLKDWTEHANSPVIINEVTCESPAKHAGEILKFLGREAICPDSPNLSDGTVLSMNHNTDTPRSLSVSPSSYPELHTEVPLSVLILGLLVVFILSVCFGAGLFVFVLKRRKGVPSVPRNTNNLDVSSFQLQYGSYNTETHDKTDGHVYNYIPPPVGQMCQNPIYMQKEGDPVAYYRNLQEFSYSNLEEKKEEPATPAYTISATELLEKQATPREPELLYQNIAERVKELPSAGLVHYNFCTLPKRQFAPSYESRRQNQDRINKTVLYGTPRKCFVGQSKPNHPLLQAKPQSEPDYLEVLEKQTAISQL

SEQ ID NO: 6097 - protein, 712 aa, Homo sapiens
MAAAGLVAVAAAAEYSGTVASGGNLPGVHCGPSSGAGPGFGPGSWSRSLDRALEEAAVTGVLSLSGRKLREFPRGAANHDLTDTTRADLSRNRLSEIPIEACHFVSLENLNLYQNCIRYIPEAILNLQALTFLNISRNQLSTLPVHLCNLPLKVLIASNNKLVSLPEEIGHLRHLMELDVSCNEIQTIPSQIGNLEALRDLNVRRNHLVHLPEELAELPLIRLDFSCNKITTIPVCYRNLRHLQTITLDNNPLQSPPAQICIKGKVHIFKYLNIQACKIAPDLPDYDRRPLGFGSCHEELYSSRPYGALDSGFNSVDSGDKRWSGNEPTDEFSDLPLRVAEITKEQRLRRESQYQENRGSLVVTNGGVEHDLDQIDYIDSCTAEEEEAEVRQPKGPDPDSLSSQFMAYIEQRRISHEGSPVKPVAIREFQKTEDMRRYLHQNRVPAEPSSLLSLSASHNQLSHTDLELHQRREQLVERTRREAQLAALQYEEEKIRTKQIQRDAVLDFVKQKASQSPQKQHPLLDGVDGECPFPSRRSQHTDDSALCMSLSGLNQVGCAATLPHSSAFTPLKSDDRPNALLSSPATETVHHSPAYSFPAAIQRNQPQRPESFLFRAGVRAETNKGHASPLPPSAAPTTDSTDSITGQNSRQREEELELIDQLRKHIEYRLKVSLPCDLGAALTDGVVLCHLANHVRPRSVPSIHVPSPAVVS

SEQ ID NO: 6098 - protein, 2353 aa, Homo sapiens
MKQRKGQGSGGSRGRKKRGLSDISPSTSLPPLVEGQLRCFLKLTVNRVIWKIAKPPTCVLVRVRWWGETSDGTLFCPRDALQTEPKAVRTTTRYAIRCGPKQFTSYLTDMAVLVLEVITKLDGLPIGRVQINGLAQLSPTHQINGFFTIVSSTSKKLGELQVSLALEPLSETYDSYHPLPTTDMTENVLLSKQGFRENTEPSSTQFQVPSRPRDIHTIKIDGKELAANSSRSTTPRGKDHVCFAENPDTIKDSSFGLQHSLNSGQSLESVTLKGRAPRKQMSLLNSSEFQPQIRTVAKSHSDSCILSSNNLPTKDLLSALLEQGNKLRNAMVISAMKSSPETSMLLDQVHPPINEDSLRASTQIRAFSRNRFKDHIEDHLLPSTENTFWRHDTKADTRAIQLLLGSAELSQGNFWDGLGSPPDSPSPGSDVYCISELNDPQYDQSLLENLFYTAPKSDTSISDFLSEEDDIVPSKKISQSTALARSSKVLESSDHKLKKRSAGKRNRNLVEQQMLSETPEDAQTMTLSVDRLALLGRTHSVRIIIETMGVPPDSPQMTPGKKSYAGPPPKVTTAKKRTFFVEYHFPVGFSESGLGKTALITEVVRLASSKITDGKVKFQQRFVFPVQFGGPMIEHWWNSNLTFQIYVKKTPQKKPEVIGSVSLSLRAVIQSELLSFSDQLPVQQENGQSPFGPLKVTMELITDNKDFTGINTKLSGNTHYTPLCAPTSPNKALPELNQDMTCTKNPQNLNQIHEETAKKAQNLVLPNRKSPSPVAPHPSTFVATPASHNLVNQTNGTTKESALLLHVLLMVPDGKDFISGESEKQSPCNVYLNCKLFSTEEVTRSVIAWGTTQPVFNFSQVIPVSLSSKYLERLKNNVMVIETWNKVRSPGQDKLLGLVKLPLHQFYMSFKDAKISRLLLDAQYPVVAVDSYMPVIDVFSGHQNGSLRVFLAMGSSNQIMALQRLKNEEGTLPPFSPRPAHFLDQPTAASVAMAEDRGNGLMEHCFEIHIEMVKGLAPLQATVWGEADCYVQYYFPVQHSQSSVLKGPEFLENGITLKPFRTATTLCVPDPIFNSEHHHSLLLPAEVPVQRLLLSAFSAQGLVPGGGVQFEIWCRYYYPNVRDQKVAKGTLPLSRICAMVTTQHREDVGIQTFNLPLTPRIENRKELRNQSSGLLDVGLRYRRSPRTAEGVLAARTVSISVQIIRACGLQAAAKALAEREPALQFSATVGVNASVTTHLSFLPQGEQRRTHPVACSFCPEFSHHVEFTCNLVTQHCSGEACFLAELLEFAEVIFAVYHENTKSASDIISIESCKEYLLGVVKVPTKELLIKRSGITGWYPIILPEDGGLPHGLELMQKIVGGLELSISFTHRGDRERVLEAAEHLGWSFENSLKDFVRMDEGEPATVTISTPRLWLPIHCVLLAGHNHIHKNTYCYLRYKFYDHEAFWTPLKKPKESVNKKQIMVTFKASKRAEVTRGPSLLWYFREERLEIQVWRAYGNDSVERPHQTDSWIGSAYVDLARLGERSARTLTVSGVYPLFGRNASNLSGAALRVHVVLSSLSSHLEPTHELDSMDCSSHSESEQLPRRNDEVQLSPPEVISCHQKSPASTQVPCSSTTAEVRLTQEGPADLDGTFAVSILVERAMHLSLKGSPLTERKVSIPSCCVSFATADESSPVYTQVVENTDSPIWNFQQQSRLSKELLLDPQQTLVFKVWHKGDEERVIGFASVDLSPLLSGFQFVCGWYNITDFSGECQGQIKVAVSPLESLIHFKEERQARRGVETSKSLIPIYSPFSFPASDTYAAFSSHMARQTLDQLAHASSKELDFSSPGRSDTTRSQASRHEEHVQNIRRFHESLHLQGEAPLPCDDKLTTSPLSSQTSILTSLRKNLSELDQIQRYFRQKLTKPFLPLSPQTQTAISQHQESCRDHLGPGASSLDPGSQCILEKSSNLVLQVSSLITDLQTITRDSQAALSSHRARSRSNKATTLPDAQDTEALQERCTMPDEPLVRAPDKGTDSPSPPPLEETSNGGRMLHESLRHAVPITRMQSSEDTEAGPAYSDEDYEEDIIEPRTLNEITTVTDKTSPWSSVISDTSEVISPQPDEVQREGPSCPSPGPFCREELMVKSSFLSSPERAVNPHLPRQGSPSQSLVACECEASKARVGGESASANPQPIPCPTLSGAQQSSTFVGWSSPQTDQNKEPKSEAPAENEAATSELGDSADSFKKLPLNLASQSRRENHKGPPIDSSDIRQRQVTTGSETSTKQSLLLPGPIVVPNFFLPPQQLEASLRMLSLSATLPPAATTDQDKSEATRGALSQRPCRPRPNSLPLNLPEEETLRIARIFSSQYSQKD

SEQ ID NO: 6099 - protein, 354 aa, Homo sapiens
MGEQPIFSTRAHVFQIDPNTKKNWVPTSKHAVTVSYFYDSTRNVYRIISLDGSKAIINSTITPNMTFTKTSQKFGQWADSRANTVYGLGFSSEHHLSKFAEKFQEFKEAARLAKEKSQEKMELTSTPSQESAGGDLQSPLTPESINGTDDERTPDVTQNSEPRAEPTQNALPFSHSSAISKHWEAELATLKGNNAKLTAALLESTANVKQWKQQLAAYQEEAERLHKRVTELECVSSQANAVHTHKTELNQTIQELEETLKLKEEEIERLKQEIDNARELQEQRDSLTQKLQEVEIRNKDLEGQLSDLEQRLEKSQNEQEAFRNNLKTLLEILDGKIFELTELRDNLAKLLECS

SEQ ID NO: 6100 - protein, 382 aa, Homo sapiens
MALQGISVVELSGLAPGPFCAMVLADFGARVVRVDRPGSRYDVSRLGRGKRSLVLDLKQPRGAAVLRRLCKRSDVLLEPFRRGVMEKLQLGPEILQRENPRLIYARLSGFGQSGSFCRLAGHDINYLALSGVLSKIGRSGENPYAPLNLLADFAGGGLMCALGIIMALFDRTRTGKGQVIDANMVEGTAYLSSFLWKTQKLSLWEAPRGQNMLDGGAPFYTTYRTADGEFMAVGAIEPQFYELLIKGLGLKSDELPNQMSMDDWPEMKKKFADVFAEKTKAEWCQIFDGTDACVTPVLTFEEVVHHDHNKERGSFITSEEQDVSPRPAPLLLNTPAIPSFKRDPFIGEHTEEILEEFGFSREEIYQLNSDKIIESNKVKASL

SEQ ID NO: 6101 - protein, 879 aa, Homo sapiens
MTAIKHALQRDIFTPNDERLLSIVNVCKAGKKKKNCFLCATVTTERPVQVKVVKVKKSDKGDFYKRQIAWALRDLAVVDAKDAIKENPEFDLHFEKIYKWVASSTAEKNAFISCIWKLNQRYLRKKIDFVNVSSQLLEESVPSGENQSVTGGDEEVVDEYQELNAREEQDIEIMMEGCEYAISNAEAFAEKLSRELQVLDGANIQSIMASEKQVNILMKLLDEALKEVDQIELKLSSYEEMLQSVKEQMDQISESNHLIHLSNTNNVKLLSEIEFLVNHMDLAKGHIKALQEGDLASSRGIEACTNAADALLQCMNVALRPGHDLLLAVKQQQQRFSDLRELFARRLASHLNNVFVQQGHDQSSTLAQHSVELTLPNHHPFHRDLLRYAKLMEWLKSTDYGKYEGLTKNYMDYLSRLYEREIKDFFEVAKIKMTGTTKESKKFGLHGSSGKLTGSTSSLNKLSVQSSGNRRSQSSSLLDMGNMSASDLDVADRTKFDKIFEQVLSELEPLCLAEQDFISKFFKLQQHQSMPGTMAEAEDLDGGTLSRQHNCGTPLPVSSEKDMIRQMMIKIFRCIEPELNNLIALGDKIDSFNSLYMLVKMSHHVWTAQNVDPASFLSTTLGNVLVTVKRNFDKCISNQIRQMEEVKISKKSKVGILPFVAEFEEFAGLAESIFKNAERRGDLDKAYTKLIRGVFVNVEKVANESQKTPRDVVMMENFHHIFATLSRLKISCLEAEKKEAKQKYTDHLQSYVIYSLGQPLEKLNHFFEGVEARVAQGIREEEVSYQLAFNKQELRKVIKEYPGKEVKKGLDNLYKKVDKHLCEEENLLQVVWHSMQDEFIRQYKHFEGLIARCYPGSGVTMEFTIQDILDYCSSIAQSH

SEQ ID NO: 6102 - protein, 71 aa, Homo sapiens
MASNNTASIAQARKLVEQLKMEANIDRIKVSKAAADLMAYCEAHAKEDPLLTPVPASENPFREKKFFCAIL

SEQ ID NO: 6103 - protein, 338 aa, Homo sapiens
MAAMAVALRGLGGRFRWRTQAVAGGVRGAARGAAAGQRDYDLLVVGGGSGGLACAKEAAQLGRKVAVVDYVEPSPQGTRWGLGGTCVNVGCIPKKLMHQAALLGGLIQDAPNYGWEVAQPVPHDWRKMAEAVQNHVKSLNWGHRVQLQDRKVKYFNIKASFVDEHTVCGVAKGGKEILLSADHIIIATGGRPRYPTHIEGALEYGITSDDIFWLKESPGKTLVVGASYVALECAGFLTGIGLDTTIMMRSIPLRGFDQQMSSMVIEHMASHGTRFLRGCAPSRVRRLPDGQLQVTWEDSTTGKEDTGTFDTVLWAIAPCISACLPTTVGHAGKNQRRD

SEQ ID NO: 6104 - protein, 171 aa, Homo sapiens
MEPGPALAWLLLLSLLADCLKAAQSRDFTVKDIIYLHPSTTPYPGGFKCFTCEKAADNYECNRWAPDIYCPRETRYCYTQHTMEVTGNSISVTKRCVPLEECLSTGCRDSEHEGHKVCTSCCEGNICNLPLPRNETDATFATTSPINQTNGHPRCMSVIVSCLWLWLGLML

SEQ ID NO: 6105 - protein, 192 aa, Homo sapiens
MAAQIPIVATTSTPGIVRNSKKRPASPSHNGSSGGGYGASKKKKASASSFAQGISMEAMSENKMVPSEFSTGPVEKAAKPLPFKDPNFVHSGHGGAVAGKKNRTWKNLKQILASERALPWQLNDPNYFSIDAPPSFKPAKKYSDVSGLLANYTDPQSKLRFSTIEEFSYIRRLPSDVVTGYLALRKATSIVP

SEQ ID NO: 6106 - protein, 1067 aa, Homo sapiens
MNSMDRHIQQTNDRLQCIKQHLQNPANFHNAATELLDWCGDPRAFQRPFEQSLMGCLTVVSRVAAQQGFDLDLGYRLLAVCAANRDKFTPKSAALLSSWCEELGRLLLLRHQKSRQSDPPGKLPMQPPLSSMSSMKPTLSHSDGSFPYDSVPWQQNTNQPPGSLSVVTTVWGVTNTSQSQVLGNPMANANNPMNPGGNPMASGMTTSNPGLNSPQFAGQQQQFSAKAGPAQPYIQQSMYGRPNYPGSGGFGASYPGGPNAPAGMGIPPHTRPPADFTQPAAAAAAAAVAAAAATATATATATVAALQETQNKDINQYGPMGPTQAYNSQFMNQPGPRGPASMGGSMNPASMAAGMTPSGMSGPPMGMNQPRPPGISPFGTHGQRMPQQTYPGPRPQSLPIQNIKRPYPGEPNYGNQQYGPNSQFPTQPGQYPAPNPPRPLTSPNYPGQRMPSQPSSGQYPPPTVNMGQYYKPEQFNGQNNTFSGSSYSNYSQGNVNRPPRPVPVANYPHSPVPGNPTPPMTPGSSIPPYLSPSQDVKPPFPPDIKPNMSALPPPPANHNDELRLTFPVRDGVVLEPFRLEHNLAVSNHVFHLRPTVHQTLMWRSDLELQFKCYHHEDRQMNTNWPASVQVSVNATPLTIERGDNKTSHKPLHLKHVCQPGRNTIQITVTACCCSHLFVLQLVHRPSVRSVLQGLLKKRLLPAEHCITKIKRNFSSVAASSGNTTLNGEDGVEQTAIKVSLKCPITFRRIQLPARGHDCKHVQCFDLESYLQLNCERGTWRCPVCNKTALLEGLEVDQYMWGILNAIQHSEFEEVTIDPTCSWRPVPIKSDLHIKDDPDGIPSKRFKTMSPSQMIMPNVMEMIAALGPGPSPYPLPPPPGGTNSNDYSSQGNNYQGHGNFDFPHGNPGGTSMNDFMHGPPQLSHPPDMPNNMAALEKPLSHPMQETMPHAGSSDQPHPSIQQGLHVPHPSSQSGPPLHHSGAPPPPPSQPPRQPPQAAPSSHPHSDLTFNPSSALEGQAGAQGASDMPEPSLDLLPELTNPDELLSYLDPPDLPSNSNDDLLSLFENN

SEQ ID NO: 6107 - protein, 765 aa, Homo sapiens
MPRSPGTRLKPAKYIPVATAAALLVGSSTLFFVFTCPWLTRAVSPAVPVYNGIIFLFVLANFSMATFMDPGVFPRADEDEDKEDDFRAPLYKNVDVRGIQVRMKWCATCHFYRPPRCSHCSVCDNCVEDFDHHCPWVNNCIGRRNYRYFFLFLLSLSAHMVGVVAFGLVYVLNHAEGLGAAHTTITMAVMCVAGLFFIPVIGLTGFHVVLVTRGRTTNEQVTGKFRGGVNPFTRGCCGNVEHVLCSPLAPRYVVEPPRLPLAVSLKPPFLRPELLDRAAPLKVKLSDNGLKAGLGRSKSKGSLDRLDEKPLDLGPPLPPKIEAGTFSSDLQTPRPGSAESALSVQRTSPPTPAMYKFRPAFPTGPKVPFCGPGEQVPGPDSLTLGDDSIRSLDFVSEPSLDLPDYGPGGLHAAYPPSPPLSASDAFSGALRSLSLKASSRRGGDHVALQPLRSEGGPPTPHRSIFAPHALPNRNGSLSYDSLLNPGSPGGHACPAHPAVGVAGYHSPYLHPGATGDPPRPLPRSFSPVLGPRPREPSPVRYDNLSRTIMASIQERKDREERERLLRSQADSLFGDSGVYDAPSSYSLQQASVLSEGPRGPALRYGSRDDLVAGPGFGGARNPALQTSLSSLSSSVSRAPRTSSSSLQADQASSNAPGPRPSSGSHRSPARQGLPSPPGTPHSPSYAGPKAVAFIHTDLPEPPPSLTVQRDHPQLKTPPSKLNGQSPGLARLGPATGPPGPSASPTRHTLVKKVSGVGGTTYEISV

SEQ ID NO: 6108 - protein, 639 aa, Homo sapiens
MYDNMSTMVYIKEDKLEKLTQDEIISKTKQVIQGLEALKNEHNSILQSLLETLKCLKKDDESNLVEEKSNMIRKSLEMLELGLSEAQVMMALSNHLNAVESEKQKLRAQVRRLCQENQWLRDELANTQQKLQKSEQSVAQLEEEKKHLEFMNQLKKYDDDISPSEDKDTDSTKEPLDDLFPNDEDDPGQGIQQQHSSAAAAAQQGGYEIPARLRTLHNLVIQYASQGRYEVAVPLCKQALEDLEKTSGHDHPDVATMLNILALVYRDQNKYKDAANLLNDALAIREKTLGKDHPAVAATLNNLAVLYGKRGKYKEAEPLCKRALEIREKVLGKDHPDVAKQLNNLALLCQNQGKYEEVEYYYQRALEIYQTKLGPDDPNVAKTKNNLASCYLKQGKFKQAETLYKEILTRAHEREFGSVDDENKPIWMHAEEREECKGKQKDGTSFGEYGGWYKACKVDSPTVTTTLKNLGALYRRQGKFEAAETLEEAAMRSRKQGLDNVHKQRVAEVLNDPENMEKRRSRESLNVDVVKYESGPDGGEEVSMSVEWNGDGTGSLKRSGSFSKLRASIRRSSEKLVRKLKGGSSRESEPKNPGMKRASSLNVLNVGGKAAEDRFQGVSGRASFCGKRQQQQWPGRRHR

SEQ ID NO: 6109 - protein, 624 aa, Homo sapiens
MNSGGGFGLGLGFGLTPTSVIQVTNLSSAVTSEQMRTLFSFLGEIEELRLYPPDNAPLAFSSKVCYVKFRDPSSVGVAQHLTNTVFIDRALIVVPCAEGKIPEESKALSLLAPAPTMTSLMPGAGLLPIPTPNPLTTLGVSLSSLGAIPAAALDPNIATLGEIPQPPLMGNVDPSKIDEIRRTVYVGNLNSQTTTADQLLEFFKQVGEVKFVRMAGDETQPTRFAFVEFADQNSVPRALAFNGVMFGDRPLKINHSNNAIVKPPEMTPQAAAKELEEVMKRVREAQSFISAAIEPESGKSNERKGGRSRSHTRSKSRSSSKSHSRRKRSQSKHRSRSHNRSRSRQKDRRRSKSPHKKRSKSRERRKSRSRSHSRDKRKDTREKIKEKERVKEKDREKEREREKEREKEKERGKNKDRDKEREKDREKDKEKDREREREKEHEKDRDKEKEKEQDKEKEREKDRSKEIDEKRKKDKKSRTPPRSYNASRRSRSSSRERRRRRSRSSSRSPRTSKTIKRKSSRSPSPRSRNKKDKKREKERDHISERRERERSTSMRKSSNDRDGKEKLEKNSTSLKEKEHNKEPDSSVSKEVDDKDAPRTEENKIQHNGNCQLNEENLSTKTEAV

SEQ ID NO: 6110 - protein, 520 aa, Homo sapiens
MGKRQHQKDKMYITCAEYTHFYGGKKPDLPQTNFRRLPFDHCSLSLQPFVYPVCTPDGIVFDLLNIVPWLKKYGTNPSNGEKLDGRSLIKLNFSKNSEGKYHCPVLFTVFTNNTHIVAVRTTGNVYAYEAVEQLNIKAKNFRDLLTDEPFSRQDIITLQDPTNLDKFNVSNFYHVKNNMKIIDPDEEKAKQDPSYYLKNTNAETRETLQELYKEFKGDEILAATMKAPEKKKVDKLNAAHYSTGKVSASFTSTAMVPETTHEAAAIDEDVLRYQFVKKKGYVRLHTNKGDLNLELHCDLTPKTCENFIRLCKKHYYDGTIFHRSIRNFVIQGGDPTGTGTGGESYWGKPFKDEFRPNLSHTGRGILSMANSGPNSNRSQFFITFRSCAYLDKKHTIFGRVVGGFDVLTAMENVESDPKTDRPKEEIRIDATTVFVDPYEEADAQIAQERKTQLKVAPETKVKSSQPQAGSQGPQTFRQGVGKYINPAATKRAAEEEPSTSATVPMSKKKPSRGFGDFSSW

SEQ ID NO: 6111 - protein, 534 aa, Homo sapiens
MTQAEIKLCSLLLQEHFGEIVEKIGVHLIRTGSQPLRVIAHDTGTSLDQVKKALCVLVQHNLVSYQVHKRGVVEYEAQCSRVLRMLRYPRYIYTTKTLYSDTGELIVEELLLNGKLTMSAVVKKVADRLTETMEDGKTMDYAEVSNTFVRLADTHFVQRCPSVPTTENSDPGPPPPAPTLVINEKDMYLVPKLSLIGKGKRRRSSDEDAAGEPKAKRPKYTTDNKEPIPDDGIYWQANLDRFHQHFRDQAIVSAVANRMDQTSSEIVRTMLRMSEITTSSSAPFTQPLSSNEIFRSLPVGYNISKQVLDQYLTLLADDPLEFVGKSGDSGGGMYVINLHKALASLATATLESVVQERFGSRCARIFRLVLQKKHIEQKQVEDFAMIPAKEAKDMLYKMLSENFMSLQEIPKTPDHAPSRTFYLYTVNILSAARMLLHRCYKSIANLIERRQFETKENKRLLEKSQRVEAIIASMQATGAEEAQLQEIEEMITAPERQQLETLKRNVNKLDASEIQVDETIFLLESYIECTMKRQ

SEQ ID NO: 6112 - protein, 501 aa, Homo sapiens
MWKLWRAEEGAAALGGALFLLLFALGVRQLLKQRRPMGFPPGPPGLPFIGNIYSLAASSELPHVYMRKQSQVYGEIFSLDLGGISTVVLNGYDVVKECLVHQSEIFADRPCLPLFMKMTKMGGLLNSRYGRGWVDHRRLAVNSFRYFGYGQKSFESKILEETKFFNDAIETYKGRPFDFKQLITNAVSNITNLIIFGERFTYEDTDFQHMIELFSENVELAASASVFLYNAFPWIGILPFGKHQQLFRNAAVVYDFLSRLIEKASVNRKPQLPQHFVDAYLDEMDQGKNDPSSTFSKENLIFSVGELIIAGTETTTNVLRWAILFMALYPNIQGQVQKEIDLIMGPNGKPSWDDKCKMPYTEAVLHEVLRFCNIVPLGIFHATSEDAVVRGYSIPKGTTVITNLYSVHFDEKYWRDPEVFHPERFLDSSGYFAKKEALVPFSLGRRHCLGEHLARMEMFLFFTALLQRFHLHFPHELVPDLKPRLGMTLQPQPYLICAERR

SEQ ID NO: 6113 - protein, 340 aa, Homo sapiens
MRLLERMRKDWFMVGIVLAIAGAKLEPSIGVNGGPLKPEITVSYIAVATIFFNSGLSLKTEELTSALVHLKLHLFIQIFTLAFFPATIWLFLQLLSITPINEWLLKGLQTVGCMPPPVSSAVILTKAVGGNEAAAIFNSAFGSFLGIVITPLLLLLFLGSSSSVPFTSIFSQLFMTVVVPLIIGQIVRRYIKDWLERKKPPFGAISSSVLLMIIYTTFCDTFSNPNIDLDKFSLVLILFIIFSIQLSFMLLTFIFSTRNNSGFTPADTVAIIFCSTHKSLTLGIPMLKIVFAGHEHLSLISVPLLIYHPAQILLGSVLVPTIKSWMVSRQKGVKLTRPTV

SEQ ID NO: 6114 - protein, 173 aa, Homo sapiens
MTRENVAHNALRQEGLVKGKDDTWKWGTSFQGSSSSVWETSHLHFRQLRYHETSGPQEALSRLRELCRRWLRPEARTKAQILELLVLEQFLSILPGEIRTWVQLHHPGSGEEAVALVEELQKDLDGPAIQVWLLFPPLCTVSSGRGHQCHEWGSRAAPLFSMQSFTAVLMLHT

SEQ ID NO: 6115 - protein, 628 aa, Homo sapiens
MYDNMSTMVYIKEDKLEKLTQDEIISKTKQVIQGLEALKNEHNSILQSLLETLKCLKKDDESNLVEEKSNMIRKSLEMLELGLSEAQVMMALSNHLNAVESEKQKLRAQVRRLCQENQWLRDELANTQQKLQKSEQSVAQLEEEKKHLEFMNQLKKYDDDISPSEDKDTDSTKEPLDDLFPNDEDDPGQGIQQQHSSAAAAAQQGGYEIPARLRTLHNLVIQYASQGRYEVAVPLCKQALEDLEKTSGHDHPDVATMLNILALVYRDQNKYKDAANLLNDALAIREKTLGKDHPAVAATLNNLAVLYGKRGKYKEAEPLCKRALEIREKVLGKDHPDVAKQLNNLALLCQNQGKYEEVEYYYQRALEIYQTKLGPDDPNVAKTKNNLASCYLKQGKFKQAETLYKEILTRAHEREFGSVDDENKPIWMHAEEREECKGKQKDGTSFGEYGGWYKACKVDSPTVTTTLKNLGALYRRQGKFEAAETLEEAAMRSRKQGLDNVHKQRVAEVLNDPENMEKRRSRESLNVDVVKYESGPDGGEEDGTGSLKRSGSFSKLRASIRRSSEKLVRKLKGGSSRESEPKNPGMKRASSLNVLNVGGKAAEDRFQERNNCLADSRALSASHTDLAH

SEQ ID NO: 6116 - protein, 292 aa, Homo sapiens
MHSDAAAVNFQLNSHLSTLANIHKIYHTLNKLNLTEDIGQDDHQTGSLRSCSSSDCFNKVMPPRKKRRPASGDDLSAKKSRHDSMYRKYDSTRIKTEEEAFSSKRCLEWFYEYAGTDDVVGPEGMEKFCEDIGVEPENVVMLVLAWKLDAQNMGYFTLQEWLKGMTSLQCDTTEKLRNTLDYLRSFLNDSTNFKLIYRYAFDFAREKDQRSLDINTAKCMLGLLLGKIWPLFPVFHQFLEQSKYKVINKDQWCNVLEFSRTINLDLSNYDEDGAWPVLLDEFVEWYKDKQMS

SEQ ID NO: 6117 - protein, 1154 aa, Homo sapiens
MGLLLMILASAVLGSFLTLLAQFFLLYRRQPEPPADEAARAGEGFRYIKPVPGLLLREYLYGGGRDEEPSGAAPEGGATPTAAPETPAPPTRETCYFLNATILFLFRELRDTALTRRWVTKKIKVEFEELLQTKTAGRLLEGLSLRDVFLGETVPFIKTIRLVRPVVPSATGEPDGPEGEALPAACPEELAFEAEVEYNGGFHLAIDVDLVFGKSAYLFVKLSRVVGRLRLVFTRVPFTHWFFSFVEDPLIDFEVRSQFEGRPMPQLTSIIVNQLKKIIKRKHTLPNYKIRFKPFFPYQTLQGFEEDEEHIHIQQWALTEGRLKVTLLECSRLLIFGSYDREANVHCTLELSSSVWEEKQRSSIKTVELIKGNLQSVGLTLRLVQSTDGYAGHVIIETVAPNSPAAIADLQRGDRLIAIGGVKITSTLQVLKLIKQAGDRVLVYYERPVGQSNQGAVLQDNFGQLEENFLSSSCQSGYEEEAAGLTVDTESRELDSEFEDLASDVRAQNEFKDEAQSLSHSPKRVPTTLSIKPLGAISPVLNRKLAVGSHPLPPKIQSKDGNKPPPLKTSEITDPAQVSKPTQGSAFKPPVPPRPQAKVPLPSADAPNQAEPDVLVEKPEKVVPPPLVDKSAEKQAKNVDAIDDAAAPKQFLAKQEVAKDVTSETSCPTKDSSDDRQTWESSEILYRNKLGKWTRTRASCLFDIEACHRYLNIALWCRDPFKLGGLICLGHVSLKLEDVALGCLATSNTEYLSKLRLEAPSPKAIVTRTALRNLSMQKGFNDKFCYGDITIHFKYLKEGESDHHVVTNVEKEKEPHLVEEVSVLPKEEQFVGQMGLTENKHSFQDTQFQNPTWCDYCKKKVWTKAASQCMFCAYVCHKKCQEKCLAETSVCGATDRRIDRTLKNLRLEGQETLLGLPPRVDAEASKSVNKTTGLTRHIINTSSRLLNLRQVSKTRLSEPGTDLVEPSPKHTPNTSDNEGSDTEVCGPNSPSKRGNSTGIKLVRKEGGLDDSVFIAVKEIGRDLYRGLPTEERIQKLEFMLDKLQNEIDQELEHNNSLVREEKETTDTRKKSLLSAALAKSGERLQALTLLMIHYRAGIEDIETLESLSLDQHSKKISKYTDDTEEDLDNEISQLIDSQPFSSISDDLFGPSESV

SEQ ID NO: 6118 - protein, 644 aa, Homo sapiens
MTSQSSVISNSCVTMERLSHMMERKAWCSQESALSEEEEDTTRPLETVTFKDVAVDLTQEEWEQMKPAQRNLYRDVMLENYSNLVTVGCQVTKPDVIFKLEQEEEPWVMEEEMFGRHCPEVWEVDEQIKKQQETLVRKVTSISKKILIKEKVIECKKVAKIFPLSSDIVTSRQSFYDCDSLDKGLEHNLDLLRYEKGCVREKQSNEFGKPFYHCASYVVTPFKCNQCGQDFSHKFDLIRHERIHAGEKPYECKECGKAFSRKENLITHQKIHTGEKPYKCNECGKAFIQMSNLIRHHRIHTGEKPYACKDCWKAFSQKSNLIEHERIHTGEKPYECKECGKSFSQKQNLIEHEKIHTGEKPYACNECGRAFSRMSSVTLHMRSHTGEKPYKCNKCGKAFSQCSVFIIHMRSHTGEKPYVCSECGKAFSQSSSLTVHMRNHTAEKPYECKECGKAFSRKENLITHQKIHTGEKPYECSECGKAFIQMSNLIRHQRIHTGEKPYACTVCGKAFSQKSNLTEHEKIHTGEKPYHCNQCGKAFSQRQNLLEHEKIHTGEKPFKCNECGKAFSRISSLTLHVRSHTGEKPYECNKCGKAFSQCSLLIIHMRSHTGEKPFECNECGKAFSQRASLSIHKRGHTGERHQVY

SEQ ID NO: 6119 - protein, 1690 aa, Homo sapiens
MHPGLWLLLVTLCLTEELAAAGEKSYGKPCGGQDCSGSCQCFPEKGARGRPGPIGIQGPTGPQGFTGSTGLSGLKGERGFPGLLGPYGPKGDKGPMGVPGFLGINGIPGHPGQPGPRGPPGLDGCNGTQGAVGFPGPDGYPGLLGPPGLPGQKGSKGDPVLAPGSFKGMKGDPGLPGLDGITGPQGAPGFPGAVGPAGPPGLQGPPGPPGPLGPDGNMGLGFQGEKGVKGDVGLPGPAGPPPSTGELEFMGFPKGKKGSKGEPGPKGFPGISGPPGFPGLGTTGEKGEKGEKGIPGLPGPRGPMGSEGVQGPPGQQGKKGTLGFPGLNGFQGIEGQKGDIGLPGPDVFIDIDGAVISGNPGDPGVPGLPGLKGDEGIQGLRGPSGVPGLPALSGVPGALGPQGFPGLKGDQGNPGRTTIGAAGLPGRDGLPGPPGPPGPPSPEFETETLHNKESGFPGLRGEQGPKGNLGLKGIKGDSGFCACDGGVPNTGPPGEPGPPGPWGLIGLPGLKGARGDRGSGGAQGPAGAPGLVGPLGPSGPKGKKGEPILSTIQGMPGDRGDSGSQGFRGVIGEPGKDGVPGLPGLPGLPGDGGQGFPGEKGLPGLPGEKGHPGPPGLPGNGLPGLPGPRGLPGDKGKDGLPGQQGLPGSKGITLPCIIPGSYGPSGFPGTPGFPGPKGSRGLPGTPGQPGSSGSKGEPGSPGLVHLPELPGFPGPRGEKGLPGFPGLPGKDGLPGMIGSPGLPGSKGATGDIFGAENGAPGEQGLQGLTGHKGFLGDSGLPGLKGVHGKPGLLGPKGERGSPGTPGQVGQPGTPGSSGPYGIKGKSGLPGAPGFPGISGHPGKKGTRGKKGPPGSIVKKGLPGLKGLPGNPGLVGLKGSPGSPGVAGLPALSGPKGEKGSVGFVGFPGIPGLPGIPGTRGLKGIPGSTGKMGPSGRAGTPGEKGDRGNPGPVGIPSPRRPMSNLWLKGDKGSQGSAGSNGFPGPRGDKGEAGRPGPPGLPGAPGLPGIIKGVSGKPGPPGFMGIRGLPGLKGSSGITGFPGMPGESGSQGIRGSPGLPGASGLPGLKGDNGQTVEISGSPGPKGQPGESGFKGTKGRDGLIGNIGFPGNKGEDGKVGVSGDVGLPGAPGFPGVAGMRGEPGLPGSSGHQGAIGPLGSPGLIGPKGFPGFPGLHGLNGLPGTKGTHGTPGPSITGVPGPAGLPGPKGEKGYPGIGIGAPGKPGLRGQKGDRGFPGLQGPAGLPGAPGISLPSLIAGQPGDPGRPGLDGERGRPGPAGPPGPPGPSSNQGDTGDPGFPGIPGPKGPKGDQGIPGFSGLPGELGLKGMRGEPGFMGTPGKVGPPGDPGFPGMKGKAGPRGSSGLQGDPGQTPTAEAVQVPPGPLGLPGIDGIPGLTGDPGAQGPVGLQGSKGLPGIPGKDGPSGLPGPPGALGDPGLPGLQGPPGFEGAPGQQGPFGMPGMPGQSMRVGYTLVKHSQSEQVPPCPIGMSQLWVGYSLLFVEGQEKAHNQDLGFAGSCLPRFSTMPFIYCNINEVCHYARRNDKSYWLSTTAPIPMMPVSQTQIPQYISRCSVCEAPSQAIAVHSQDITIPQCPLGWRSLWIGYSFLMHTAAGAEGGGQSLVSPGSCLEDFRATPFIECSGARGTCHYFANKYSFWLTTVEERQQFGELPVSETLKAGQLHTRVSRCQVCMKSL

SEQ ID NO: 6120 - protein, 423 aa, Homo sapiens
MENKKKDKDKSDDRMARPSGRSGHNTRGTGSSSSGVLMVGPNFRVGKKIGCGNFGELRLGKNLYTNEYVAIKLEPMKSRAPQLHLEYRFYKQLGSGDGIPQVYYFGPCGKYNAMVLELLGPSLEDLFDLCDRTFSLKTVLMIAIQLISRMEYVHSKNLIYRDVKPENFLIGRPGNKTQQVIHIIDFGLAKEYIDPETKKHIPYREHKSLTGTARYMSINTHLGKEQSRRDDLEALGHMFMYFLRGSLPWQGLKADTLKERYQKIGDTKRATPIEVLCENFPEMATYLRYVRRLDFFEKPDYDYLRKLFTDLFDRKGYMFDYEYDWIGKQLPTPVGAVQQDPALSSNREAHQHRDKMQQSKNQVVSSTNGELNTDDPTAGRSNAPITAPTEVEVMDETNCQKVLNMWCCCFFKRRKRKTIQRHK

SEQ ID NO: 6121 - protein, 271 aa, Homo sapiens
MVLIKEFRVVLPCSVQEYQVGQLYSVAEASKNETGGGEGIEVLKNEPYEKDGEKGQYTHKIYHLKSKVPAFVRMIAPEGSLVFHEKAWNAYPYCRTIVTNEYMKDDFFIKIETWHKPDLGTLENVHGLDPNTWKTVEIVHIDIADRSQVEPADYKADEDPALFQSVKTKRGPLGPNWKKELANSPDCPQMCAYKLVTIKFKWWGLQSKVENFIQKQEKRIFTNFHRQLFCWIDKWIDLTMEDIRRMEDETQKELETMRKRGSVRGTSAADV

SEQ ID NO: 6122 - protein, 357 aa, Homo sapiens
MERMSDSADKPIDNDAEGVWSPDIEQSFQEALAIYPPCGRRKIILSDEGKMYGRNELIARYIKLRTGKTRTRKQVSSHIQVLARRKSRDFHSKLKVTSMDQTAKDKALQHMAAMSSAQIVSATAIHNKLGLPGIPRPTFPGAPGFWPGMIQTGQPGSSQDVKPFVQQAYPIQPAVTAPIPGFEPASAPAPSVPAWQGRSIGTTKLRLVEFSAFLEQQRDPDSADLNCNIQDDAGAFYGVTSQYESSENMTVTCSTKVCSFGKQVVEKVETEYARFENGRFVYRINRSPMCEYMINFIHKLKHLPEKYMMNSVLENFTILLVVTNRDTQETLLCMACVFEVSNSEHGAQHHIYRLVKD

SEQ ID NO: 6123 - protein, 332 aa, Homo sapiens
MAPAQRCPLCRQTFFCGRGHVYSRKHQRQLKEALERLLPQVEAARKAIRAAQVERYVPEHERCCWCLCCGCEVREHLSHGNLTVLYGGLLEHLASPEHKKATNKFWWENKAEVQMKEKFLVTPQDYARFKKSMVKGLDSYEEKEDKVIKEMAAQIREVEQSRQEVVRSVLEPQAVPDPEEGSSAPRSWKGMNSQVASSLQQPSNLDLPPAPELDWMETGPSLTFIGHQDIPGVGNIHSGATPPWMIQDEEYIAGNQEIGPSYEEFLKEKEKQKLKKLPPDRVGANFDHSSRTSAGWLPSFGRVWNNGRRWQSRHQFKTEAAAMKKQSHTEKS

SEQ ID NO: 6124 - protein, 544 aa, Homo sapiens
MLKEHPEMAEAPQQQLGIPVVKLEKELPWGRGREDPSPETFRLRFRQFRYQEAAGPQEALRELQELCRRWLRPELHTKEQILELLVLEQFLTILPREFYAWIREHGPESGKALAAMVEDLTERALEAKAVPCHRQGEQEETALCRGAWEPGIQLGPVEVKPEWGMPPGEGVQGPDPGTEEQLSQDPGDETRAFQEQALPVLQAGPGLPAVNPRDQEMAAGFFTAGSQGLGPFKDMALAFPEEEWRHVTPAQIDCFGEYVEPQDCRVSPGGGSKEKEAKPPQEDLKGALVALTSERFGEASLQGPGLGRVCEQEPGGPAGSAPGLPPPQHGAIPLPDEVKTHSSFWKPFQCPECGKGFSRSSNLVRHQRTHEEKSYGCVECGKGFTLREYLMKHQRTHLGKRPYVCSECWKTFSQRHHLEVHQRSHTGEKPYKCGDCWKSFSRRQHLQVHRRTHTGEKPYTCECGKSFSRNANLAVHRRAHTGEKPYGCQVCGKRFSKGERLVRHQRIHTGEKPYHCPACGRSFNQRSILNRHQKTQHRQEPLVQ

SEQ ID NO: 6125 - protein, 823 aa, Homo sapiens
MGKKRTKGKTVPIDDSSETLEPVCRHIRKGLEQGNLKKALVNVEWNICQDCKTDNKVKDKAEEETEEKPSVWLCLKCGHQGCGRNSQEQHALKHYLTPRSEPHCLVLSLDNWSVWCYVCDNEVQYCSSNQLGQVVDYVRKQASITTPKPAEKDNGNIELENKKLEKESKNEQEREKKENMAKENPPMNSPCQITVKGLSNLGNTCFFNAVMQNLSQTPVLRELLKEVKMSGTIVKIEPPDLALTEPLEINLEPPGPLTLAMSQFLNEMQETKKGVVTPKELFSQVCKKAVRFKGYQQQDSQELLRYLLDGMRAEEHQRVSKGILKAFGNSTEKLDEELKNKVKDYEKKKSMPSFVDRIFGGELTSMIMCDQCRTVSLVHESFLDLSLPVLDDQSGKKSVNDKNLKKTVEDEDQDSEEEKDNDSYIKERSDIPSGTSKHLQKKAKKQAKKQAKNQRRQQKIQGKVLHLNDICTIDHPEDSEYEAEMSLQGEVNIKSNHISQEGVMHKEYCVNQKDLNGQAKMIESVTDNQKSTEEVDMKNINMDNDLEVLTSSPTRNLNGAYLTEGSNGEVDISNGFKNLNLNAALHPDEINIEILNDSHTPGTKVYEVVNEDPETAFCTLANREVFNTDECSIQHCLYQFTRNEKLRDANKLLCEVCTRRQCNGPKANIKGERKHVYTNAKKQMLISLAPPVLTLHLKRFQQAGFNLRKVNKHIKFPEILDLAPFCTLKCKNVAEENTRVLYSLYGVVEHSGTMRSGHYTAYAKARTANSHLSNLVLHGDIPQDFEMESKGQWFHISDTHVQAVPTTKVLNSQAYLLFYERIL

SEQ ID NO: 6126 - protein, 1161 aa, Homo sapiens
MKKFSRMPKSEGGSGGGAAGGGAGGAGAGAGCGSGGSSVGVRVFAVGRHQVTLEESLAEGGFSTVFLVRTHGGIRCALKRMYVNNMPDLNVCKREITIMKELSGHKNIVGYLDCAVNSISDNVWEVLILMEYCRAGQVVNQMNKKLQTGFTEPEVLQIFCDTCEAVARLHQCKTPIIHRDLKVENILLNDGGNYVLCDFGSATNKFLNPQKDGVNVVEEEIKKYTTLSYRAPEMINLYGGKPITTKADIWALGCLLYKLCFFTLPFGESQVAICDGNFTIPDNSRYSRNIHCLIRFMLEPDPEHRPDIFQVSYFAFKFAKKDCPVSNINNSSIPSALPEPMTASEAAARKSQIKARITDTIGPTETSIAPRQRPKANSATTATPSVLTIQSSATPVKVLAPGEFGNHRPKGALRPGNGPEILLGQGPPQQPPQQHRVLQQLQQGDWRLQQLHLQHRHPHQQQQQQQQQQQQQQQQQQQQQQQQQQQHHHHHHHHLLQDAYMQQYQHATQQQQMLQQQFLMHSVYQPQPSASQYPTMMPQYQQAFFQQQMLAQHQPSQQQASPEYLTSPQEFSPALVSYTSSLPAQVGTIMDSSYSANRSVADKEAIANFTNQKNISNPPDMSGWNPFGEDNFSKLTEEELLDREFDLLRSNRLEERASSDKNVDSLSAPHNHPPEDPFGSVPFISHSGSPEKKAEHSSINQENGTANPIKNGKTSPASKDQRTGKKTSVQGQVQKGNDESESDFESDPPSPKSSEEEEQDDEEVLQGEQGDFNDDDTEPENLGHRPLLMDSEDEEEEEKHSSDSDYEQAKAKYSDMSSVYRDRSGSGPTQDLNTILLTSAQLSSDVAVETPKQEFDVFGAVPFFAVRAQQPQQEKNEKNLPQHRFPAAGLEQEEFDVFTKAPFSKKVNVQECHAVGPEAHTIPGYPKSVDVFGSTPFQPFLTSTSKSESNEDLFGLVPFDEITGSQQQKVKQRSLQKLSSRQRRTKQDMSKSNGKRHHGTPTSTKKTLKPTYRTPERARRHKKVGRRDSQSSNEFLTISDSKENISVALTDGKDRGNVLQPEESLLDPFGAKPFHSPDLSWHPPHQGLSDIRADHNTVLPGRPRQNSLHGSFHSADVLKMDDFGAVPFTELVVQSITPHQSQQSQPVELDPFGAAPFPSKQ

SEQ ID NO: 6127 - protein, 496 aa, Homo sapiens
MAGEITETGELYSSYVGLVYMFNLIVGTGALTMPKAFATAGWLVSLVLLVFLGFMSFVTTTFVIEAMAAANAQLHWKRMENLKEEEDDDSSTASDSDVLIRDNYERAEKRPILSVQRRGSPNPFEITDRVEMGQMASMFFNKVGVNLFYFCIIVYLYGDLAIYAAAVPFSLMQVTCSATGNDSCGVEADTKYNDTDRCWGPLRRVDAYRIYLAIFTLLLGPFTFFDVQKTKYLQILTSLMRWIAFAVMIVLALIRIGHGQGEGHPPLADFSGVRNLFGVCVYSFMCQHSLPSLITPVSSKRHLTRLVFLDYVLILAFYGLLSFTAIFCFRGDSLMDMYTLNFARCDVVGLAAVRFFLGLFPVFTISTNFPIIAVTLRNNWKTLFHREGGTYPWVVDRVVFPTITLVPPVLVAFCTHDLESLVGITGAYAGTGIQYVIPAFLVYHCRRDTQLAFGCGVSNKHRSPFRHTFWVGFVLLWAFSCFIFVTANIILSETKL

SEQ ID NO: 6128 - protein, 61 aa, Homo sapiens
MDPNCSCAAGVSCTCAGSCKCKECKCTSCKKSCCSCCPVGCSKCAQGCVCKGASEKCSCCD

SEQ ID NO: 6129 - protein, 276 aa, Homo sapiens
MGLPWGQPHLGLQMLLLALNCLRPSLSLELVPYTPQITAWDLEGKVTATTFSLEQPRCVFDGLASASDTVWLVVAFSNASRGFQNPETLADIPASPQLLTDGHYMTLPLSPDQLPCGDPMAGSGGAPVLRVGHDHGCHQQPFCNAPLPGPGPYRVKFLLMDTRGSPRAETKWSDPITLHQGKTPGSIDTWPGRRSGSMIVITSILSSLAGLLLLAFLAASTMRFSSLWWPEEAPEQLRIGSFMGKRYMTHHIPPREAATLPVGCKPGLDPLPSLSP

SEQ ID NO: 6130 - protein, 1446 aa, Homo sapiens
MARAQALVLALTFQLCAPETETPAAGCTFEEASDPAVPCEYSQAQYDDFQWEQVRIHPGTRAPADLPHGSYLMVNTSQHAPGQRAHVIFQSLSENDTHCVQFSYFLYSRDGHSPGTLGVYVRVNGGPLGSAVWNMTGSHGRQWHQAELAVSTFWPNEYQVLFEALISPDRRGYMGLDDILLLSYPCAKAPHFSRLGDVEVNAGQNASFQCMAAGRAAEAERFLLQRQSGALVPAAGVRHISHRRFLATFPLAAVSRAEQDLYRCVSQAPRGAGVSNFAELIVKEPPTPIAPPQLLRAGPTYLIIQLNTNSIIGDGPIVRKEIEYRMARGPWAEVHAVSLQTYKLWHLDPDTEYEISVLLTRPGDGGTGRPGPPLISRTKCAEPMRAPKGLAFAEIQARQLTLQWEPLGYNVTRCHTYTVSLCYHYTLGSSHNQTIRECVKTEQGVSRYTIKNLLPYRNVHVRLVLTNPEGRKEGKEVTFQTDEDVPSGIAAESLTFTPLEDMIFLKWEEPQEPNGLITQYEISYQSIESSDPAVNVPGPRRTISKLRNETYHVFSNLHPGTTYLFSVRARTGKGFGQAALTEITTNISAPSFDYADMPSPLGESENTITVLLRPAQGRGAPISVYQVIVEEERARRLRREPGGQDCFPVPLTFEAALARGLVHYFGAELAASSLPEAMPFTVGDNQTYRGFWNPPLEPRKAYLIYFQAASHLKGETRLNCIRIARKAACKESKRPLEVSQRSEEMGLILGICAGGLAVLILLLGAIIVIIRKGRDHYAYSYYPKPVNMTKATVNYRQEKTHMMSAVDRSFTDQSTLQEDERLGLSFMDTHGYSTRGDQRSGGVTEASSLLGGSPRRPCGRKGSPYHTGQLHPAVRVADLLQHINQMKTAEGYGFKQEYESFFEGWDATKKKDKVKGSRQEPMPAYDRHRVKLHPMLGDPNADYINANYIDGYHRSNHFIATQGPKPEMVYDFWRMVWQEHCSSIVMITKLVEVGRVKCSRYWPEDSDTYGDIKIMLVKTETLAEYVVRTFALERRGYSARHEVRQFHFTAWPEHGVPYHATGLLAFIRRVKASTPPDAGPIVIHCSAGTGRTGCYIVLDVMLDMAECEGVVDIYNCVKTLCSRRVNMIQTEEQYIFIHDAILEACLCGETTIPVSEFKATYKEMIRIDPQSNSSQLREEFQTLNSVTPPLDVEECSIALLPRNRDKNRSMDVLPPDRCLPFLISTDGDSNNYINAALTDSYTRSAAFIVTLHPLQSTTPDFWRLVYDYGCTSIVMLNQLNQSNSAWPCLQYWPEPGRQQYGLMEVEFMSGTADEDLVARVFRVQNISRLQEGHLLVRHFQFLRWSAYRDTPDSKKAFLHLLAEVDKWQAESGDGRTIVHCLNGGGRSGTFCACATVLEMIRCHNLVDVFFAAKTLRNYKPNMVETMDQYHFCYDVALEYLEGLESR

SEQ ID NO: 6131 - protein, 1321 aa, Homo sapiens
MEPPGRRRGRAQPPLLLPLSLLALLALLGGGGGGGAAALPAGCKHDGRPRGAGRAAGAAEGKVVCSSLELAQVLPPDTLPNRTVTLILSNNKISELKNGSFSGLSLLERLDLRNNLISSIDPGAFWGLSSLKRLDLTNNRIGCLNADIFRGLTNLVRLNLSGNLFSSLSQGTFDYLASLRSLEFQTEYLLCDCNILWMHRWVKEKNITVRDTRCVYPKSLQAQPVTGVKQELLTCDPPLELPSFYMTPSHRQVVFEGDSLPFQCMASYIDQDMQVLWYQDGRIVETDESQGIFVEKNMIHNCSLIASALTISNIQAGSTGNWGCHVQTKRGNNTRTVDIVVLESSAQYCPPERVVNNKGDFRWPRTLAGITAYLQCTRNTHGSGIYPGNPQDERKAWRRCDRGGFWADDDYSRCQYANDVTRVLYMFNQMPLNLTNAVATARQLLAYTVEAANFSDKMDVIFVAEMIEKFGRFTKEEKSKELGDVMVDIASNIMLADERVLWLAQREAKACSRIVQCLQRIATYRLAGGAHVYSTYSPNIALEAYVIKSTGFTGMTCTVFQKVAASDRTGLSDYGRRDPEGNLDKQLSFKCNVSNTFSSLALKNTIVEASIQLPPSLFSPKQKRELRPTDDSLYKLQLIAFRNGKLFPATGNSTNLADDGKRRTVVTPVILTKIDGVNVDTHHIPVNVTLRRIAHGADAVAARWDFDLLNGQGGWKSDGCHILYSDENITTIQCYSLSNYAVLMDLTGSELYTQAASLLHPVVYTTAIILLLCLLAVIVSYIYHHSLIRISLKSWHMLVNLCFHIFLTCVVFVGGITQTRNASICQAVGIILHYSTLATVLWVGVTARNIYKQVTKKAKRCQDPDEPPPPPRPMLRFYLIGGGIPIIVCGITAAANIKNYGSRPNAPYCWMAWEPSLGAFYGPASFITFVNCMYFLSIFIQLKRHPERKYELKEPTEEQQRLAANENGEINHQDSMSLSLISTSALENEHTFHSQLLGASLTLLLYVALWMFGALAVSLYYPLDLVFSFVFGATSLSFSAFFVVHHCVNREDVRLAWIMTCCPGRSSYSVQVNVQPPNSNGTNGEAPKCPNSSAESSCTNKSASSFKNSSQGCKLTNLQAAAAQCHANSLPLNSTPQLDNSLTEHSMDNDIKMHVAPLEVQFRTNVHSSRHHKNRSKGHRASRLTVLREYAYDVPTSVEGSVQNGLPKSRLGNNEGHSRSRRAYLAYRERQYNPPQQDSSDACSTLPKSSRNFEKPVSTTSKKDALRKPAVVELENQQKSYGLNLAIQNGPIKSNGQEGPLLGTDSTGNVRTGLWKHETTV

SEQ ID NO: 6132 - protein, 250 aa, Homo sapiens
MSAAASPASERGWKSEKLDEAQALARSCAARRPDFQPCDGLSICATHSHGKCFKLHWCCHLGWCHCKYMYQPMTPVEQLPSTEIPARPREPTNTIQISVSLTEHFLKFASVFQPPLPPDSPRYCMISDLFIDNYQVKCINGKMCYVQKQPAPHSHRMSPEEVSAHDALISKESNTPKIDHCSSPSSSEDSGINAIGAHYVESCDEDTEEGAELSSEEDYSPESSWEPDECTLLSPSQSDLEVIETIETTV

SEQ ID NO: 6133 - protein, 531 aa, Homo sapiens
MSKPHSEAGTAFIQTQQLHAAMADTFLEHMCRLDIDSPPITARNTGIICTIGPASRSVETLKEMIKSGMNVARLNFSHGTHEYHAETIKNVRTATESFASDPILYRPVAVALDTKGPEIRTGLIKGSGTAEVELKKGATLKITLDNAYMEKCDENILWLDYKNICKVVEVGSKIYVDDGLISLQVKQKGADFLVTEVENGGSLGSKKGVNLPGAAVDLPAVSEKDIQDLKFGVEQDVDMVFASFIRKASDVHEVRKVLGEKGKNIKIISKIENHEGVRRFDEILEASDGIMVARGDLGIEIPAEKVFLAQKMMIGRCNRAGKPVICATQMLESMIKKPRPTRAEGSDVANAVLDGADCIMLSGETAKGDYPLEAVRMQHLIAREAEAAIYHLQLFEELRRLAPITSDPTEATAVGAVEASFKCCSGAIIVLTKSGRSAHQVARYRPRAPIIAVTRNPQTARQAHLYRGIFPVLCKDPVQEAWAEDVDLRVNFAMNVGKARGFFKKGDVVIVLTGWRPGSGFTNTMRVVPVP

SEQ ID NO: 6134 - protein, 588 aa, Homo sapiens
MKLEFTEKNYNSFVLQNLNRQRKRKEYWDMALSVDNHVFFAHRNVLAAVSPLVRSLISSNDMKTADELFITIDTSYLSPVTVDQLLDYFYSGKVVISEQNVEELLRGAQYFNTPRLRVHCNDFLIKSICRANCLRYLFLAELFELKEVSDVAYSGIRDNFHYWASPEGSMHFMRCPPVIFGRLLRDENLHVLNEDQALSALINWVYFRKEDREKYFKKFFNYINLNAVSNKTLVFASNKLVGMENTSSHTTLIESVLMDRKQERPCSLLVYQRKGALLDSVVILGGQKAHGQFNDGVFAYIIQENLWMKLSDMPYRAAALSATSAGRYIYISGGTTEQISGLKTAWRYDMDDNSWTKLPDLPIGLVFHTMVTCGGTVYSVGGSIAPRRYVSNIYRYDERKEVWCLAGKMSIPMDGTAVITKGDRHLYIVTGRCLVKGYISRVGVVDCFDTSTGDVVQCITFPIEFNHRPLLSFQQDNILCVHSHRQSVEINLQKVKASKTTTSVPVLPNSCPLDVSHAICSIGDSKVFVCGGVTTASDVQTKDYTINPNAFLLDQKTGKWKTLAPPPEALDCPACCLAKLPCKILQRI

SEQ ID NO: 6135 - protein, 456 aa, Homo sapiens
MSPWSWFLLQTLCLLPTGAASRRGAPGTANCELKPQQSELNSFLWTIKRDPPSYFFGTIHVPYTRVWDFIPDNSKEAFLQSSIVYFELDLTDPYTISALTSCQMLPQGENLQDVLPRDIYCRLKRHLEYVKLMMPLWMTPDQRGKGLYADYLFNAIAGNWERKRPVWVMLMVNSLTEVDIKSRGVPVLDLFLAQEAERLRKQTGAVEKVEEQCHPLNGLNFSQVPNFINATLPPQERITAQEIDSYLRRELIYKRNERIGKRVKALLEEFPDKGFFFAFGAGHFMGNNTVLDVLRREGYEVEHAPAGRPIHKGKSKKTSTRPTLSTIFAPKVPTLEVPAPEAVSSGHSTLPPLVSRPGSADTPSEAEQRFRKKRRRSQRRPRLRQFSDLWVRLEESDIVPQLQVPVLDRHISTELRLPRRGHSHHSQMVASSACLSLWTPVFWVLVLAFQTETPLL

SEQ ID NO: 6136 - protein, 422 aa, Homo sapiens
MGPAWLWLLGTGILASVHCQPLLAHGDKSLQGPQPPRHQLSEPAPAYHRITPTITNFALRLYKELAADAPGNIFFSPVSISTTLALLSLGAQANTSALILEGLGFNLTETPEADIHQGFRSLLHTLALPSPKLELKVGNSLFLDKRLKPRQHYLDSIKELYGAFAFSANFTDSVTTGRQINDYLRRQTYGQVVDCLPEFSQDTFMVLANYIFFKAKWKHPFSRYQTQKQESFFVDERTSLQVPMMHQKEMHRFLYDQDLACTVLQIEYRGNALALLVLPDPGKMKQVEAALQPQTLRKWGQLLLPSLLDLHLPRFSISGTYNLEDILPQIGLTNILNLEADFSGVTGQLNKTISKVSHKAMVDMSEKGTEAGAASGLLSQPPSLNTMSDPHAHFNRPFLLLLWEVTTQSLLFLGKVVNPVAG

SEQ ID NO: 6137 - protein, 834 aa, Homo sapiens
MAVEDEGLRVFQSVKIKIGEAKNLPSYPGPSKMRDCYCTVNLDQEEVFRTKIVEKSLCPFYGEDFYCEIPRSFRHLSFYIFDRDVFRRDSIIGKVAIQKEDLQKYHNRDTWFQLQHVDADSEVQGKVHLELRLSEVITDTGVVCHKLATRIVECQGLPIVNGQCDPYATVTLAGPFRSEAKKTKVKRKTNNPQFDEVFYFEVTRPCSYSKKSHFDFEEEDVDKLEIRVDLWNASNLKFGDEFLGELRIPLKVLRQSSSYEAWYFLQPRDNGSKSLKPDDLGSLRLNVVYTEDHVFSSDYYSPLRDLLLKSADVEPVSASAAHILGEVCREKQEAAVPLVRLFLHYGRVVPFISAIASAEVKRTQDPNTIFRGNSLASKCIDETMKLAGMHYLHVTLKPAIEEICQSHKPCEIDPVKLKDGENLENNMENLRQYVDRVFHAITESGVSCPTVMCDIFFSLREAAAKRFQDDPDVRYTAVSSFIFLRFFAPAILSPNLFQLTPHHTDPQTSRTLTLISKTVQTLGSLSKSKSASFKESYMATFYEFFNEQKYADAVKNFLDLISSSGRRDPKSVEQPIVLKEGFMIKRAQGRKRFGMKNFKKRWFRLTNHEFTYHKSKGDQPLYSIPIENILAVEKLEEESFKMKNMFQVIQPERALYIQANNCVEAKDWIDILTKVSQCNQKRLTVYHPSAYLSGHWLCCRAPSDSAPGCSPCTGGLPANIQLDIDGDRETERIYSLFNLYMSKLEKMQEACGSKSVYDGPEQEEYSTFVIDDPQETYKTLKQVIAGVGALEQEHAQYKRDKFKKTKYGSQEHPIGDKSFQNYIRQQSETSTHSI

SEQ ID NO: 6138 - protein, 285 aa, Homo sapiens
MEQRNRLGALGYLPPLLLHALLLFVADAAFTEVPKDVTVREGDDIEMPCAFRASGATSYSLEIQWWYLKEPPRELLHELALSVPGARSKVTNKDATKISTVRVQGNDISHRLRLSAVRLQDEGVYECRVSDYSDDDTQEHKAQAMLRVLSRFAPPNMQAAEAVSHIQSSGPRRHGPASAANANNAGAASRTTSEPGRGDKSPPPGSPPAAIDPAVPEAAAASAAHTPTTTVAAAAAASSASPPSGQAVLLRQRHGSGTGRSYTTDPLLSLLLLALHKFLRLLLGH

SEQ ID NO: 6139 - protein, 126 aa, Homo sapiens
MAPGEVTITVRLIRSFEHRNFKPVVYHGVNLDQTVKEFIVFLKQDIPLRTNLPPPFRNYKYDALKIIHQAHKSKTNELVLSLEDDERLLLKEDSTLKAAGIASETEIAFFCEEDYKNYKANPISSW

SEQ ID NO: 6140 - protein, 463 aa, Homo sapiens
MPGPLRSLEMESLQFRDVAVEFSLEEWHCLDTAQQNLYRDVMLENYRHLVFLGIIVSKPDLITCLEQGIKPLTMKRHEMIAKPPVVCSHFAQDLWPEQSIKDSYQKVILRKFEKCGHGNLHFKKGCESVDECKLHKRGYNGLNQCLTTTQSKIFQCGKYVKVFHQFSNSKRHKRRHTEKKPLKYIEGDKAFNQSSTHTTHKKIDTGEKPYKCEECGKAFNRSSHLTTHKITHTREKPYKCEECGKVFKYFSSFTTHKKIHSGEKPYICEECGKAFMYPYTLTTHKIIHTGEQPYKCKECDKAFNHPATLSSHKKIHTGEKPYTCDKCGKAFISSSILSKHEKIHTGEKPYKCEECGKAFTRSSHLTMHKIIHTGEKPYKCEECGKAFTWSAGLHKHRRTHTGEKPYKCEECGKAYTTSSNLTEHKTTHTGEKPYKCKECGKAFNWSSDLNKHKRIHIGQKPRT

SEQ ID NO: 6141 - protein, 1835 aa, Homo sapiens
MANSTGKAPPDERRKGLAFLDELRQFHHSRGSPFKKIPAVGGKELDLHGLYTRVTTLGGFAKVSEKNQWGEIVEEFNFPRSCSNAAFALKQYYLRYLEKYEKVHHFGEDDDEVPPGNPKPQLPIGAIPSSYNYQQHSVSDYLRQSYGLSMDFNSPNDYNKLVLSLLSGLPNEVDFAINVCTLLSNESKHVMQLEKDPKIITLLLANAGVFDDTLGSFSTVFGEEWKEKTDRDFVKFWKDIVDDNEVRDLISDRNKSHEGTSGEWIWESLFHPPRKLGINDIEGQRVLQIAVILRNLSFEEGNVKLLAANRTCLRFLLLSAHSHFISLRQLGLDTLGNIAAELLLDPVDFKTTHLMFHTVTKCLMSRDRFLKMRGMEILGNLCKAEDNGVLICEYVDQDSYREIICHLTLPDVLLVISTLEVLYMLTEMGDVACTKIAKVEKSIDMLVCLVSMDIQMFGPDALAAVKLIEHPSSSHQMLSEIRPQAIEQVQTQTHVASAPASRAVVAQHVAPPPGIVEIDSEKFACQWLNAHFEVNPDCSVSRAEMYSEYLSTCSKLARGGILTSTGFYKCLRTVFPNHTVKRVEDSSSNGQAHIHVVGVKRRAIPLPIQMYYQQQPVSTSVVRVDSVPDVSPAPSPAGIPHGSQTIGNHFQRTPVANQSSNLTATQMSFPVQGVHTVAQTVSRIPQNPSPHTHQQQNAPVTVIQSKAPIPCEVVKATVIQNSIPQTGVPVSIAVGGGPPQSSVVQNHSTGPQPVTVVNSQTLLHHPSVIPQQSPLHTVVPGQIPSGTPVTVIQQAVPQSHMFGRVQNIPACTSTVSQGQQLITTSPQPVQTSSQQTSAGSQSQDTVIIAPPQYVTTSASNIVSATSVQNFQVATGQMVTIAGVPSPQASRVGFQNIAPKPLPSQQVSSTVVQQPIQQPQQPTQQSVVIVSQPAQQGQTYAPAIHQIVLANPAALPAGQTVQLTGQPNITPSSSPSPVPATNNQVPTAMSSSSTPQSQGPPPTVSQMLSVKRQQQQQHSPAPPPQQVQVQVQQPQQVQMQVQPQQSNAGVGQPASGESSLIKQLLLPKRGPSTPGGKLILPAPQIPPPNNARAPSPQVVYQVASNQAAGFGVQGQTPAQQLLVGQQNVQLVPSAMPPSGGVQTVPISNLQILPGPLISNSPATIFQGTSGNQVTITVVPNTSFAPATVSQGNATQLIAPAGITMSGTQTGVGLPVQTLPATQASPAGQSSCTTATPPFKGDKIICQKEEEAKEATGLHVHERKIEVMENPSCRRGATNTSNGDTKENEMHVGSLLNGRKYSDSSLPPSNSGKIQSETNQCSLISNGPSLELGENGASGKQNSEQIDMQDIKSDLRKPLVNGICDFDKGDGSHLSKNIPNHKTSNHVGNGEISPMEPQGTLDITQQDTAKGDQLERISNGPVLTLGGSSVSSIQEASNAATQQFSGTDLLNGPLASSLNSDVPQQRPSVVVSPHSTTSVIQGHQIIAVPDSGSKVSHSPALSSDVRSTNGTAECKTVKRPAEDTDRETVAGIPNKVGVRIVTISDPNNAGCSATMVAVPAGADPSTVAKVAIESAVQQKQQHPPTYVQNVVPQNTPMPPSPAVQVQGQPNSSQPSPFSGSSQPGDPMRKPGQNFMCLWQSCKKWFQTPSQVFYHAATEHGGKDVYPGQCLWEGCEPFQRQRFSFITHLQDKHCSKDALLAGLKQDEPGQAGSQKSSTKQPTVGGTSSTPRAQKAIVNHPSAALMALRRGSRNLVFRDFTDEKEGPITKHIRLTAALILKNIGKYSECGRRLLKRHENNLSVLAISNMEASSTLAKCLYELNFTVQSKEQEKDSEMLQ

SEQ ID NO: 6142 - protein, 502 aa, Homo sapiens
MPLVKRNIEPRHLCRGALPEGITSELECVTNSTLAAIIRQLSSLSKHAEDIFGELFNEANNFYIRANSLQDRIDRLAVKVTQLDSTVEEVSLQDINMKKAFKSSTVQDQQVVSKNSIPNPVADIYNQSDKPPPLNILTPYRDDKKDGLKFYTDPSYFFDLWKEKMLQDTEDKRKEKRRQKEQKRIDGTTREVKKVRKARNRRQEWNMMAYDKELRPDNRLSQSVYHGASSEGSLSPDTRSHASDVTDYSYPATPNHSLHPQPVTPSYAAGDVPPHGPASQAAEHEYRPPSASARHMALNRPQQPPPPPPPQAPEGSQASAPMAPADYGMLPAQIIEYYNPSGPPPPPPPPVIPSAQTAFVSPLQMPMQPPFPASASSTHAAPPHPPSTGLLVTAPPPPGPPPPPPGPPGPGSSLSSSPMHGPPVAEAKRQEPAQPPISDARSDLLAAIRMGIQLKKVQEQREQEAKREPVGNDVATILSRRIAVEYSDSDDDSEFDENDWSD

SEQ ID NO: 6143 - protein, 380 aa, Homo sapiens
MVGFGANRRAGRLPSLVLVVLLVVIVVLAFNYWSISSRHVLLQEEVAELQGQVQRTEVARGRLEKRNSDLLLLVDTHKKQIDQKEADYGRLSSRLQAREGLGKRCEDDKVKLQNNISYQMADIHHLKEQLAELRQEFLRQEDQLQDYRKNNTYLVKRLEYESFQCGQQMKELRAQHEENIKKLADQFLEEQKQETQKIQSNDGKELDINNQVVPKNIPKVAENVADKNEEPSSNHIPHGKEQIKRGGDAGMPGIEENDLAKVDDLPPALRKPPISVSQHESHQAISHLPTGQPLSPNMPPDSHINHNGNPGTSKQNPSSPLQRLIPGSNLDSEPRIQTDILKQATKDRVSDFHKLKQNDEERELQMDPADYGKQHFNDVL

SEQ ID NO: 6144 - protein, 117 aa, Homo sapiens
MPSPGTVCSLLLLGMLWLDLAMAGSSFLSPEHQRVQQRKESKKPPAKLQPRALAGWLRPEDGGQAEGAEDELEVRFNAPFDVGIKLSGVQYQQHSQALGKFLQDILWEEAKEAPADK

SEQ ID NO: 6145 - protein, 838 aa, Homo sapiens
MNIDVEFHIRHNYPWNKLPANVRQSLGNSQREYEKQVVLYSIRNQLRYRNNLVKHVKKDERRYYEELLKYSRDHLMLYPYHLSDIMVKGLRITPFSYYTGIMEDIMNSEKSYDSLPNFTAADCLRLLGIGRNQYIDLMNQCRSSKKFFRRKTARDLLPIKPVEIAIEAWWVVQAGYITEDDIKICTLPEKCAVDKIIDSGPQLSGSLDYNVVHSLYNKGFIYLDVPISDDSCIAVPPLEGFVMNRVQGDYFETLLYKIFVSIDEHTNVAELANVLEIDLSLVKNAVSMYCRLGFAHKKGQVINLDQLHSSWKNVPSVNRLKSTLDPQKMLLSWDGGESRSPVQEASSATDTDTNSQEDPADTASVSSLSLSTGHTKRIAFLFDSTLTAFLMMGNLSPNLKSHAVTMFEVGKLSDESLDSFLIELEKVQSTGEGEAQRYFDHALTLRNTILFLRHNKDLVAQTAQPDQPNYGFPLDLLRCESLLGLDPATCSRVLNKNYTLLVSMAPLTNEIRPVSSCTPQHIGPAIPEVSSVWFKLYIYHVTGQGPPSLLLSKGTRLRKLPDIFQSYDRLLITSWGHDPGVVPTSNVLTMLNDALTHSAVLIQGHGLHGIGETVHVPFPFDETELQGEFTRVNMGVHKALQILRNRVDLQHLCGYVTMLNASSQLADRKLSDASDERGEPDLASGSDVNGSTESFEMVIEEATIDSATKQTSGATTEADWVPLELCFGIPLFSSELNRKVCRKIAAHGLCRKESLQNLLHSSRKLSLQVLNFVHSFQEGASILDIHTEPSFSSLLSQSSCADMGVPLPAKNLIFKDGVLSEWSGRSPSSLLIANLHLQ

SEQ ID NO: 6146 - protein, 323 aa, Homo sapiens
MADLDKLNIDSIIQRLLEVRGSKPGKNVQLQENEIRGLCLKSREIFLSQPILLELEAPLKICGDIHGQYYDLLRLFEYGGFPPESNYLFLGDYVDRGKQSLETICLLLAYKIKYPENFFLLRGNHECASINRIYGFYDECKRRYNIKLWKTFTDCFNCLPIAAIVDEKIFCCHGGLSPDLQSMEQIRRIMRPTDVPDQGLLCDLLWSDPDKDVLGWGENDRGVSFTFGAEVVAKFLHKHDLDLICRAHQVVEDGYEFFAKRQLVTLFSAPNYCGEFDNAGAMMSVDETLMCSFQILKPAEKKKPNATRPVTPPRGMITKQAKK

SEQ ID NO: 6147 - protein, 523 aa, Homo sapiens
MESAPAAPDPAASEPGSSGADAAAGSRETPLNQESARKSEPPAPVRRQSYSSTSRGISVTKKTHTSQIEIIPCKICGDKSSGIHYGVITCEGCKGFFRRSQQSNATYSCPRQKNCLIDRTSRNRCQHCRLQKCLAVGMSRDAVKFGRMSKKQRDSLYAEVQKHRMQQQQRDHQQQPGEAEPLTPTYNISANGLTELHDDLSNYIDGHTPEGSKADSAVSSFYLDIQPSPDQSGLDINGIKPEPICDYTPASGFFPYCSFTNGETSPTVSMAELEHLAQNISKSHLETCQYLREELQQITWQTFLQEEIENYQNKQREVMWQLCAIKITEAIQYVVEFAKRIDGFMELCQNDQIVLLKAGSLEVVFIRMCRAFDSQNNTVYFDGKYASPDVFKSLGCEDFISFVFEFGKSLCSMHLTEDEIALFSAFVLMSADRSWLQEKVKIEKLQQKIQLALQHVLQKNHREDGILTKLICKVSTLRALCGRHTEKLMAFKAIYPDIVRLHFPPLYKELFTSEFEPAMQIDG

SEQ ID NO: 6148 - protein, 198 aa, Homo sapiens
MELPDPVRQRLGNFSRAVFSDSNRTGPESNEGPENEMVSSLALQMSLYFNTYYFPLWWVSSIMMLHMKYSILPDYYKFIVITVIILITLIEAIRLYLGYVGNLQEKVPELAGFWLLSLLLQLPLILFLLFNEGLTNLPLEKAIHIIFTLFLAFQVVAAFLTLRKMVNQLAVRFHLQDFDRLSANRGDMRRMRSCIEEI

SEQ ID NO: 6149 - protein, 491 aa, Homo sapiens
MSLLMISENVKLAREYALLGNYDSAMVYYQGVLDQMNKYLYSVKDTYLQQKWQQVWQEINVEAKHVKDIMKTLESFKLDSTPLKAAQHDLPASEGEVWSMPVPVERRPSPGPRKRQSSQYSDPKSHGNRPSTTVRVHRSSAQNVHNDRGKAVRCREKKEQNKGREEKNKSPAAVTEPETNKFDSTGYDKDLVEALERDIISQNPNVRWDDIADLVEAKKLLKEAVVLPMWMPEFFKGIRRPWKGVLMVGPPGTGKTLLAKAVATECKTTFFNVSSSTLTSKYRGESEKLVRLLFEMARFYSPATIFIDEIDSICSRRGTSEEHEASRRVKAELLVQMDGVGGTSENDDPSKMVMVLAATNFPWDIDEALRRRLEKRIYIPLPSAKGREELLRISLRELELADDVDLASIAENMEGYSGADITNVCRDASLMAMRRRIEGLTPEEIRNLSKEEMHMPTTMEDFEMALKKVSKSVSAADIERYEKWIFEFGSC

SEQ ID NO: 6150 - protein, 220 aa, Homo sapiens
MVKISFQPAVAGIKGDKADKASASAPAPASATEILLTPARLARDNFFRCGVLYEDSLSSQVRTQMELEEDVKIYLDENYERINVPVPQFGGGDPADIIHDFQRGLTAYHDISLDKCYVIELNTTIVLPPRNFWELLMNVKRGTYLPQTYIIQEEMVVTEHVSDKEALGSFIYHLCNGKDTYRLRRRATRRRINKRGAKNCNAIRHFENTFVVETLICGVV

SEQ ID NO: 6151 - protein, 336 aa, Homo sapiens
MTRALCSALRQALLLLAAAAELSPGLKCVCLLCDSSNFTCQTEGACWASVMLTNGKEQVIKSCVSLPELNAQVFCHSSNNVTKTECCFTDFCNNITLHLPTDNGTWTQLWLVSEYHEQGSLYDYLNRNIVTVAGMIKLALSIASGLAHLHMEIVGTQGKPAIAHRDIKSKNILVKKCETCAIADLGLAVKHDSILNTIDIPQNPKVGTKRYMAPEMLDDTMNVNIFESFKRADIYSVGLVYWEIARRCSVGGIVEEYQLPYYDMVPSDPSIEEMRKVVCDQKFRPSIPNQWQSCEALRVMGRIMRECWYANGAARLTALRIKKTISQLCVKEDCKA

SEQ ID NO: 6152 - protein, 300 aa, Homo sapiens
MEEEASSPGLGCSKPHLEKLTLGITRILESSPGVTEVTIIEKPPAERHMISSWEQKNNCVMPEDVKNFYLMTNGFHMTWSVKLDEHIIPLGSMAINSISKLTQLTQSSMYSLPNAPTLADLEDDTHEASDDQPEKPHFDSRSVIFELDSCNGSGKVCLVYKSGKPALAEDTEIWFLDRALYWHFLTDTFTAYYRLLITHLGLPQWQYAFTSYGISPQAKQWFSMYKPITYNTNLLTEETDSFVNKLDPSKVFKSKNKIVIPKKKGPVQPAGGQKGPSGPSGPSTSSTSKSSSGSGNPTRK

SEQ ID NO: 6153 - protein, 130 aa, Homo sapiens
MADEALFLLLHNEMVSGVYKSAEQGEVENGRCITKLENMGFRVGQGLIERFTKDTARFKDELDIMKFICKDFWTTVFKKQIDNLRTNHQYLAFTCGLIRGGLSNLGIKSIVTAEVSSMPACKFQVMIQKL

SEQ ID NO: 6154 - protein, 413 aa, Homo sapiens
MTRALCSALRQALLLLAAAAELSPGLKCVCLLCDSSNFTCQTEGACWASVMLTNGKEQVIKSCVSLPELNAQVFCHSSNNVTKTECCFTDFCNNITLHLPTGLPLLVQRTIARTIVLQEIVGKGRFGEVWHGRWCGEDVAVKIFSSRDERSWFREAEIYQTVMLRHENILGFIAADNKDNGTWTQLWLVSEYHEQGSLYDYLNRNIVTVAGMIKLALSIASGLAHLHMEIVGTQGKPAIAHRDIKSKNILVKKCETCAIADLGLAVKHDSILNTIDIPQNPKVGTKRYMAPEMLDDTMNVNIFESFKRADIYSVGLVYWEIARRCSVGGIVEEYQLPYYDMVPSDPSIEEMRKVVCDQKFRPSIPNQWQSCEALRVMGRIMRECWYANGAARLTALRIKKTISQLCVKEDCKA

SEQ ID NO: 6155 - protein, 106 aa, Homo sapiens
MAVTALAARTWLGVWGVRTMQARGFGSDQSENVDRGAGSIREAGGAFGKREQAEEERYFRAQSREQLAALKKHHEEEIVHHKKEIERLQKEIERHKQKIKMLKHDD

SEQ ID NO: 6156 - protein, 152 aa, Homo sapiens
MAQLGAVVAVASSFFCASLFSAVHKIEEGHIGVYYRGGALLTSTSGPGFHLMLPFITSYKSVQTTLQTDEVKNVPCGTSGGVMIYFDRIEVVNFLVPNAVYDIVKNYTADYDKALIFNKIHHELNQFCSVHTLQEVYIELFGLENDFSQESS

SEQ ID NO: 6157 - protein, 428 aa, Homo sapiens
MATSWGTVFFMLVVSCVCSAVSHRNQQTWFEGIFLSSMCPINVSASTLYGIMFDAGSTGTRIHVYTFVQKMPGQLPILEGEVFDSVKPGLSAFVDQPKQGAETVQGLLEVAKDSIPRSHWKKTPVVLKATAGLRLLPEHKAKALLFEVKEIFRKSPFLVPKGSVSIMDGSDEGILAWVTVNFLTGQLHGHRQETVGTLDLGGASTQITFLPQFEKTLEQTPRGYLTSFEMFNSTYKLYTHSYLGFGLKAARLATLGALETEGTDGHTFRSACLPRWLEAEWIFGGVKYQYGGNQEGEVGFEPCYAEVLRVVRGKLHQPEEVQRGSFYAFSYYYDRAVDTDMIDYEKGGILKVEDFERKAREVCDNLENFTSGSPFLCMDLSYITALLKDGFGFADSTVLQLTKKVNNIETGWALGATFHLLQSLGISH

SEQ ID NO: 6158 - protein, 291 aa, Homo sapiens
MEKLAASTEPQGPRPVLGRESVQVPDDQDFRSFRSECEAEVGWNLTYSRAGVSVWVQAVEMDRTLHKIKCRMECCDVPAETLYDVLHDIEYRKKWDSNVIETFDIARLTVNADVGYYSWRCPKPLKNRDVITLRSWLPMGADYIIMNYSVKHPKYPPRKDLVRAVSIQTGYLIQSTGPKSCVITYLAQVDPKGSLPKWVVNKSSQFLAPKAMKKMYKACLKYPEWKQKHLPHFKPWLHPEQSPLPSLALSELSVQHADSLENIDESAVAESREERMGGAGGEGSDDDTSLT

SEQ ID NO: 6159 - protein, 388 aa, Homo sapiens
MMSPSQASLLFLNVCIFICGEAVQGNCVHHSTDSSVVNIVEDGSNAKDESKSNDTVCKEDCEESCDVKTKITREEKHFMCRNLQNSIVSYTRSTKKLLRNMMDEQQASLDYLSNQVNELMNRVLLLTTEVFRKQLDPFPHRPVQSHGLDCTDIKDTIGSVTKTPSGLYIIHPEGSSYPFEVMCDMDYRGGGRTVIQKRIDGIIDFQRLWCDYLDGFGDLLGEFWLGLKKIFYIVNQKNTSFMLYVALESEDDTLAYASYDNFWLEDETRFFKMHLGRYSGNAGDAFRGLKKEDNQNAMPFSTSDVDNDGCRPACLVNGQSVKSCSHLHNKTGWWFNECGLANLNGIHHFSGKLLATGIQWGTWTKNNSPVKIKSVSMKIRRMYNPYFK

SEQ ID NO: 6160 - protein, 421 aa, Homo sapiens
MWYHRLSHLHSRLQDLLKGGVIYPALPQPNFKSLLPLAVHWHHTASKSLTCAWQQHEDHFELKYANTVMRFDYVWLRDHCRSASCYNSKTHQRSLDTASVDLCIKPKTIRLDETTLFFTWPDGHVTKYDLNWLVKNSYEGQKQKVIQPRILWNAEIYQQAQVPSVDCQSFLETNEGLKKFLQNFLLYGIAFVENVPPTQEHTEKLAERISLIRETIYGRMWYFTSDFSRGDTAYTKLALDRHTDTTYFQEPCGIQVFHCLKHEGTGGRTLLVDGFYAAEQVLQKAPEEFELLSKVPLKHEYIEDVGECHNHMIGIGPVLNIYPWNKELYLIRYNNYDRAVINTVPYDVVHRWYTAHRTLTIELRRPENEFWVKLKPGRVLFIDNWRVLHGRECFTGYRQLCGCYLTRDDVLNTARLLGLQA

SEQ ID NO: 6161 - protein, 78 aa, Homo sapiens; identical to SEQ ID NO: 6093

SEQ ID NO: 6162 - protein, 238 aa, Homo sapiens
MVLLLLVAIPLLVHSSRGPAHYEMLGRCRMVCDPHGPRGPGPDGAPASVPPFPPGAKGEVGRRGKAGLRGPPGPPGPRGPPGEPGRPGPPGPPGPGPGGVAPAAGYVPRIAFYAGLRRPHEGYEVLRFDDVVTNVGNAYEAASGKFTCPMPGVYFFAYHVLMRGGDGTSMWADLMKNGQVRASAIAQDADQNYDYASNSVILHLDVGDEVFIKLDGGKVHGGNTNKYSTFSGFIIYPD

SEQ ID NO: 6163 - protein, 228 aa, Homo sapiens
MSYVFVNDSSQTNVPLLQACIDGDFNYSKRLLESGFDPNIRDSRGRTGLHLAAARGNVDICQLLHKFGADLLATDYQGNTALHLCGHVDTIQFLVSNGLKIDICNHQGATPLVLAKRRGVNKDVIRLLESLEEQEVKGFNRGTHSKLETMQTAESESAMESHSLLNPNLQQGEGVLSSFRTTWQEFVEDLGFWRVLLLIFVIALLSLGIAYYVSGVLPFVENQPELVH

SEQ ID NO: 6164 - protein, 441 aa, Homo sapiens
MALFGALFLALLAGAHAEFPGCKIRVTSKALELVKQEGLRFLEQELETITIPDLRGKEGHFYYNISEVKVTELQLTSSELDFQPQQELMLQITNASLGLRFRRQLLYWFLKVYDFLSTFITSGMRFLLNQQICPVLYHAGTVLLNSLLDTVPVRSSVDELVGIDYSLMKDPVASTSNLDMDFRGAFFPLTERNWSLPNRAVEPQLQEEERMVYVAFSEFFFDSAMESYFRAGALQLLLVGDKVPHDLDMLLRATYFGSIVLLSPAVIDSPLKLELRVLAPPRCTIKPSGTTISVTASVTIALVPPDQPEVQLSSMTMDARLSAKMALRGKALRTQLDLRRFRIYSNHSALESLALIPLQAPLKTMLQIGVMPMLNERTWRGVQIPLPEGINFVHEVVTNHAGFLTIGADLHFAKGLREVIEKNRPADVRASTAPTPSTAAV

SEQ ID NO: 6165 - protein, 816 aa, Homo sapiens
MAVSLDDDVPLILTLDEGGSAPLAPSNGLGQEELPSKNGGSYAIHDSQAPSLSSGGESSPSSPAHNWEMNYQEAAIYLQEGENNDKFFTHPKDAKALAAYLFAHNHLFYLMELATALLLLLLSLCEAPAVPALRLGIYVHATLELFALMVVVFELCMKLRWLGLHTFIRHKRTMVKTSVLVVQFVEAIVVLVRQMSHVRVTRALRCIFLVDCRYCGGVRRNLRQIFQSLPPFMDILLLLLFFMIIFAILGFYLFSPNPSDPYFSTLENSIVSLFVLLTTANFPDVMMPSYSRNPWSCVFFIVYLSIELYFIMNLLLAVVFDTFNDIEKRKFKSLLLHKRTAIQHAYRLLISQRRPAGISYRQFEGLMRFYKPRMSARERYLTFKALNQNNTPLLSLKDFYDIYEVAALKWKAKKNREHWFDELPRTALLIFKGINILVKSKAFQYFMYLVVAVNGVWILVETFMLKGGNFFSKHVPWSYLVFLTIYGVELFLKVAGLGPVEYLSSGWNLFDFSVTVFAFLGLLALALNMEPFYFIVVLRPLQLLRLFKLKERYRNVLDTMFELLPRMASLGLTLLIFYYSFAIVGMEFFCGIVFPNCCNTSTVADAYRWRNHTVGNRTVVEEGYYYLNNFDNILNSFVTLFELTVVNNWYIIMEGVTSQTSHWSRLYFMTFYIVTMVVMTIIVAFILEAFVFRMNYSRKNQDSEVDGGITLEKEISKEELVAVLELYREARGASSDVTRLLETLSQMERYQQHSMVFLGRRSRTKSDLSLKMYQEEIQEWYEEHAREQEQQRQLSSSAAPAAQQPPGSRQRSQTVT

SEQ ID NO: 6166 - protein, 453 aa, Homo sapiens
MLSRSRCVSRAFSRSLSAFQKGNCPLGRRSLPGVSLCQGPGYPNSRKVVINNSVFSVRFFRTTAVCKDDLVTVKTPAFAESVTEGDVRWEKAVGDTVAEDEVVCEIETDKTSVQVPSPANGVIEALLVPDGGKVEGGTPLFTLRKTGAAPAKAKPAEAPAAAAPKAEPTAAAVPPPAAPIPTQMPPVPSPSQPPSGKPVSAVKPTVAPPLAEPGAGKGLRSEHREKMNRMRQRIAQRLKEAQNTCAMLTTFNEIDMSNIQEMRARHKEAFLKKHNLKLGFMSAFVKASAFALQEQPVVNAVIDDTTKEVVYRDYIDISVAVATPRGLVVPVIRNVEAMNFADIERTITELGEKARKNELAIEDMDGGTFTISNGGVFGSLFGTPIINPPQSAILGMHGIFDRPVAIGGKVEVRPMMYVALTYDHRLIDGREAVTFLRKIKAAVEDPRVLLLDL

SEQ ID NO: 6167 - protein, 65 aa, Homo sapiens; identical to SEQ ID NO: 6094

SEQ ID NO: 6168 - protein, 175 aa, Homo sapiens
MGTWILFACLLGAAFAMPVLTPLKWYQSIRPPYPSYGYEPMGGWLHHQIIPVLSQQHPPTHTLQPHHHIPVVPAQQPVIPQQPMMPVPGQHSMTPIQHHQPNLPPPAQQPYQPQPVQPQPHQPMQPQPPVHPMQPLPPQPPLPPMFPMQPLPPMLPDLTLEAWPSTDKTKREEVD

SEQ ID NO: 6169 - protein, 1499 aa, Homo sapiens
MRILANKTRLPHPRRREAPGSPPLSPRGHCPPAPAKPMHPENKLTNHGKTGNGGAQSQHQNVNQGPTCNVGSKGVGAGNHGAKANQISPSNSSLKNPQAGVPPFSSLKGKVKRDRSVSVDSGEQREAGTPSLDSEAKEVAPRSKRRCVLERKQPYSGDEWCSGPDSEEDDKPIGATHNCNVADPAMAAPQLGPGQTTQLPLSESSVPGAPHGPPPGLRPDAPGGGGGGGGVPGKPPSQFVYVFTTHLANTAAEAVLQGRADSILAYHQQNVPRAKLDQAPKVPPTPEPLPLSTPSAGTPQSQPPPLPPPPPPAPGSAPPALPPEGPPEDSSQDLAPNSVGAASTGGGTGGTHPNTPTATTANNPLPPGGDPSSAPGPALLGEAAAPGNGQRSLVGSEGLSKEQLEHRERSLQTLRDIERLLLRSGETEPFLKGPPGGAGEGGPPAQAPPPPQQPPTAPPSGLKKYEEPLQSMISQTQSLGGPPLEHEVPGHPPGGDMGQQMNMMIQRLGQDSLTPEQVAWRKLQEEYYEEKRRKEEQIGLHGSRPLQDMMGMGGMMVRGPPPPYHSKPGDQWPPGMGAQLRGPMDVQDPMQLRGGPPFPGPRFPGNQIQRVPGFGGMQSMPMEVPMNAMQRPVRPGMGWTEDLPPMGGPSNFAQNTMPYPGGQGEAERFMTPRVREELLRHQLLEKRSMGMQRPLGMAGSGMGQSMEMERMMQAHRQMDPAMFPGQMAGGEGLAGTPMGMEFGGGRGLLSPPMGQSGLREVDPPMGPGNLNMNMNVNMNMNMNLNVQMTPQQQMLMSQKMRGPGDLMGPQGLSPEEMARVRAQNSSGVMGGPQKMLMPSQFPNQGQQGFSGGQGPYQAMSQDMGNTQDMFSPDQSSMPMSNVGTTRLSHMPLPPASNPPGTVHSAPNRGLGRRPSDLTISINQMGSPGMGHLKSPTLSQVHSPLVTSPSANLKSPQTPSQMVPLPSANPPGPLKSPQVLGSSLSVRSPTGSPSRLKSPSMAVPSPGWVASPKTAMPSPGVSQNKQPPLNMNSSTTLSNMEQGTLPPSGPRSSSSAPPANPPSGLMNPSLPFTSSPDPTPSQNPLSLMMTQMSKYAMPSSTPLYHNAIKTIATSDDELLPDRPLLPPPPPPQGSGPGISNSQPSQMHLNSAAAQSPMGMNLPGQQPLSHEPPPAMLPSPTPLGSNIPLHPNAQGTGGPPQNSMMMAPGGPDSLNAPCGPVPSSSQMMPFPPRLQQPHGAMAPTGGGGGGPGLQQHYPSGMALPPEDLPNQPPGPMPPQQHLMGKAMAGRMGDAYPPGVLPGVASVLNDPELSEVIRPTPTGIPEFDLSRIIPSEKPSSTLQYFPKSENQPPKAQPPNLHLMNLQNMMAEQTPSRPPNLPGQQGVQRGLNMSMCHPGQMSLLGRTGVPPQQGMVPHGLHQGVMSPPQGLMTQQNFMLMKQRGVGGEVYSQPPHMLSPQGSLMGPPPQQNLMVSHPLRQRSVSLDSQMGYLPAPGGMANLPF

SEQ ID NO: 6170 - protein, 1304 aa, Homo sapiens
MAKIAKTHEDIEAQIREIQGKKAALDEAQGVGLDSTGYYDQEIYGGSDSRFAGYVTSIAATELEDDDDDYSSSTSLLGQKKPGYHAPVALLNDIPQSTEQYDPFAEHRPPKIADREDEYKKHRRTMIISPERLDPFADGGKTPDPKMNARTYMDVMREQHLTKEEREIRQQLAEKAKAGELKVVNGAAASQPPSKRKRRWDQTADQTPGATPKKLSSWDQAETPGHTPSLRWDETPGRAKGSETPGATPGSKIWDPTPSHTPAGAATPGRGDTPGHATPGHGGATSSARKNRWDETPKTERDTPGHGSGWAETPRTDRGGDSIGETPTPGASKRKSRWDETPASQMGGSTPVLTPGKTPIGTPAMNMATPTPGHIMSMTPEQLQAWRWEREIDERNRPLSDEELDAMFPEGYKVLPPPAGYVPIRTPARKLTATPTPLGGMTGFHMQTEDRTMKSVNDQPSGNLPFLKPDDIQYFDKLLVDVDESTLSPEEQKERKIMKLLLKIKNGTPPMRKAALRQITDKAREFGAGPLFNQILPLLMSPTLEDQERHLLVKVIDRILYKLDDLVRPYVHKILVVIEPLLIDEDYYARVEGREIISNLAKAAGLATMISTMRPDIDNMDEYVRNTTARAFAVVASALGIPSLLPFLKAVCKSKKSWQARHTGIKIVQQIAILMGCAILPHLRSLVEIIEHGLVDEQQKVRTISALAIAALAEAATPYGIESFDSVLKPLWKGIRQHRGKGLAAFLKAIGYLIPLMDAEYANYYTREVMLILIREFQSPDEEMKKIVLKVVKQCCGTDGVEANYIKTEILPPFFKHFWQHRMALDRRNYRQLVDTTVELANKVGAAEIISRIVDDLKDEAEQYRKMVMETIEKIMGNLGAADIDHKLEEQLIDGILYAFQEQTTEDSVMLNGFGTVVNALGKRVKPYLPQICGTVLWRLNNKSAKVRQQAADLISRTAVVMKTCQEEKLMGHLGVVLYEYLGEEYPEVLGSILGALKAIVNVIGMHKMTPPIKDLLPRLTPILKNRHEKVQENCIDLVGRIADRGAEYVSAREWMRICFELLELLKAHKKAIRRATVNTFGYIAKAIGPHDVLATLLNNLKVQERQNRVCTTVAIAIVAETCSPFTVLPALMNEYRVPELNVQNGVLKSLSFLFEYIGEMGKDYIYAVTPLLEDALMDRDLVHRQTASAVVQHMSLGVYGFGCEDSLNHLLNYVWPNVFETSPHVIQAVMGALEGLRVAIGPCRMLQYCLQGLFHPARKVRDVYWKIYNSIYIGSQDALIAHYPRIYNDDKNTYIRYELDYIL

SEQ ID NO: 6171 - protein, 668 aa, Homo sapiens
MELEVPDEAESAEAGAVPSEAAWAAESGAAAGLAQKKAAPTEVLSMTAQPGPGHGKKLGHRGVDASGETTYKKTTSSTLKGAIQLGIGYTVGHLSSKPERDVLMQDFYVVESIFFPSEGSNLTPAHHFQDFRFKTYAPVAFRYFRELFGIRPDDYLYSLCNEPLIELSNPGASGSLFYVTSDDEFIIKTVMHKEAEFLQKLLPGYYMNLNQNPRTLLPKFYGLYCVQSGGKNIRVVVMNNILPRVVKMHLKFDLKGSTYKRRASKKEKEKSFPTYKDLDFMQDMPEGLLLDADTFSALVKTLQRDCLVLESFKIMDYSLLLGVHNIDQHERERQAQGAQSTSDEKRPVGQKALYSTAMESIQGGAARGEAIESDDTMGGIPAVNGRGERLLLHIGIIDILQSYRFIKKLEHTWKALVHDGDTVSVHRPSFYAERFFKFMSNTVFRKNSSLKSSPSKKGRGGALLAVKPLGPTAAFSASQIPSEREEAQYDLRGARSYPTLEDEGRPDLLPCTPPSFEEATTASIATTLSSTSLSIPERSPSETSEQPRYRRRTQSSGQDGRPQEEPPAEEDLQQITVQVEPACSVEIVVPKEEDAGVEASPAGASAAVEVETASQASDEEGAPASQASDEEDAPATDIYFPTDERSWVYSPLHYSAQAPPASDGESDT

SEQ ID NO: 6172 - protein, 170 aa, Homo sapiens
MGLAGVCALRRSAGYILVGGAGGQSAAAAARRYSEGEWASGGVRSFSRAAAAMAPIKVGDAIPAVEVFEGEPGNKVNLAELFKGKKGVLFGVPGAFTPGCSKVRLLADPTGAFGKETDLLLDDSLVSIFGNRRLKRFSMVVQDGIVKALNVEPDGTGLTCSLAPNIISQL

SEQ ID NO: 6173 - protein, 336 aa, Homo sapiens
MLRGPWRQLWLFFLLLLPGAPEPRGASRPWEGTDEPGSAWAWPGFQRLQEQLRAAGALSKRYWTLFSCQVWPDDCDEDEEAATGPLGWRLPLLGQRYLDLLTTWYCSFKDCCPRGDCRISNNFTGLEWDLNVRLHGQHLVQQLVLRTVRGYLETPQPEKALALSFHGWSGTGKNFVARMLVENLYRDGLMSDCVRMFIATFHFPHPKYVDLYKEQLMSQIRETQQLCHQTLFIFDEAEKLHPGLLEVLGPHLERRAPEGHRAESPWTIFLFLSNLRGDIINEVVLKLLKAGWSREEITMEHLEPHLQAEIVETIGFSFLTTRWPHLDLPTSSVAPT

SEQ ID NO: 6174 - protein, 125 aa, Homo sapiens
MGLAGVCALRRSAGYILVGGAGGQSAAAAARRYSEGEWASGGVRSFSRAAAAMAPIKVRLLADPTGAFGKETDLLLDDSLVSIFGNRRLKRFSMVVQDGIVKALNVEPDGTGLTCSLAPNIISQL

SEQ ID NO: 6175 - protein, 1133 aa, Homo sapiens
MSPTQWDFPVELCCRPMAFVTLTGLDVVYNAVHRAVWDAFCANRRADRVPISFKVLPGDHEYPKCRPKRTSYEWYIPKGILKTGWMNKHLNLVPALVVVFYELDWDEPQWKEKQSECATRVEIVRQSLQGRNTKVAVVLIQKKTPLPPGEDVIASERAAALCNACELSGKSLFVLPHTDHLVGYIIRLENAFYEHAQTYYYTEIRRVKSHKEFLNKTTHQLLFVRHQFKIAFFSELKQDTQNALKNYRTAYNLVHELRAHETNILEIKTMAGFINYKICRLCFQHNTPLDAIAQFRKHIDLCKKKIGSAELSFEHDAWMSKQFQAFGDLFDEAIKLGLTAIQTQNPGFYYQQAAYYAQERKQLAKTLCNHEASVMYPNPDPLETQTGVLDFYGQRSWRQGILSFDLSDPEKEKVGILAIQLKERNVVHSEIIITLLSNAVAQFKKYKCPRMKSHLMVQMGEEYYYAKDYTKALKLLDYVMCDYRSEGWWTLLTSVLTTALKCSYLMAQLKDYITYSLELLGRASTLKDDQKSRIEKNLINVLMNESPDPEPDCDILAVKTAQKLWADRISLAGSNIFTIGVQDFVPFVQCKAKFHAPSFHVDVPVQFDIYLKADCPHPIRFSKLCVSFNNQEYNQFCVIEEASKANEVLENLTQGKMCLVPGKTRKLLFKFVAKTEDVGKKIEITSVDLALGNETGRCVVLNWQGGGGDAASSQEALQAARSFKRRPKLPDNEVHWDSIIIQASTMIISRVPNISVHLLHEPPALTNEMYCLVVTVQSHEKTQIRDVKLTAGLKPGQDANLTQKTHVTLHGTELCDESYPALLTDIPVGDLHPGEQLEKMLYVRCGTVGSRMFLVYVSYLINTTVEEKEIVCKCHKDETVTIETVFPFDVAVKFVSTKFEHLERVYADIPFLLMTDLLSASPWALTIVSSELQLAPSMTTVDQLESQVDNVILQTGESASECFCLQCPSLGNIEGGVATGHYIISWKRTSAMENIPIITTVITLPHVIVENIPLHVNADLPSFGRVRESLPVKYHLQNKTDLVQDVEISVEPSDAFMFSGLKQIRLRILPGTEQEMLYNFYPLMAGYQQLPSLNINLLRFPNFTNQLLRRFIPTSIFVKPQGRLMDDTSIAAA

SEQ ID NO: 6176 - protein, 93 aa, Homo sapiens
MKLFLVLIILLFEVLTDGARLKKCFNKVTGYCRKKCKVGERYEIGCLSGKLCCANDEEEKKHVSFKKPHQHSGEKLSVLQDYIILPTITIFTV

SEQ ID NO: 6177 - protein, 338 aa, Homo sapiens
MMRTCVLLSAVLWCLTGVQCPRFTLFNKKGFIYGKTGQPDKIYVELHQNSPVLICMDFKLSKKEIVDPTYLWIGPNEKTLTGNNRINITETGQLMVKDFLEPLSGLYTCTLSYKTVKAETQEEKTVKKRYDFMVFAYREPDYSYQMAVRFTTRSCIGRYNDVFFRVLKKILDSLISDLSCHVIEPSYKCHSVEIPEHGLIHELFIAFQVNPFAPGWKGACNGSVDCEDTTNHNILQARDRIEDFFRSQAYIFYHNFNKTLPAMHFVDHSLQVVRLDSCRPGFGKNERLHSNCASCCVVCSPATFSPDVNVTCQTCVSVLTYGAKSCPQTSNKNQQYED

SEQ ID NO: 6178 - protein, 420 aa, Homo sapiens
MLPGLRRLLQAPASACLLLMLLALPLAAPSCPMLCTCYSSPPTVSCQANNFSSVPLSLPPSTQRLFLQNNLIRTLRPGTFGSNLLTLWLFSNNLSTIYPGTFRHLQALEELDLGDNRHLRSLEPDTFQGLERLQSLHLYRCQLSSLPGNIFRGLVSLQYLYLQENSLLHLQDDLFADLANLSHLFLHGNRLRLLTEHVFRGLGSLDRLLLHGNRLQGVHRAAFRGLSRLTILYLFNNSLASLPGEALADLPSLEFLRLNANPWACDCRARPLWAWFQRARVSSSDVTCATPPERQGRDLRALREADFQACPPAAPTRPGSRARGNSSSNHLYGVAEAGAPPADPSTLYRDLPAEDSRGRQGGDAPTEDDYWGGYGGEDQRGEQMCPGAACQAPPDSRGPALSAGLPSPLLCLLLLVPHHL

SEQ ID NO: 6179 - protein, 380 aa, Homo sapiens
MATLSFVFLLLGAVSWPPASASGQEFWPGQSAADILSGAASRRRYLLYDVNPPEGFNLRRDVYIRIASLLKTLLKTEEWVLVLPPWGRLYHWQSPDIHQVRIPWSEFFDLPSLNKNIPVIEYEQFIAESGGPFIDQVYVLQSYAEGWKEGTWEEKVDERPCIDQLLYSQDKHEYYRGWFWGYEETRGLNVSCLSVQGSASIVAPLLLRNTSARSVMLDRAENLLHDHYGGKEYWDTRRSMVFARHLREVGDEFRSRHLNSTDDADRIPFQEDWMKMKVKLGSALGGPYLGVHLRRKDFIWGHRQDVPSLEGAVRKIRSLMKTHRLDKVFVATDAVRKEYEELKKLLPEMVRFEPTWEELELYKDGGVAIIDQWICAHASS

SEQ ID NO: 6180 - protein, 581 aa, Homo sapiens
MATEGGGKEMNEIKTQFTTREGLYKLLPHSEYSRPNRVPFNSQGSNPVRVSFVNLNDQSGNGDRLCFNVGRELYFYIYKGVRKAADLSKPIDKRIYKGTQPTCHDFNHLTATAESVSLLVGFSAGQVQLIDPIKKETSKLFNEERLIDKSRVTCVKWVPGSESLFLVAHSSGNMYLYNVEHTCGTTAPHYQLLKQGESFAVHTCKSKSTRNPLLKWTVGEGALNEFAFSPDGKFLACVSQDGFLRVFNFDSVELHGTMKSYFGGLLCVCWSPDGKYIVTGGEDDLVTVWSFVDCRVIARGHGHKSWVSVVAFDPYTTSVEEGDPMEFSGSDEDFQDLLHFGRDRANSTQSRLSKRNSTDSRPVSVTYRFGSVGQDTQLCLWDLTEDILFPHQPLSRARTHTNVMNATSPPAGSNGNSVTTPGNSVPPPLPRSNSLPHSAVSNAGSKSSVMDGAIASGVSKFATLSLHDRKERHHEKDHKRNHSMGHISSKSSDKLNLVTKTKTDPAKTLGTPLCPRMEDVPLLEPLICKKIAHERLTVLIFLEDCIVTACQEGFICTWGRPGKVGSLSSPSQASSPGGTVV

SEQ ID NO: 6181 - protein, 532 aa, Homo sapiens
MMFQDSVAFEDVAVSFTQEEWALLDPSQKNLYRDVMQETFKNLTSVGKTWKVQNIEDEYKNPRRNLSLMREKLCESKESHHCGESFNQIADDMLNRKTLPGITPCESSVCGEVGTGHSSLNTHIRADTGHKSSEYQEYGENPYRNKECKKAFSYLDSFQSHDKACTKEKPYDGKECTETFISHSCIQRHRVMHSGDGPYKCKFCGKAFYFLNLCLIHERIHTGVKPYKCKQCGKAFTRSTTLPVHERTHTGVNADECKECGNAFSFPSEIRRHKRSHTGEKPYECKQCGKVFISFSSIQYHKMTHTGEKPYECKQCGKAFRCGSHLQKHGRTHTGEKPYECRQCGKAFRCTSDLQRHEKTHTEDKPYGCKQCGKGFRCASQLQIHERTHSGEKPHECKECGKVFKYFSSLRIHERTHTGEKPHECKQCGKAFRYFSSLHIHERTHTGDKPYECKVCGKAFTCSSSIRYHERTHTGEKPYECKHCGKAFISNYIRYHERTHTGEKPYQCKQCGKAFIRASSCREHERTHTINR

SEQ ID NO: 6182 - protein, 2342 aa, Homo sapiens
MDGVSSEANEENDNIERPVRRRHSSILKPPRSPLQDLRGGNERVQESNALRNKKNSRRVSFADTIKVFQTESHMKIVRKSEMEGCSAMVPSQLQLLPPGFKRFSCLSLPETETGENLLLIQNKKLEDNYCEITGMNTLLSAPIHTQMQQKEFSIIEHTRERKHANDQTVIFSDENQMDLTSSHTVMITKGLLDNPISEKSTKIDTTSFLANLKLHTEDSRMKKEVNFSVDQNTSSENKIDFNDFIKRLKTGKCSAFPDVPDKENFEIPIYSKEPNSASSTHQMHVSLKEDENNSNITRLFREKDDGMNFTQCHTANIQTLIPTSSETNSRESKGNDITIYGNDFMDLTFNHTLQILPATGNFSEIENQTQNAMDVTTGYGTKASGNKTVFKSKQNTAFQDLSINSADKIHITRSHIMGAETHIVSQTCNQDARILAMTPESIYSNPSIQGCKTVFYSSCNDAMEMTKCLSNMREEKNLLKHDSNYAKMYCNPDAMSSLTEKTIYSGEENMDITKSHTVAIDNQIFKQDQSNVQIAAAPTPEKEMMLQNLMTTSEDGKMNVNCNSVPHVSKERIQQSLSNPLSISLTDRKTELLSGENMDLTESHTSNLGSQVPLAAYNLAPESTSESHSQSKSSSDECEEITKSRNEPFQRSDIIAKNSLTDTWNKDKDWVLKILPYLDKDSPQSADCNQEIATSHNIVYCGGVLDKQITNRNTVSWEQSLFSTTKPLFSSGQFSMKNHDTAISSHTVKSVLGQNSKLAEPLRKSLSNPTPDYCHDKMIICSEEEQNMDLTKSHTVVIGFGPSELQELGKTNLEHTTGQLTTMNRQIAVKVEKCGKSPIEKSGVLKSNCIMDVLEDESVQKPKFPKEKQNVKIWGRKSVGGPKIDKTIVFSEDDKNDMDITKSYTIEINHRPLLEKRDCHLVPLAGTSETILYTCRQDDMEITRSHTTALECKTVSPDEITTRPMDKTVVFVDNHVELEMTESHTVFIDYQEKERTDRPNFELSQRKSLGTPTVICTPTEESVFFPGNGESDRLVANDSQLTPLEEWSNNRGPVEVADNMELSKSATCKNIKDVQSPGFLNEPLSSKSQRRKSLKLKNDKTIVFSENHKNDMDITQSCMVEIDNESALEDKEDFHLAGASKTILYSCGQDDMEITRSHTTALECKTLLPNEIAIRPMDKTVLFTDNYSDLEVTDSHTVFIDCQATEKILEENPKFGIGKGKNLGVSFPKDNSCVQEIAEKQALAVGNKIVLHTEQKQQLFAATNRTTNEIIKFHSAAMDEKVIGKVVDQACTLEKAQVESCQLNNRDRRNVDFTSSHATAVCGSSDNYSCLPNVISCTDNLEGSAMLLCDKDEEKANYCPVQNDLAYANDFASEYYLESEGQPLSAPCPLLEKEEVIQTSTKGQLDCVITLHKDQDLIKDPRNLLANQTLVYSQDLGEMTKLNSKRVSFKLPKDQMKVYVDDIYVIPQPHFSTDQPPLPKKGQSSINKEEVILSKAGNKSLNIIENSSAPICENKPKILNSEEWFAAACKKELKENIQTTNYNTALDFHSNSDVTKQVIQTHVNAGEAPDPVITSNVPCFHSIKPNLNNLNGKTGEFLAFQTVHLPPLPEQLLELGNKAHNDMHIVQATEIHNINIISSNAKDSRDEENKKSHNGAETTSLPPKTVFKDKVRRCSLGIFLPRLPNKRNCSVTGIDDLEQIPADTTDINHLETQPVSSKDSGIGSVAGKLNLSPSQYINEENLPVYPDEINSSDSINIETEEKALIETYQKEISPYENKMGKTCNSQKRTWVQEEEDIHKEKKIRKNEIKFSDTTQDREIFDHHTEEDIDKSANSVLIKNLSRTPSSCSSSLDSIKADGTSLDFSTYRSSQMESQFLRDTICEESLREKLQDGRITIREFFILLQVHILIQKPRQSNLPGNFTVNTPPTPEDLMLSQYVYRPKIQIYREDCEARRQKIEELKLSASNQDKLLVDINKNLWEKMRHCSDKELKAFGIYLNKIKSCFTKMTKVFTHQGKVALYGKLVQSAQNEREKLQIKIDEMDKILKKIDNCLTEMETETKNLEDEEKNNPVEEWDSEMRAAEKELEQLKTEEEELQRNLLELEVQKEQTLAQIDFMQKQRNRTEELLDQLSLSEWDVVEWSDDQAVFTFVYDTIQLTITFEESVVGFPFLDKRYRKIVDVNFQSLLDEDQAPPSSLLVHKLIFQYVEEKESWKKTCTTQHQLPKMLEEFSLVVHHCRLLGEEIEYLKRWGPNYNLMNIDINNNELRLLFSSSAAFAKFEITLFLSAYYPSVPLPSTIQNHVGNTSQDDIATILSKVPLENNYLKNVVKQIYQDLFQDCHFYH

SEQ ID NO: 6183 - protein, 443 aa, Homo sapiens
MGGPRAWALLCLGLLLPGGGAAWSIGAAPFSGRRNWCSYVVTRTISCHVQNGTYLQRVLQNCPWPMSCPGSSYRTVVRPTYKVMYKIVTAREWRCCPGHSGVSCEEVAASSASLEPMWSGSTMRRMALRPTAFSGCLNCSKVSELTERLKVLEAKMTMLTVIEQPVPPTPATPEDPAPLWGPPPAQGSPGDGGLQDQVGAWGLPGPTGPKGDAGSRGPMGMRGPPGPQGPPGSPGRAGAVGTPGERGPPGPPGPPGPPGPPAPVGPPHARISQHGDPLLSNTFTETNNHWPQGPTGPPGPPGPMGPPGPPGPTGVPGSPGHIGPPGPTGPKGISGHPGEKGERGLRGEPGPQGSAGQRGEPGPKGDPGEKSHWGEGLHQLREALKILAERVLILETMIGLYEPELGSGAGPAGTGTPSLLRGKRGGHATNYRIVAPRSRDERG

SEQ ID NO: 6184 - protein, 70 aa, Homo sapiens
MRVLFFVFGVLSLMFTVPPARSFISNDECPSEYYHCRLKCNADEHAIRYCADFSICCKLKIIEIDGQKKW

SEQ ID NO: 6185 - protein, 119 aa, Homo sapiens
MWRSRWDASVLKAEALALLPCGLGMAFSQSHVMAARRHQHSRLIIEVDEYSSNPTQAFTFYNINQGRFQPPHVQMVDPVPHDAPKPPGYTRFVCVSDTHSRTDPIQMPYGDVLIHAGDF

SEQ ID NO: 6186 - protein, 462 aa, Homo sapiens
MDNGMFSGFIMIKNLLLFCISMNLSSHFGFSQMPTSSVKDETNDNITIFTRILDGLLDGYDNRLRPGLGERITQVRTDIYVTSFGPVSDTEMEYTIDVFFRQSWKDERLRFKGPMQRLPLNNLLASKIWTPDTFFHNGKKSIAHNMTTPNKLLRLEDDGTLLYTMRLTISAECPMQLEDFPMDAHACPLKFGSYAYPNSEVVYVWTNGSTKSVVVAEDGSRLNQYHLMGQTVGTENISTSTGEYTIMTAHFHLKRKIGYFVIQTYLPCIMTVILSQVSFWLNRESVPARTVFGVTTVLTMTTLSISARNSLPKVAYATAMDWFIAVCYAFVFSALIEFATVNYFTKRGWAWDGKKALEAAKIKKKREVILNKSTNAFTTGKMSHPPNIPKEQTPAGTSNTTSVSVKPSEEKTSESKKTYNSISKIDKMSRIVFPVLFGTFNLVYWATYLNREPVIKGAASPK

SEQ ID NO: 6187 - protein, 509 aa, Homo sapiens
MSENLDKSNVNEAGKSKSNDSEEGLEDAVEGADEALQKAIKSDSSSPQRVQRPHSSPPRFVTVEELLETARGVTNMALAHEIVVNGDFQIKPVELPENSLKKRVKEIVHKAFWDCLSVQLSEDPPAYDHAIKLVGEIKETLLSFLLPGHTRLRNQITEVLDLDLIKQEAENGALDISKLAEFIIGMMGTLCAPARDEEVKKLKDIKEIVPLFREIFSVLDLMKVDMANFAISSIRPHLMQQSVEYERKKFQEILERQPNSLDFVTQWLEEASEDLMTQKYKHALPVGGMAAGSGDMPRLSPVAVQNYAYLKLLKWDHLQRPFPETVLMDQSRFHELQLQLEQLTILGAVLLVTFSMAAPGISSQADFAEKLKMIVKILLTDMHLPSFHLKDVLTTIGEKVCLEVSSCLSLCGSSPFTTDKETVLKGQIQAVASPDDPIRRIMESRILTFLETYLASGHQKPLPTVPGGLSPVQRELEEVAIKFARLVNYNKMVFCPYYDAILSKILVRS

SEQ ID NO: 6188 - protein, 756 aa, Homo sapiens
MDSGRDFLTLHGLQDDEDLQALLKGSQLLKVKSSSWRRERFYKLQEDCKTIWQESRKVMRTPESQLFSIEDIQEVRMGHRTEGLEKFARDVPEDRCFSIVFKDQRNTLDLIAPSPADAQHWVLGLHKIIHHSGSMDQRQKLQHWIHSCLRKADKNKDNKMSFKELQNFLKELNIQVDDSYARKIFRECDHSQTDSLEDEEIEAFYKMLTQRVEIDRTFAEAAGSGETLSVDQLVTFLQHQQREEAAGPALALSLIERYEPSETAKAQRQMTKDGFLMYLLSADGSAFSLAHRRVYQDMGQPLSHYLVSSSHNTYLLEDQLAGPSSTEAYIRALCKGCRCLELDCWDGPNQEPIIYHGYTFTSKILFCDVLRAIRDYAFKASPYPVILSLENHCTLEQQRVMARHLHAILGPMLLNRPLDGVTNSLPSPEQLKGKILLKGKKLGGLLPPGGEGGPEATVVSDEDEAAEMEDEAVRSRVQHKPKEDKLRLAQELSDMVIYCKSVHFGGFSSPGTPGQAFYEMASFSENRALRLLQESGNGFVRHNVGHLSRIYPAGWRTDSSNYSPVEMWNGGCQIVALNFQTPGPEMDVYQGRFQDNGACGYVLKPAFLRDPNGTFNPRALAQGPWWARKRLNIRVISGQQLPKVNKNKNSIVDPKVTVEIHGVSRDVASRQTAVITNNGFNPWWDTEFAFEVVVPDLALIRFLVEDYDASSKNDFIGQSTIPLNSLKQGYRHVHLMSKNGDQHPSATLFVKISLQD

SEQ ID NO: 6189 - protein, 175 aa, Homo sapiens
MSHGAGLVRTTCSSGSALGPGAGAAQPSASPLEGLLDLSYPRTHAALLKVAQMVTLLIAFICVRSSLWTNYSAYSYFEVVTICDLIMILAFYLVHLFRFYRVLTCISWPLSELLHYLIGTLLLLIASIVAASKSYNQSGLVAGAIFGFMATFLCMASIWLSYKISCVTQSTDAAV

SEQ ID NO: 6190 - protein, 1132 aa, Homo sapiens
MGANASNYPHSCSPRVGGNSQAQQTFIGTSSYSQQGYGCESKLYSLDHGHEKPQDKKKRTSGLATLKKKFIKRRKSNRSADHAKQMRELLSGWDVRDVNALVEEYEGTSALKELSLQASLARPEARTLQKDMADLYEYKYCTDVDLIFQETCFPVHRAILAARCPFFKTLLSSSPEYGAEIIMDINTAGIDMPMFSALLHYLYTGEFGMEDSRFQNVDILVQLSEEFGTPNSLDVDMRGLFDYMCYYDVVLSFSSDSELVEAFGGNQNCLDEELKAHKAVISARSPFFRNLLQRRIRTGEEITDRTLRTPTRIILDESIIPKKYATVILHCMYTDVVDLSVLHCSPSVGSLSEVQALVAGKPNMTRAEEAMELYHIALFLEFNMLAQGCEDIIAESISLDTLIAILKWSSHPYGSKWVHRQALHFLCEEFSQVMTSDVFYELSKDHLLTAIQSDYLQASEQDILKYLIKWGEHQLMKRIADREPNLLSGTAHSVNKRGVKRRDLDMEELREILSSLLPFVRIEHILPINSEVLSDAMKRGLISTPPSDMLPTTEGGKSNAWLRQKNAGIYVRPRLFSPYVEEAKSVLDEMMVEQTDLVRLRMVRMSNVPDTLYMVNNAVPQCCHMISHQQISSNQSSPPSVVANEIPVPRLLIMKDMVRRLQELRHTEQVQRAYALNCGEGATVSYEIQIRVLREFGLADAAAELLQNPHKFFPDERFGDESPLLTMRQPGRCRVNSTPPAETMFTDLDSFVAFHPPLPPPPPPYHPPATPIHNQLKAGWKQRPPSQHPSRSFSYPCNHSLFHSRTAPKAGPPPVYLPSVKAAPPDCTSTAGLGRQTVAAAAATTTSTATAAAAAASEKQVRTQPVLNDLMPDIAVGVSTLSLKDRRLPELAVDTELSQSVSEAGPGPPQHLSCIPQRHTHTSRKKHTLEQKTDTRENPQEYPDFYDFSNAACRPSTPALSRRTPSPSQGGYFGPDLYSHNKASPSGLKSAYLPGQTSPKKQEEARREYPLSPDGHLHRQKNEPIHLDVVEQPPQRSDFPLAAPENASTGPAHVRGRTAVETDLTFGLTPNRPSLSACSSEAPEERSGRRLADSESLGHGAQRNTDLEREDSISRGRRSPSKPDFLYKKSAL

SEQ ID NO: 6191 - protein, 222 aa, Homo sapiens
MAEKPKLHYFNARGRMESTRWLLAAAGVEFEEKFIKSAEDLDKLRNDGYLMFQQVPMVEIDGMKLVQTRAILNYIASKYNLYGKDIKERALIDMYIEGIADLGEMILLLPVCPPEEKDAKLALIKEKIKNRYFPAFEKVLKSHGQDYLVGNKLSRADIHLVELLYYVEELDSSLISSFPLLKALKTRISNLPTVKKFLQPGSPRKPPMDEKSLEEARKIFRF

SEQ ID NO: 6192 - protein, 867 aa, Homo sapiens
MDNPQALPLFLLLASLVGILTLRASSGLQQTNFSSAFSSDSKSSSQGLGVEVPSIKPPSWKVPDQFLDSKASAGISDSSWFPEALSSNMSGSFWSNVSAEGQDLSPVSPFSETPGSEVFPDISDPQVPAKDPKPSFTVKTPASNISTQVSHTKLSVEAPDSKFSPDDMDLKLSAQSPESKFSAETHSAASFPQQVGGPLAVLVGTTIRLPLVPIPNPGPPTSLVVWRRGSKVLAAGGLGPGAPLISLDPAHRDHLRFDQARGVLELASAQLDDAGVYTAEVIRAGVSQQTHEFTVGVYEPLPQLSVQPKAPETEEGAAELRLRCLGWGPGRGELSWSRDGRALEAAESEGAETPRMRSEGDQLLIVRPVRSDHARYTCRVRSPFGHREAAADVSVFYGPDPPTITVSSDRDAAPARFVTAGSNVTLRCAAASRPPADITWSLADPAEAAVPAGSRLLLPAVGPGHAGTYACLAANPRTGRRRRSLLNLTVADLPPGAPQCSVEGGPGDRSLRFRCSWPGGAPAASLQFQGLPEGIRAGPVSSVLLAAVPAHPRLSGVPITCLARHLVATRTCTVTPEAPREVLLHPLVAETRLGEAEVALEASGCPPPSRASWAREGRPLAPGGGSRLRLSQDGRKLHIGNFSLDWDLGNYSVLCSGALGAGGDQITLIGPSISSWRLQRARDAAVLTWDVERGALISSFEIQAWPDGPALGRTSTYRDWVSLLILGPQERSAVVPLPPRNPGTWTFRILPILGGQPGTPSQSRVYRAGPTLSHGAIAGIVLGSLLGLALLAVLLLLCICCLCRFRGKTPEKKKHPSTLVPVVTPSEKKMHSVTPVEISWPLDLKVPLEDHSSTRAYQAQTPVQLSL

SEQ ID NO: 6193 - protein, 195 aa, Homo sapiens
MGSRASTLLRDEELEEIKKETGFSHSQITRLYSRFTSLDKGENGTLSREDFQRIPELAINPLGDRIINAFFPEGEDQVNFRGFMRTLAHFRPIEDNEKSKDVNGPEPLNSRSNKLHFAFRLYDLDKDEKISRDELLQVLRMMVGVNISDEQLGSIADRTIQEADQDGDSAISFTEFVKVLEKVDVEQKMSIRFLH

SEQ ID NO: 6194 - protein, 178 aa, Homo sapiens
MTTLRAFTCDDLFRFNNINLDPLTETYGIPFYLQYLAHWPEYFIVAEAPGGELMGYIMGKAEGSVAREEWHGHVTALSVAPEFRRLGLAAKLMELLEEISERKGGFFVDLFVRVSNQVAVNMYKQLGYSVYRTVIEYYSASNGEPDEDAYDMRKALSRDTEKKSIIPLPHPVRPEDIE

SEQ ID NO: 6195 - protein, 115 aa, Homo sapiens
MNSGVCLCVLMAVLAAGALTQPVPPADPAGSGLQRAEEAPRRQLRVSQRTDGESRAHLGALLARYIQQARKAPSGRMSIVKNLQNLDPSHRISDRDYMGWMDFGRRSAEEYEYPS

SEQ ID NO: 6196 - protein, 458 aa, Homo sapiens
MLEQRREPWSGESEVKIAKNSDGRECIKGVNTGSSYALGSNAEDKPIKKQLGVSFHLHLSELELFPDERVINGCNQVENFINHSSSVSCLQEMSSSVKTPIFNRNDFDDSSFLPQEQKVHLREKPYECNEHSKVFRVSSSLTKHQVIHTVEKPYKCNSCGKVFSRNSHLAEHCRIHTGEKPYKCNVCGKVFSYNSNFARHQRIHTREKPYECNECGKVFSNNSYLARHQRIHAEEKPYKCNECGKGFSHKSSLANHWRIYTGEKPYKCDECGKAFYRIALLVRHQKIHTGEKPYKCNECGKVFIQNSHLAQHWRIHTGEKPYKCNECGKVFNQLSNLARHRRIHTGEKPYKCNECGKAFSEYSGLSAHLVIHTGEKPYKCSECGKAFRHKLSLTNHQRIHTGERPYKCNECGKVFNRIAHLARHRKIHTGEKPYKCNECGKAFSRISYLAQHWTIHMG

SEQ ID NO: 6197 - protein, 660 aa, Homo sapiens
MAAAAAALSGAGTPPAGGGAGGGGAGGGGSPPGGWAVARLEGREFEYLMKKRSVTIGRNSSQGSVDVSMGHSSFISRRHLEIFTPPGGGGHGGAAPELPPAQPRPDAGGDFYLRCLGKNGVFVDGVFQRRGAPPLQLPRVCTFRFPSTNIKITFTALSSEKREKQEASESPVKAVQPHISPLTINIPDTMAHLISPLPSPTGTISAANSCPSSPRGAGSSGYKVGRVMPSDLNLMADNSQPENEKEASGGDSPKDDSKPPYSYAQLIVQAITMAPDKQLTLNGIYTHITKNYPYYRTADKGWQNSIRHNLSLNRYFIKVPRSQEEPGKGSFWRIDPASESKLIEQAFRKRRPRGVPCFRTPLGPLSSRSAPASPNHAGVLSAHSSGAQTPESLSREGSPAPLEPEPGAAQPKLAVIQEARFAQSAPGSPLSSQPVLITVQRQLPQAIKPVTYTVATPVTTSTSQPPVVQTVHVVHQIPAVSVTSVAGLAPANTYTVSGQAVVTPAAVLAPPKAEAQENGDHREVKVKVEPIPAIGHATLGTASRIIQTAQTTPVQTVTIVQQAPLGQHQLPIKTVTQNGTHVASVPTAVHGQVNNAAASPLHMLATHASASASLPTKRHNGDQPEQPELKRIKTEDGEGIVIALSVDTPPAAVREKGVQN

SEQ ID NO: 6198 - protein, 254 aa, Homo sapiens
MDGGDDGNLIIKKRFVSEAELDERRKRRQEEWEKVRKPEDPEECPEEVYDPRSLYERLQEQKDRKQQEYEEQFKFKNMVRGLDEDETNFLDEVSRQQELIEKQRREEELKELKEYRNNLKKVGISQENKKEVEKKLTVKPIETKNKFSQAKLLAGAVKHKSSESGNSVKRLKPDPEPDDKNQEPSSCKSLGNTSLSGPSIHCPSAAVCIGILPGLGAYSGSSDSESSSDSEGTINATGKIVSSIFRTNTFLEAP

SEQ ID NO: 6199 - protein, 843 aa, Homo sapiens
MATKKAGSRLETEIERCRSECQWERIPELVKQLSAKLIANDDMAELLLGESKLEQYLKEHPLRQGASPRGPKPQLTEVRKHLTAALDRGNLKSEFLQESNLIMAKLNYVEGDYKEALNIYARVGLDDLPLTAVPPYRLRVIAEAYATKGLCLEKLPISSSTSNLHVDREQDVITCYEKAGDIALLYLQEIERVILSNIQNRSPKPGPAPHDQELGFFLETGLQRAHVLYFKNGNLTRGVGRFRELLRAVETRTTQNLRMTIARQLAEILLRGMCEQSYWNPLEDPPCQSPLDDPLRKGANTKTYTLTRRARVYSGENIFCPQENTEEALLLLLISESMANRDAVLSRIPEHKSDRLISLQSASVVYDLLTIALGRRGQYEMLSECLERAMKFAFEEFHLWYQFALSLMAAGKSARAVKVLKECIRLKPDDATIPLLAAKLCMGSLHWLEEAEKFAKTVVDVGEKTSEFKAKGYLALGLTYSLQATDASLRGMQEVLQRKALLAFQRAHSLSPTDHQAAFYLALQLAISRQIPEALGYVRQALQLQGDDANSLHLLALLLSAQKHYHDALNIIDMALSEYPENFILLFSKVKLQSLCRGPDEALLTCKHMLQIWKSCYNLTNPSDSGRGSSLLDRTIADRRQLNTITLPDFSDPETGSVHATSVAASRVEQALSEVASSLQSSAPKQGPLHPWMTLAQIWLHAAEVYIGIGKPAEATACTQEAANLFPMSHNVLYMRGQIAELRGSMDEARRWYEEALAISPTHVKSMQRLALILHQLGRYSLAEKILRDAVQVNSTAHEVWNGLGEVLQAQGNDAAATECFLTALELEASSPAVPFTIIPRVL

SEQ ID NO: 6200 - protein, 318 aa, Homo sapiens
MAAAALPPRPLLLLPLVLLLSGRPTRADSKVFGDLDQVRMTSEGSDCRCKCIMRPLSKDACSRVRSGRARVEDFYTVETVSSGTDCRCSCTAPPSSLNPCENEWKMEKLKKQAPELLKSIKANLSRENEVVKDSVRHLSEQLRHYENHSAIMLGIKKELSRLGLQLLQKDAAAAPATPATGTGSKAQDTARGKGKDISKYGSVQKSFADRGLPKPPKEKLLQVEKLRKESGKGSFLQPTAKPRALAQQQAVIRGFTYYKAGKQEVTEAVADNTLQGTSWLEQLPPKVEGRSNSAEPNSAEQDEAEPRSSERVDLASGT

SEQ ID NO: 6201 - protein, 316 aa, Homo sapiens
MSVGFIGAGQLAFALAKGFTAAGVLAAHKIMASSPDMDLATVSALRKMGVKLTPHNKETVQHSDVLFLAVKPHIIPFILDEIGADIEDRHIVVSCAAGVTISSIEKKLSAFRPAPRVIRCMTNTPVVVREGATVYATGTHAQVEDGRLMEQLLSSVGFCTEVEEDLIDAVTGLSGSGPAYAFTALDALADGGVKMGLPRRLAVRLGAQALLGAAKMLLHSEQHPGQLKDNVSSPGGATIHALHVLESGGFRSLLINAVEASCIRTRELQSMADQEQVSPAAIKKTILDKDHLPLELGSPEGLHPLLLQYQLARAPS

SEQ ID NO: 6202 - protein, 439 aa, Homo sapiens
MRRAALRLCALGKGQLTPGRGLTQGPQNPKKQGIFHIHEVRDKLREIVGASTNWRDHVKAMEERKLLHSFLAKSQDGLPPRRMKDSYIEVLLPLGSEPELREKYLTVQNTVRFGRILEDLDSLGVLICYMHNKIHSAKMSPLSIVTALVDKIDMCKKSLSPEQDIKFSGHVSWVGKTSMEVKMQMFQLHGDEFCPVLDATFVMVARDSENKGPAFVNPLIPESPEEEELFRQGELNKGRRIAFSSTSLLKMAPSAEERTTIHEMFLSTLDPKTISFRSRVLPSNAVWMENSKLKSLEICHPQERNIFNRIFGGFLMRKAYELAWATACSFGGSRPFVVAVDDIMFQKPVEVGSLLFLSSQVCFTQNNYIQVRVHSEVASLQEKQHTTTNVFHFTFMSEKEVPLVFPKTYGESMLYLDGQRHFNSMSGPATLRKDYLVEP

SEQ ID NO: 6203 - protein, 465 aa, Homo sapiens
MRRAAGMEDFSAEEEESWYDQQDLEQDLHLAAELGKTLLERNKELEGSLQQMYSTNEEQVQEIEYLTKQLDTLRHVNEQHAKVYEQLDLTARDLELTNHRLVLESKAAQQKIHGLTETIERLQAQVEELQAQVEQLRGLEQLRVLREKRERRRTIHTFPCLKELCTSPRCKDAFRLHSSSLELGPRPLEQENERLQTLVGALRSQVSQERQRKERAEREYTAVLQEYSELERQLCEMEACRLRVQELEAELLELQQMKQAKTYLLGPDDHLAEALLAPLTQAPEADDPQPGRGDDLGAQDGVSSPAASPGHVVRKSCSDTALNAIVAKDPASRHAGNLTLHANSVRKRGMSILREVDEQYHALLEKYEELLSKCRQHGAGVRHAGVQTSRPISRDSSWRDLRGGEEGQGEVKAGEKSLSQHVEAVDKRLEQSQPEYKALFKEIFSRIQKTKADINATKVKTHSSK

SEQ ID NO: 6204 - protein, 837 aa, Homo sapiens
MFLWLFLILSALISSTNADSDISVEICNVCSCVSVENVLYVNCEKVSVYRPNQLKPPWSNFYHLNFQNNFLNILYPNTFLNFSHAVSLHLGNNKLQNIEGGAFLGLSALKQLHLNNNELKILRADTFLGIENLEYLQADYNLIKYIERGAFNKLHKLKVLILNDNLISFLPDNIFRFASLTHLDIRGNRIQKLPYIGVLEHIGRVVELQLEDNPWNCSCDLLPLKAWLENMPYNIYIGEAICETPSDLYGRLLKETNKQELCPMGTGSDFDVRILPPSQLENGYTTPNGHTTQTSLHRLVTKPPKTTNPSKISGIVAGKALSNRNLSQIVSYQTRVPPLTPCPAPCFCKTHPSDLGLSVNCQEKNIQSMSELIPKPLNAKKLHVNGNSIKDVDVSDFTDFEGLDLLHLGSNQITVIKGDVFHNLTNLRRLYLNGNQIERLYPEIFSGLHNLQYLYLEYNLIKEISAGTFDSMPNLQLLYLNNNLLKSLPVYIFSGAPLARLNLRNNKFMYLPVSGVLDQLQSLTQIDLEGNPWDCTCDLVALKLWVEKLSDGIVVKELKCETPVQFANIELKSLKNEILCPKLLNKPSAPFTSPAPAITFTTPLGPIRSPPGGPVPLSILILSILVVLILTVFVAFCLLVFVLRRNKKPTVKHEGLGNPDCGSMQLQLRKHDHKTNKKDGLSTEAFIPQTIEQMSKSHTCGLKESETGFMFSDPPGQKVVMRNVADKEKDLLHVDTRKRLSTIDELDELFPSRDSNVFIQNFLESKKEYNSIGVSGFEIRYPEKQPDKKSKKSLIGGNHSKIVVEQRKSEYFELKAKLQSSPDYLQVLEEQTALNKI

SEQ ID NO: 6205 - protein, 541 aa, Homo sapiens
MSSCVSSQPSSNRAAPQDELGGRGSSSSESQKPCEALRGLSSLSIHLGMESFIVVTECEPGCAVDLGLARDRPLEADGQEVPLDTSGSQARPHLSGRKLSLQERSQGGLAAGGSLDMNGRCICPSLPYSPVSSPQSSPRLPRRPTVESHHVSITGMQDCVQLNQYTLKDEIGKGSYGVVKLAYNENDNTYYAMKVLSKKKLIRQAGFPRRPPPRGTRPAPGGCIQPRGPIEQVYQEIAILKKLDHPNVVKLVEVLDDPNEDHLYMVFELVNQGPVMEVPTLKPLSEDQARFYFQDLIKGIEYLHYQKIIHRDIKPSNLLVGEDGHIKIADFGVSNEFKGSDALLSNTVGTPAFMAPESLSETRKIFSGKALDVWAMGVTLYCFVFGQCPFMDERIMCLHSKIKSQALEFPDQPDIAEDLKDLITRMLDKNPESRIVVPEIKLHPWVTRHGAEPLPSEDENCTLVEVTEEEVENSVKHIPSLATVILVKTMIRKRSFGNPFEGSRREERSLSAPGNLLTKQGSEDNLQGTDPPPVGEEEVLL

SEQ ID NO: 6206 - protein, 158 aa, Homo sapiens
MMRFMLLFSRQGKLRLQKWYLATSDKERKKMVRELMQVVLARKPKMCSFLEWRDLKVVYKRYASLYFCCAIEGQDNELITLELIHRYVELLDKYFGSVCELDIIFNFEKAYFILDEFLMGGDVQDTSKKSVLKAIEQADLLQEEDESPRSVLEEMGLA

SEQ ID NO: 6207 - protein, 183 aa, Homo sapiens
MASNKTTLQKMGKKQNGKSKKVEEAEPEEFVVEKVLDRRVVNGKVEYFLKWKGFTDADNTWEPEENLDCPELIEAFLNSQKAGKEKDGTKRKSLSDSESDDSKSKKKRDAADKPRGFARGLDPERIIGATDSSGELMFLMKWKDSDEADLVLAKEANMKCPQIVIAFYEERLTWHSCPEDEAQ

SEQ ID NO: 6208 - protein, 898 aa, Homo sapiens
MVWDRQTKMEYEWKPDEQGLQQILQLLKESQSPDTTIQRTVQQKLEQLNQYPDFNNYLIFVLTKLKSEDEPTRSLSGLILKNNVKAHFQNFPNGVTDFIKSECLNNIGDSSPLIRATVGILITTIASKGELQNWPDLLPKLCSLLDSEDYNTCEGAFGALQKICEDSAEILDSDVLDRPLNIMIPKFLQFFKHSSPKIRSHAVACVNQFIISRTQALMLHIDSFIENLFALAGDEEPEVRKNVCRALVMLLEVRMDRLLPHMHNIVEYMLQRTQDQDENVALEACEFWLTLAEQPICKDVLVRHLPKLIPVLVNGMKYSDIDIILLKGDVEEDETIPDSEQDIRPRFHRSRTVAQQHDEDGIEEEDDDDDEIDDDDTISDWNLRKCSAAALDVLANVYRDELLPHILPLLKELLFHHEWVVKESGILVLGAIAEGCMQGMIPYLPELIPHLIQCLSDKKALVRSITCWTLSRYAHWVVSQPPDTYLKPLMTELLKRILDSNKRVQEAACSAFATLEEEACTELVPYLAYILDTLVFAFSKYQHKNLLILYDAIGTLADSVGHHLNKPEYIQMLMPPLIQKWNMLKDEDKDLFPLLECLSSVATALQSGFLPYCEPVYQRCVNLVQKTLAQAMLNNAQPDQYEAPDKDFMIVALDLLSGLAEGLGGNIEQLVARSNILTLMYQCMQDKMPEVRQSSFALLGDLTKACFQHVKPCIADFMPILGTNLNPEFISVCNNATWAIGEISIQMGIEMQPYIPMVLHQLVEIINRPNTPKTLLENTAITIGRLGYVCPQEVAPMLQQFIRPWCTSLRNIRDNEEKDSAFRGICTMISVNPSGVIQDFIFFCDAVASWINPKDDLRDMFCKILHGFKNQVGDENWRRFSDQFPLPLKERLAAFYGV

SEQ ID NO: 6209 - protein, 803 aa, Homo sapiens
MNMFKEAVTFKDVAVAFTEEELGLLGPAQRKLYRDVMVENFRNLLSVGHPPFKQDVSPIERNEQLWIMTTATRRQGNLGEKNQSKLITVQDRESEEELSCWQIWQQIANDLTRCQDSMINNSQCHKQGDFPYQVGTELSIQISEDENYIVNKADGPNNTGNPEFPILRTQDSWRKTFLTESQRLNRDQQISIKNKLCQCKKGVDPIGWISHHDGHRVHKSEKSYRPNDYEKDNMKILTFDHNSMIHTGQKSYQCNECKKPFSDLSSFDLHQQLQSGEKSLTCVERGKGFCYSPVLPVHQKVHVGEKLKCDECGKEFSQGAHLQTHQKVHVIEKPYKCKQCGKGFSRRSALNVHCKVHTAEKPYNCEECGRAFSQASHLQDHQRLHTGEKPFKCDACGKSFSRNSHLQSHQRVHTGEKPYKCEECGKGFICSSNLYIHQRVHTGEKPYKCEECGKGFSRPSSLQAHQGVHTGEKSYICTVCGKGFTLSSNLQAHQRVHTGEKPYKCNECGKSFRRNSHYQVHLVVHTGEKPYKCEICGKGFSQSSYLQIHQKAHSIEKPFKCEECGQGFNQSSRLQIHQLIHTGEKPYKCEECGKGFSRRADLKIHCRIHTGEKPYNCEECGKVFRQASNLLAHQRVHSGEKPFKCEECGKSFGRSAHLQAHQKVHTGDKPYKCDECGKGFKWSLNLDMHQRVHTGEKPYKCGECGKYFSQASSLQLHQSVHTGEKPYKCDVCGKVFSRSSQLQSHQRVHTGEKPYKCEICGKSFSWRSNLTVHHRIHVGDKSYKSNRGGKNIRESTQEKKSIK

SEQ ID NO: 6210 - protein, 404 aa, Homo sapiens
MLRAIAEERGRLSLRREVCGLGCFKDDRIVFWTWMFSTYFMEKWAPRQDDMLFYVRRKLAYSGSESGADGRKAAEPEVEVEVYRRDSKKLPGLGDPDIDWEESVCLNLILQKLDYMVTCAVCTRADGGDIHIHKKKSQQVFASPSKHPMDSKGEESKISYPNIFFMIDSFEEVFSDMTVGEGEMVCVELVASDKTNTFQGVIFQGSIRYEALKKVYDNRVSVAARMAQKMSFGFYKYSNMEFVRMKGPQGKGHAEMAVSRVSTGDTSPCGTEEDSSPASPMHERVTSFSTPPTPERNNRPAFFSPSLKRKVPRNRIAEMKKSHSANDSEEFFREDDGGADLHNATNLRSRSLSGTGRSLVGSWLKLNRADGNFLLYAHLTYVTLPLHRILTDILEVRQKPILMT

SEQ ID NO: 6211 - protein, 1019 aa, Homo sapiens
MLWRVLLSKRPPFPHPELDFQEAPIPSCPGRLPGRKNSVALAAAPRKEPTGDREKPLPFPVLAPFSNPEHSAPAKVVRAAVPKQRKGSKVGDFGDAINWPTPGEIAHKSVQPQSHKPQPTRKLPPKKDMKEQEKGEGSDSKESPKTKSDESGEEKNGDEDCQRGGQKKKGNKHKWVPLQIDMKPEVPREKLASRPTRPPEPRHIPANRGEIKGSESATYVPVAPPTPAWQPEIKPEPAWHDQDETSSVKSDGAGGARASFRGRGRGRGRGRGRGRGGTRTHFDYQFGYRKFDGVEGPRTPKYMNNITYYFDNVSSTELYSVDQELLKDYIKRQIEYYFSVDNLERDFFLRRKMDADGFLPITLIASFHRVQALTTDISLIFAALKDSKVVEIVDEKVRRREEPEKWPLPPIVDYSQTDFSQLLNCPEFVPRQHYQKETESAPGSPRAVTPVPTKTEEVSNLKTLPKGLSASLPDLDSENWIEVKKRPRPSPARPKKSEESRFSHLTSLPQQLPSQQLMSKDQDEQEELDFLFDEEMEQMDGRKNTFTAWSDEESDYEIDDRDVNKILIVTQTPHYMRRHPGGDRTGNHTSRAKMSAELAKVINDGLFYYEQDLWAEKFEPEYSQIKQEVENFKKVNMISREQFDTLTPEPPVDPNQEVPPGPPRFQQVPTDALANKLFGAPEPSTIARSLPTTVPESPNYRNTRTPRTPRTPQLKDSSQTSRFYPVVKEGRTLDAKMPRKRKTRHSSNPPLESHVGWVMDSREHRPRTASISSSPSEGTPTVGSYGCTPQSLPKFQHPSHELLKENGFTQHVYHKYRRRCLNERKRLGIGQSQEMNTLFRFWSFFLRDHFNKKMYEEFKQLALEDAKEGYRYGLECLFRYYSYGLEKKFRLDIFKDFQEETVKDYEAGQLYGLEKFWAFLKYSKAKNLDIDPKLQEYLGKFRRLEDFRVDPPMGEEGNHKRHSVVAGGGGGEGRKRCPSQSSSRPAAMISQPPTPPTGQPVREDAKWTSQHSNTQTLGK

SEQ ID NO: 6212 - protein, 517 aa, Homo sapiens
MASDGARKQFWKRSNSKLPGSIQHVYGAQHPPFDPLLHGTLLRSTAKMPTTPVKAKRVSTFQEFESNTSDAWDAGEDDDELLAMAAESLNSEVVMETANRVLRNHSQRQGRPTLQEGPGLQQKPRPEAEPPSPPSGDLRLVKSVSESHTSCPAESASDAAPLQRSQSLPHSATVTLGGTSDPSTLSSSALSEREASRLDKFKQLLAGPNTDLEELRRLSWSGIPKPVRPMTWKLLSGYLPANVDRRPATLQRKQKEYFAFIEHYYDSRNDEVHQDTYRQIHIDIPRMSPEALILQPKVTEIFERILFIWAIRHPASGYVQGINDLVTPFFVVFICEYIEAEEVDTVDVSGVPAEVLCNIEADTYWCMSKLLDGIQDNYTFAQPGIQMKVKMLEELVSRIDEQVHRHLDQHEVRYLQFAFRWMNNLLMREVPLRCTIRLWDTYQSEPDGFSHFHLYVCAAFLVRWRKEILEEKDFQELLLFLQNLPTAHWDDEDISLLLAEAYRLKFAFADAPNHYKK

SEQ ID NO: 6213 - protein, 1204 aa, Homo sapiens
MGDAKEAGAEGPPAGAAARGGLSLLSQGESEESSAQGSALFLGGNEVKSRAVVKYSSAPPRTAFARLEEKTDLKLPPANWLRESAKLGPAGTTILGNSKKSKPFSSFGMAYDFIDSVGNDVDVVSDSENIKKLLKIPYSKSHVSMAVHRIGRTLLLDELDIQELFMRSSQTGDWTWLKEFYQRLIDQKWQRKKKSKEHWYQKAILSKFLYYSINGDGAAQPVSSTAEQQESSSSDQTNDSEGASWPAPFEMPSSVSEDPSASSQGLKNDFVRNILWTFEDIHMLVGSNMPIFGGGRYPAVSLRLRDNNKPINVLTGIDYWLDNLICNVPELVMCFHVNGIVQKYEMIKTEEIPNLENSNFSTKVIKDIAQNILSFLKSNCTKEGHTYWLFKASGSDIVKLYDLTTLCEETEDKYQNPFTMPVAILLYKVACNMMMKKNQNKKHYGTIRTLLLNCLKLLDKSRHPQIIASANYMLSELFQLDEPKKEENSESPLNENSDESYSEEEEEMPDSDENGSYSTSSDPSDDSKAVAIIKSVGELSVPEKYKSIHQIRPSCAFPVCHDTEERCRLVLSYVLEGLKSVDSSIKKESDLPAADPSTPIPLKYEDESSRGGPEGLEKQMALFLDKMGSLQKGNYSSQSGMIPGSWQHKMKLQLILKSSKAYYVLSDAAMSLQKYGRALRYIKLALQSHDTYCCLCTNMLSEVLLFLSQYLTLCGDIQLMLAQNANNRAAHLEEFHYQTKEDQEILHSLHRESSCQGFAWATDLSTDLESQLSVSCKCYEAANEILQFSDLKSQNPEHYVQVLKRMGNIRNEIGVFYMNQAAALQSERLVSKSVSAAEQQLWKKSFSCFEKGIHNFESIEDATNAALLLCNTGRLMRICAQAHCGAGDELKREFSPEEGLYYNKAIDYYLKALRSLGTRDIHPAVWDSVNWELSTTYFTMATLQQDYAPLSRKAQEQIEKEVSEAMMKSLKYCDVDSVSARQPLCQYRAATIHHRLASMYHSCLRNQVGDEHLRKQHRVLADLHYSKAAKLFQLLKDAPCELLRVQLERVAFAEFQMTSQNSNVGKLKTLSGALDIMVRTEHAFQLIQKELIEEFGQPKSGDAAAAADASPSLNREEVMKLLSIFESRLSFLLLQSIKLLSSTKKKTSNNIEDDTILKTNKHIYSQLLRATANKTATLLERINVIVHLLGQLAAGSAASSNAVQ

SEQ ID NO: 6214 - protein, 558 aa, Homo sapiens
MRKIRANAIAILTVAWILGTFYYLWQDNRAHAASSGGRGAQRAGRRSEQLREDRTIPLIVTGTPSKGFDEKAYLSAKQLKAGEDPYRQHAFNQLESDKLSPDRPIRDTRHYSCPSVSYSSDLPATSVIITFHNEARSTLLRTVKSVLNRTPANLIQEIILVDDFSSDPEDCLLLTRIPKVKCLRNDRREGLIRSRVRGADVAAATVLTFLDSHCEVNTEWLPPMLQRVKEDHTRVVSPIIDVISLDNFAYLAASADLRGGFDWSLHFKWEQIPLEQKMTRTDPTRPIRTPVIAGGIFVIDKSWFNHLGKYDAQMDIWGGENFELSFRVWMCGGSLEIVPCSRVGHVFRKRHPYNFPEGNALTYIRNTKRTAEVWMDEYKQYYYEARPSAIGKAFGSVATRIEQRKKMNCKSFRWYLENVYPELTVPVKEALPGIIKQGVNCLESQGQNTAGDFLLGMGICRGSAKNPQPAQAWLFSDHLIQQQGKCLAATSTLMSSPGSPVILQMCNPREGKQKWRRKGSFIQHSVSGLCLETKPAQLVTSKCQADAQAQQWQLLPHT

SEQ ID NO: 6215 - protein, 647 aa, Homo sapiens
MRLTLLCCTWREERMGEEGSELPVCASCGQRIYDGQYLQALNADWHADCFRCCDCSASLSHQYYEKDGQLFCKKDYWARYGESCHGCSEQITKGLVMVAGELKYHPECFICLTCGTFIGDGDTYTLVEHSKLYCGHCYYQTVVTPVIEQILPDSPGSHLPHTVTLVSIPASSHGKRGLSVSIDPPHGPPGCGTEHSHTVRVQGVDPGCMSPDVKNSIHVGDRILEINGTPIRNVPLDEIDLLIQETSRLLQLTLEHDPHDTLGHGLGPETSPLSSPAYTPSGEAGSSARQKPVLRSCSIDRSPGAGSLGSPASQRKDLGRSESLRVVCRPHRIFRPSDLIHGEVLGKGCFGQAIKVTHRETGEVMVMKELIRFDEETQRTFLKEVKVMRCLEHPNVLKFIGVLYKDKRLNFITEYIKGGTLRGIIKSMDSQYPWSQRVSFAKDIASGMAYLHSMNIIHRDLNSHNCLVRENKNVVVADFGLARLMVDEKTQPEGLRSLKKPDRKKRYTVVGNPYWMAPEMINGRSYDEKVDVFSFGIVLCEIIGRVNADPDYLPRTMDFGLNVRGFLDRYCPPNCPPSFFPITVRCCDLDPEKRPSFVKLEHWLETLRMHLAGHLPLGPQLEQLDRGFWETYRRGESGLPAHPEVPD

SEQ ID NO: 6216 - protein, 594 aa, Homo sapiens
MSAGEVERLVSELSGGTGGDEEEEWLYGGPWDVHVHSDLAKDLDENEVERPEEENASANPPSGIEDETAENGVPKPKVTETEDDSDSDSDDDEDDVHVTIGDIKTGAPQYGSYGTAPVNLNIKTGGRVYGTTGTKVKGVDLDAPGSINGVPLLEVDLDSFEDKPWRKPGADLSDYFNYGFNEDTWKAYCEKQKRIRMGLEVIPVTSTTNKITAEDCTMEVTPGAEIQDGRFNLFKVQQGRTGNSEKETALPSTKAEFTSPPSLFKTGLPPSRNSTSSQSQTSTASRKANSSVGKWQDRYGRAESPDLRRLPGAIDVIGQTITISRVEGRRRANENSNIQVLSERSATEVDNNFSKPPPFFPPGAPPTHLPPPPFLPPPPTVSTAPPLIPPPGFPPPPGAPPPSLIPTIESGHSSGYDSRSARAFPYGNVAFPHLPGSAPSWPSLVDTSKQWDYYARREKDRDRERDRDRERDRDRDRERERTRERERERDHSPTPSVFNSDEERYRYREYAERGYERHRASREKEERHRERRHREKEETRHKSSRSNSRRRHESEEGDSHRRHKHKKSKRSKEGKEAGSEPAPEQESTEATPAE

SEQ ID NO: 6217 - protein, 148 aa, Homo sapiens
MSSDFPHYNFRMPNIGFQNLPLNIYIVVFGTAIFVFILSLLFCCYLIRLRHQAHKEFYAYKQVILKEKVKELNLHELCAVCLEDFKPRDELGICPCKHAFHRKCLIKWLEVRKVCPLCNMPVLQLAQLHSKQDRGPPQGPLPGAENIV

SEQ ID NO: 6218 - protein, 606 aa, Homo sapiens
MVRGARQPQQPRSRLAPRLTGTVEKPPRKRRSRTEFALKEIMSSGGAEDDIPQGERKTVTDFCYLLDKSKQLFNGLRDLPQYGQKQWQSYFGRTFDVYTKLWKFQQQHRQVLDNRYGLKRWQIGEIASKIGQLYYHYYLRTSETSYLNEAFSFYSAIRQRSYYSQVNKEDRPELVVKKLRYYARFIVVCLLLNKMDVVKDLVKELSDEIEDYTHRFNTEDQVEWNLVLQEVAAFIEADPVMVLNDDNTIVITSNRLAETGAPLLEQGMIVGQLSLADALIIGNCNNQVKFSELTVDMFRMLQALEREPMNLASQMNKPGMQESADKPTRRENPHKYLLYKPTFSQLYTFLAASFKELPANSVLLIYLSATGVFPTGRSDSEGPYDFGGVLTNSNRDIINGDAIHKRNQSHKEMHCLHPGDLYPFTRKPLFIIVDSSNSVAYKNFTNLFGQPLVCLLSPTAYPKALQDQSQRGSLFTLFLNNPLMAFLFVSGLSSMRRGLWEKCQEYLRKINRDIAQLLTHSRSIDQAFLQFFGDEFLRLLLTRFIFCSATMRMHKIFRETRNYPESYPQLPRDETVENPHLQKHILELASILDVRNVFFENTIDDY

SEQ ID NO: 6219 - protein, 147 aa, Homo sapiens
MVMGLGVLLLVFVLGLGLTPPTLAQDNSRYTHFLTQHYDAKPQGRDDRYCESIMRRRGLTSPCKDINTFIHGNKRSIKAICENKNGNPHRENLRISKSSFQVTTCKLHGGSPWPPCQYRATAGFRNVVVACENGLPVHLDQSIFRRP

SEQ ID NO: 6220 - protein, 348 aa, Homo sapiens
MSLLVVSMACVGFFLLQGAWPHEGVHRKPSLLAHPGRLVKSEETVILQCWSDVMFEHFLLHREGMFNDTLRLIGEHHDGVSKANFSISRMTQDLAGTYRCYGSVTHSPYQVSAPSDPLDIVIIGLYEKPSLSAQLGPTVLAGENVTLSCSSRSSYDMYHLSREGEAHERRLPAGPKVNGTFQADFPLGPATHGGTYRCFGSFHDSPYEWSKSSDPLLVSVTGNPSNSWPSPTEPSSKTGNPRHLHILIGTSVVIILFILLFFLLHRWCSNKKNAAVMDQESAGNRTANSEDSDEQDPQEVTYTQLNHCVFTQRKITRPSQRPKTPPTDIIVYTELPNAESRSKVVSCP

SEQ ID NO: 6221 - protein, 1565 aa, Homo sapiens
MLSWRLQTGPEKAELQELNARLYDYVCRVRELERENLLLEEELRGRRGREGLWAEGQARCAEEARSLRQQLDELSWATALAEGERDALRRELRELQRLDAEERAARGRLDAELGAQQRELQEALGARAALEALLGRLQAERRGLDAAHERDVRELRARAASLTMHFRARATGPAAPPPRLREVHDSYALLVAESWRETVQLYEDEVRELEEALRRGQESRLQAEEETRLCAQEAEALRREALGLEQLRARLEDALLRMREEYGIQAEERQRVIDCLEDEKATLTLAMADWLRDYQDLLQVKTGLSLEVATYRALLEGESNPEIVIWAEHVENMPSEFRNKSYHYTDSLLQRENERNLFSRQKAPLASFNHSSALYSNLSGHRGSQTGTSIGGDARRGFLGSGYSSSATTQQENSYGKAVSSQTNVRTFSPTYGLLRNTEAQVKTFPDRPKAGDTREVPVYIGEDSTIARESYRDRRDKVAAGASESTRSNERTVILGKKTEVKATREQERNRPETIRTKPEEKMFDSKEKASEERNLRWEELTKLDKEARQRESQQMKEKAKEKDSPKEKSVREREVPISLEVSQDRRAEVSPKGLQTPVKDAGGGTGREAEARELRFRLGTSDATGSLQGDSMTETVAENIVTSILKQFTQSPETEASADSFPDTKVTYVDRKELPGERKTKTEIVVESKLTEDVDVSDEAGLDYLLSKDIKEVGLKGKSAEQMIGDIINLGLKGREGRAKVVNVEIVEEPVSYVSGEKPEEFSVPFKVEEVEDVSPGPWGLVKEEEGYGESDVTFSVNQHRRTKQPQENTTHVEEVTEAGDSEGEQSYFVSTPDEHPGGHDRDDGSVYGQIHIEEESTIRYSWQDEIVQGTRRRTQKDGAVGEKVVKPLDVPAPSLEGDLGSTHWKEQARSGEFHAEPTVIEKEIKIPHEFHTSMKGISSKEPRQQLVEVIGQLEETLPERMREELSALTREGQGGPGSVSVDVKKVQGAGGSSVTLVAEVNVSQTVDADRLDLEELSKDEASEMEKAVESVVRESLSRQRSPAPGSPDEEGGAEAPAAGIRFRRWATRELYIPSGESEVAGGASHSSGQRTPQGPVSATVEVSSPTGFAQSQVLEDVSQAARHIKLGPSEVWRTERMSYEGPTAEVVEVSAGGDLSQAASPTGASRSVRHVTLGPGQSPLSREVIFLGPAPACPEAWGSPEPGPAESSADMDGSGRHSTFGCRQFHAEKEIIFQGPISAAGKVGDYFATEESVGTQTSVRQLQLGPKEGFSGQIQFTAPLSDKVELGVIGDSVHMEGLPGSSTSIRHISIGPQRHQTTQQIVYHGLVPQLGESGDSESTVHGEGSADVHQATHSHTSGRQTVMTEKSTFQSVVSESPQEDSAEDTSGAEMTSGVSRSFRHIRLGPTETETSEHIAIRGPVSRTFVLAGSADSPELGKLADSSRTLRHIAPGPKETSFTFQMDVSNVEAIRSRTQEAGALGVSDRGSWRDADSRNDQAVGVSFKASAGEGDQAHREQGKEQAMFDKKVQLQRMVDQRSVISDEKKVALLYLDNEEEENDGHWF

SEQ ID NO: 6222 - protein, 154 aa, Homo sapiens
MADDLDFETGDAGASATFPMQCSALRKNGFVVLKGRPCKIVEMSTSKTGKHGHAKVHLVGIDIFTGKKYEDICPSTHNMDVPNIKRNDFQLIGIQDGYLSLLQDSGEVREDLRLPEGDLGKEIEQKYDCGEEILITVLSAMTEEAAVAIKAMAK

SEQ ID NO: 6223 - protein, 351 aa, Homo sapiens
MTEMSFLSSEVLVGDLMSPFDQSGLGAEESLGLLDDYLEVAKHFKPHGFSSDKAKAGSSEWLAVDGLVSPSNNSKEDAFSGTDWMLEKMDLKEFDLDALLGIDDLETMPDDLLTTLDDTCDLFAPLVQETNKQPPQTVNPIGHLPESLTKPDQVAPFTFLQPLPLSPGVLSSTPDHSFSLELGSEVDITEGDRKPDYTAYVAMIPQCIKEEDTPSDNDSGICMSPESYLGSPQHSPSTRGSPNRSLPSPGVLCGSARPKPYDPPGEKMVAAKVKGEKLDKKLKKMEQNKTAATRYRQKKRAEQEALTGECKELEKKNEALKERADSLAKEIQYLKDLIEEVRKARGKKRVP

SEQ ID NO: 6224 - protein, 699 aa, Homo sapiens
MRWLLLYYALCFSLSKASAHTVELNNMFGQIQSPGYPDSYPSDSEVTWNITVPDGFRIKLYFMHFNLESSYLCEYDYVKVETEDQVLATFCGRETTDTEQTPGQEVVLSPGSFMSITFRSDFSNEERFTGFDAHYMAVDVDECKEREDEELSCDHYCHNYIGGYYCSCRFGYILHTDNRTCRVECSDNLFTQRTGVITSPDFPNPYPKSSECLYTIELEEGFMVNLQFEDIFDIEDHPEVPCPYDYIKIKVGPKVLGPFCGEKAPEPISTQSHSVLILFHSDNSGENRGWRLSYRAAGNECPELQPPVHGKIEPSQAKYFFKDQVLVSCDTGYKVLKDNVEMDTFQIECLKDGTWSNKIPTCKIVDCRAPGELEHGLITFSTRNNLTTYKSEIKYSCQEPYYKMLNNNTGIYTCSAQGVWMNKVLGRSLPTCLPVCGLPKFSRKLMARIFNGRPAQKGTTPWIAMLSHLNGQPFCGGSLLGSSWIVTAAHCLHQSLDPEDPTLRDSDLLSPSDFKIILGKHWRLRSDENEQHLGVKHTTLHPQYDPNTFENDVALVELLESPVLNAFVMPICLPEGPQQEGAMVIVSGWGKQFLQRFPETLMEIEIPIVDHSTCQKAYAPLKKKVTRDMICAGEKEGGKDACAGDSGGPMVTLNRERGQWYLVGTVSWGDDCGKKDRYGVYSYIHHNKDWIQRVTGVRN

SEQ ID NO: 6225 - protein, 451 aa, Homo sapiens [sequence omitted]

SEQ ID NO: 6226 - protein, 589 aa, Homo sapiens
MSVSVHETRKSRSSTGSMNVTLFHKASHPDCVLAHLNTLRKHCMFTDVTLWAGDRAFPCHRAVLAASSRYFEAMFSHGLRESRDDTVNFQDNLHPEVLELLLDFAYSSRIAINEENAESLLEAGDMLQFHDVRDAAAEFLEKNLFPSNCLGMMLLSDAHQCRRLYEFSWRMCLVHFETVRQSEDFNSLSKDTLLDLISSDELETEDERVVFEAILQWVKHDLEPRKVHLPELLRSVRLALLPSDCLQEAVSSEALLMADERTKLIMDEALRCKTRILQNDGVVTSPCARPRKAGHTLLILGGQTFMCDKIYQVDHKAKEIIPKADLPSPRKEFSASAIGCKVYVTGGRGSENGVSKDVWVYDTVHEEWSKAAPMLIARFGHGSAELENCLYVVGGHTSLAGVFPASPSVSLKQVEKYDPGANKWMMVAPLRDGVSNAAVVSAKLKLFVFGGTSIHRDMVSKVQCYDPSENRWTIKAECPQPWRYTAAAVLGSQIFIMGGDTEFTAASAYRFDCETNQWTRIGDMTAKRMSCHALASGNKLYVVGGYFGTQRCKTLDCYDPTSDTWNCITTVPYSLIPTAFVSTWKHLPA

SEQ ID NO: 6227 - protein, 186 aa, Homo sapiens
MKHMLAASAGEVVACLIRVPSEVVKQRAQVSASTRTFQIFSNILYEEGIQGLYRGYKSTVLREIPFSLVQFPLWESLKALWSWRQDHVVDSWQSAVCGAFAGGFAAAVTTPLDVAKTRITLAKAGSSTADGNVLSVLHGVWRSQGLAGLFAGVFPRMAAISLGGFIFLGAYDRTHSLLLEVGRKSP

SEQ ID NO: 6228 - protein, 1204 aa, Homo sapiens
MSFFNFRKIFKLGSEKKKKQYEHVKRDLNPEDFWEIIGELGDGAFGKVYKAQNKETSVLAAAKVIDTKSEEELEDYMVEIDILASCDHPNIVKLLDAFYYENNLWILIEFCAGGAVDAVMLELERPLTESQIQVVCKQTLDALNYLHDNKIIHRDLKAGNILFTLDGDIKLADFGVSAKNTRTIQRRDSFIGTPYWMAPEVVMCETSKDRPYDYKADVWSLGITLIEMAEIEPPHHELNPMRVLLKIAKSEPPTLAQPSRWSSNFKDFLKKCLEKNVDARWTTSQLLQHPFVTVDSNKPIRELIAEAKAEVTEEVEDGKEEDEEEETENSLPIPASKRASSDLSIASSEEDKLSQNACILESVSEKTERSNSEDKLNSKILNEKPTTDEPEKAVEDINEHITDAQLEAMTELHDRTAVIKENEREKRPKLENLPDTEDQETVDINSVSEGKENNIMITLETNIEHNLKSEEEKDQEKQQMFENKLIKSEEIKDTILQTVDLVSQETGEKEANIQAVDSEVGLTKEDTQEKLGEDDKTQKDVISNTSDVIGTCEAADVAQKVDEDSAEDTQSNDGKEVVEVGQKLINKPMVGPEAGGTKEVPIKEIVEMNEIEEGKNKEQAINSSENIMDINEEPGTTEGEEITESSSTEEMEVRSVVADTDQKALGSEVQDASKVTTQIDKEKKEIPVSIKKEPEVTVVSQPTEPQPVLIPSININSDSGENKEEIGSLSKTETILPPESENPKENDNDSGTGSTADTSSIDLNLSISSFLSKTKDSGSISLQETRRQKKTLKKTRKFIVDGVEVSVTTSKIVTDSDSKTEELRFLRRQELRELRFLQKEEQRAQQQLNSKLQQQREQIFRRFEQEMMSKKRQYDQEIENLEKQQKQTIERLEQEHTNRLRDEAKRIKGEQEKELSKFQNMLKNRKKEEQEFVQKQQQELDGSLKKIIQQQKAELANIERECLNNKQQLMRAREAAIWELEERHLQEKHQLLKQQLKDQYFMQRHQLLKRHEKETEQMQRYNQRLIEELKNRQTQERARLPKIQRSEAKTRMAMFKKSLRINSTATPDQDRDKIKQFAAQEEKRQKNERMAQHQKHENQMRDLQLQCEANVRELHQLQNEKCHLLVEHETQKLKELDEEHSQELKEWREKLRPRKKTLEEEFARKLQEQEVFFKMTGESECLNPSTQSRISKFYPIPSLHSTGS

SEQ ID NO: 6229 - protein, 453 aa, Homo sapiens
MSWSLHPRNLILYFYALLFLSSTCVAYVATRDNCCILDERFGSYCPTTCGIADFLSTYQTKVDKDLQSLEDILHQVENKTSEVKQLIKAIQLTYNPDESSKPNMIDAATLKSRKMLEEIMKYEASILTHDSSIRYLQEIYNSNNQKIVNLKEKVAQLEAQCQEPCKDTVQIHDITGKDCQDIANKGAKQSGLYFIKPLKANQQFLVYCEIDGSGNGWTVFQKRLDGSVDFKKNWIQYKEGFGHLSPTGTTEFWLGNEKIHLISTQSAIPYALRVELEDWNGRTSTADYAMFKVGPEADKYRLTYAYFAGGDAGDAFDGFDFGDDPSDKFFTSHNGMQFSTWDNDNDKFEGNCAEQDGSGWWMNKCHAGHLNGVYYQGGTYSKASTPNGYDNGIIWATWKTRWYSMKKTTMKIIPFNRLTIGEGQQHHLGGAKQVRPEHPAETEYDSLYPEDDL

SEQ ID NO: 6230 - protein, 629 aa, Homo sapiens
MENSTTTISREELEELQEAFNKIDIDNSGYVSDYELQDLFKEASLPLPGYKVREIVEKILSVADSNKDGKISFEEFVSLMQELKSKDISKTFRKIINKREGITAIGGTSTISSEGTQHSYSEEEKVAFVNWINKALENDPDCKHLIPMNPNDDSLFKSLADGILLCKMINLSEPDTIDERAINKKKLTPFTISENLNLALNSASAIGCTVVNIGASDLKEGKPHLVLGLLWQIIKVGLFADIEISRNEALIALLNEGEELEELMKLSPEELLLRWVNYHLTNAGWHTISNFSQDIKDSRAYFHLLNQIAPKGGEDGPAIAIDLSGINETNDLKRAGLMLQEADKLGCKQFVTPADVVSGNPKLNLAFVANLFNTYPCLHKPNNNDIDMNLLEGESKEERTFRNWMNSLGVNPYINHLYSDLADALVIFQLYEMIRVPVNWSHVNKPPYPALGGNMKKIENCNYAVELGKNKAKFSLVGIAGQDLNEGNSTLTLALVWQLMRRYTLNVLSDLGEGEKVNDEIIIKWVNQTLKSANKKTSISSFKDKSISTSLPVLDLIDAIAPNAVRQEMIRRENLSDEDKLNNAKYAISVARKIGARIYALPDDLVEVKPKMVMTVFACLMGKGLNRIK

SEQ ID NO: 6231 - protein, 624 aa, Homo sapiens
MTQAEKGDTENGKEKGGEKEKEQRGVKRPIVPALVPESLQEQIQSNFIIVIHPGSTTLRIGRATDTLPASIPHVIARRHKQQGQPLYKDSWLLREGLNKPESNEQRQNGLKMVDQAIWSKKMSNGTRRIPVSPEQARSYNKQMRPAILDHCSGNKWTNTSHHPEYLVGEEALYVNPLDCYNIHWPIRRGQLNIHPGPGGSLTAVLADIEVIWSHAIQKYLEIPLKDLKYYRCILLIPDIYNKQHVKELVNMILMKMGFSGIVVHQESVCATYGSGLSSTCIVDVGDQKTSVCCVEDGVSHRNTRLCLAYGGSDVSRCFYWLMQRAGFPYRECQLTNKMDCLLLQHLKETFCHLDQDISGLQDHEFQIRHPDSPALLYQFRLGDEKLQAPMALFYPATFGIVGQKMTTLQHRSQGDPEDPHDEHYLLATQSKQEQSAKATADRKSASKPIGFEGDLRGQSSDLPERLHSQEVDLGSAQGDGLMAGNDSEEALTALMSRKTAISLFEGKALGLDKAILHSIDCCSSDDTKKKMYSSILVVGGGLMFHKAQEFLQHRILNKMPPSFRRIIENVDVITRPKDMDPRLIAWKGGAVLACLDTTQELWIYQREWQRFGVRMLRERAAFVW

SEQ ID NO: 6232 - protein, 208 aa, Homo sapiens
MSTGGDFGNPLRKFKLVFLGEQSVGKTSLITRFMYDSFDNTYQATIGIDFLSKTMYLEDRTVRLQLWDTAGQERFRSLIPSYIRDSTVAVVVYDITNVNSFQQTTKWIDDVRTERGSDVIIMLVGNKTDLADKRQVSIEEGERKAKELNVMFIETSAKAGYNVKQLFRRVAAALPGMESTQDRSREDMIDIKLEKPQEQPVSEGGCSC

SEQ ID NO: 6233 - protein, 347 aa, Homo sapiens
MENLMTSSTLPPLFADEDGSKESNDLATTGLNHPEVPYSSGATSSTNNPEFVEDLSQGQLLQSESSNAAEGNEQRHEDEQRSKRGGWSKGRKRKKPLRDSNAPKSPLTGYVRFMNERREQLRAKRPEVPFPEITRMLGNEWSKLPPEEKQRYLDEADRDKERYMKELEQYQKTEAYKVFSRKTQDRQKGKSHRQDAARQATHDHEKETEVKERSVFDIPIFTEEFLNHSKAREAELRQLRKSNMEFEERNAALQKHVESMRTAVEKLEVDVIQERSRNTVLQQHLETLRQVLTSSFASMPLPGSGETPTVDTIDSYMNRLHSIILANPQDNENFIATVREVVNRLDR

SEQ ID NO: 6234 - protein, 186 aa, Homo sapiens
MASPSKAVIVPGNGGGDVTTHGWYGWVKKELEKIPGFQCLAKNMPDPITARESIWLPFMETELHCDEKTIIIGHSSGAIAAMRYAETHRVYAIVLVSAYTSDLGDENERASGYFTRPWQWEKIKANCPYIVQFGSTDDPFLPWKEQQEVADRLETKLHKFTDCGHFQNTEFHELITVVKSLLKVPA

SEQ ID NO: 6235 - protein, 307 aa, Homo sapiens
MDDFISISLLSLAMLVGCYVAGIIPLAVNFSEERLKLVTVLGAGLLCGTALAVIVPEGVHALYEDILEGKHHQASETHNVIASDKAAEKSVVHEHEHSHDHTQLHAYIGVSLVLGFVFMLLVDQIGNSHVHSTDDPEAARSSNSKITTTLGLVVHAAADGVALGAAASTSQTSVQLIVFVAIMLHKAPAAFGLVSFLMHAGLERNRIRKHLLVFALAAPVMSMVTYLGLSKSSKEALSEVNATGVAMLFSAGTFLYVATVHVLPEVGGIGHSHKPDATGGRGLSRLEVAALVLGCLIPLILSVGHQH

SEQ ID NO: 6236 - protein, 706 aa, Homo sapiens
MGDERPHYYGKHGTPQKYDPTFKGPIYNRGCTDIICCVFLLLAIVGYVAVGIIAWTHGDPRKVIYPTDSRGEFCGQKGTKNENKPYLFYFNIVKCASPLVLLEFQCPTPQICVEKCPDRYLTYLNARSSRDFEYYKQFCVPGFKNNKGVAEVLQDGDCPAVLIPSKPLARRCFPAIHAYKGVLMVGNETTYEDGHGSRKNITDLVEGAKKANGVLEARQLAMRIFEDYTVSWYWIIIGLVIAMAMSLLFIILLRFLAGIMVWVMIIMVILVLGYGIFHCYMEYSRLRGEAGSDVSLVDLGFQTDFRVYLHLRQTWLAFMIILSILEVIIILLLIFLRKRILIAIALIKEASRAVGYVMCSLLYPLVTFFLLCLCIAYWASTAVFLSTSNEAVYKIFDDSPCPFTAKTCNPETFPSSNESRQCPNARCQFAFYGGESGYHRALLGLQIFNAFMFFWLANFVLALGQVTLAGAFASYYWALRKPDDLPAFPLFSAFGRALRYHTGSLAFGALILAIVQIIRVILEYLDQRLKAAENKFAKCLMTCLKCCFWCLEKFIKFLNRNAYIMIAIYGTNFCTSARNAFFLLMRNIIRVAVLDKVTDFLFLLGKLLIVGSVGILAFFFFTHRIRIVQDTAPPLNYYWVPILTVIVGSYLIAHGFFSVYGMCVDTLFLCFLEDLERNDGSAERPYFMSSTLKKLLNKTNKKAAES

SEQ ID NO: 6237 - protein, 487 aa, Homo sapiens
MAAALPRTLGELQLYRILQKANLLSYFDAFIQQGGDDVQQLCEAGEEEFLEIMALVGMASKPLHVRRLQKALRDWVTNPGLFNQPLTSLPVSSIPIYKLPEGSPTWLGISCSSYERSSNAREPHLKIPKCAATTCVQSLGQGKSDVVGSLALQSVGESRLWQGHHATESEHSLSPADLGSPASPKESSEALDAAAALSVAECVERMAPTLPKSDLNEVKELLKTNKKLAKMIGHIFEMNDDDPHKEEEIRKYSAIYGRFDSKRKDGKHLTLHELTVNEAAAQLCVKDNALLTRRDELFALARQISREVTYKYTYRTTKSKCGERDELSPKRIKVEDGFPDFQDSVQTLFQQARAKSEELAALSSQQPEKVMAKQMEFLCNQAGYERLQHAERRLSAGLYRQSSEEHSPNGLTSDNSDGQGERPLNLRMPNLQNRQPHHFVVDGELSRLYPSEAKSHSSESLGILKDYPHSAFTLEKKVIKTEPEDSR

SEQ ID NO: 6238 - protein, 151 aa, Homo sapiens
MTNEEPLPKKVRLSETDFKVMARDELILRWKQYEAYVQALEGKYTDLNSNDVTGLRESEEKLKQQQQESARRENILVMRLATKEQEMQECTTQIQYLKQVQQPSVAQLRSTMVDPAINLFFLKMKGELEQTKDKLEQAQNELSAWKFTPDR

SEQ ID NO: 6239 - protein, 786 aa, Homo sapiens
MGLQPLEFSDCYLDSPWFRERIRAHEAELERTNKFIKELIKDGKNLIAATKSLSVAQRKFAHSLRDFKFEFIGDAVTDDERCIDASLREFSNFLKNLEEQREIMALSVTETLIKPLEKFRKEQLGAVKEEKKKFDKETEKNYSLIDKHLNLSAKKKDSHLQEADIQVEQNRQHFYELSLEYVCKLQEIQERKKFEFVEPMLSFFQGMFTFYHQGHELAKDFNHYKMELQINIQNTRNRFEGTRSEVEELMNKIRQNPKDHKRASQFTAEGYLYVQEKRPAPFGSSWVKHYCMYRKAAKKFNMIPFEHRSGGKLGDGEVFFLKECTKRHTDSIDRRFCFDIEAADRPGVSLTMQAFSEEERKQWLEALGGKEALSHSFNTAIIPRPEGNAQLDKMGFTIIRKCISAVETRGINDQGLYRVVGVSSKVQRLLSMLMDVKTCNEVDLENSADWEVKTITSALKQYLRSLPEPLMTYELHGDFIVPAKSGSPESRVNAIHFLVHKLPEKNKEMLDILVKHLTNVSNHSKQNLMTVANLGVVFGPTLMRPQEETVAALMDLKFQNIVVEILIENHEKIFRTPPDTTFPEPTCLSASPPNAPPRQSKRQGQRTKRPVAVYNLCLELEDGDNPYPSKEDTPTSSLDSLSSPSPVTTAVPGPPGPDKNHLLADGGSFGDWASTIPGQTRSSMVQWLNPQSPTTTSSNSAVTPLSPGSSPFPFSPPATVADKPPESIRSRKARAVYPCEAEHSSELSFEIGAIFEDVQTSREPGWLEGTLNGKRGLIPQNYVKLL

SEQ ID NO: 6240 - protein, 327 aa, Homo sapiens
MTVVSVPQREPLVLGGRLAPLGFSSRGYFGALPMVTTAPPPLPRIPDPRALPPTLFLPHFLGGDGPCLTPQPRAPAALPNRSLAVAGGTPRAAPKKRRKKKVRASPAGQLPSRFHQYQQHRPSLEGGRSPATGPSGAQEVPGPAAALAPSPAAAAGTEGASPDLAPLRPAAPGQTPLRKEVLKSKMGKSEKIALPHGQLVHGIHLYEQPKINRQKSKYNLPLTKITSAKRNENNFWQDSVSSDRIQKQEKKPFKNTENIKNSHLKKSAFLTEVSQKENYAGAKFSDPPSPSVLPKPPSHWMGSTVENSNQNRELMAVHLKTLLKVQT

SEQ ID NO: 6241 - protein, 537 aa, Homo sapiens
MAHCVTLVQLSISCDHLIDKDIGSKSDPLCVLLQDVGGGSWAELGRTERVRNCSSPEFSKTLQLEYRFETVQKLRFGIYDIDNKTPELRDDDFLGGAECSLGQIVSSQVLTLPLMLKPGKPAGRGTITVSAQELKDNRVVTMEVEARNLDKKDFLGKSDPFLEFFRQGDGKWHLVYRSEVIKNNLNPTWKRFSVPVQHFCGGNPSTPIQVQCSDYDSDGSHDLIGTFHTSLAQLQAVPAEFECIHPEKQQKKKSYKNSGTIRVKICRVETEYSFLDYVMGGCQINFTVGVDFTGSNGDPSSPDSLHYLSPTGVNEYLMALWSVGSVVQDYDSDKLFPAFGFGAQVPPDWQVSHEFALNFNPSNPYCAGIQGIVDAYRQALPQVRLYGPTNFAPIINHVARFAAQAAHQGTASQYFMLLLLTDGAVTDVEATREAVVRASNLPMSVIIVGVGGADFEAMEQLDADGGPLHTRSGQAAARDIVQFVPYRRFQNAPREALAQTVLAEVPTQLVSYFRAQGWAPLKPLPPSAKDPAQAPQA

SEQ ID NO: 6242 - protein, 669 aa, Homo sapiens
MAAAQEADGARSAVVAAGGGSSGQVTSNGSIGRDPPAETQPQNPPAQPAPNAWQVIKGVLFRIFIIWAISSWFRRGPAPQDQAGPGGAPRVASRNLFPKDTLMNLHVYISEHEHFTDFNATSALFWEQHDLVYGDWTSGENSDGCYEHFAELDIPQSVQQNGSIYIHVYFTKSGFHPDPRQKALYRRLATVHMSRMINKYKRRRFQKTKNLLTGETEADPEMIKRAEDYGPVEVISHWHPNITINIVDDHTPWVKGSVPPPLDQYVKFDAVSGDYYPIIYFNDYWNLQKDYYPINESLASLPLRVSFCPLSLWRWQLYAAQSTKSPWNFLGDELYEQSDEEQDSVKVALLETNPYLLALTIIVSIVHSVFEFLAFKNDIQFWNSRQSLEGLSVRSVFFGVFQSFVVLLYILDNETNFVVQVSVFIGVLIDLWKITKVMDVRLDREHRVAGIFPRLSFKDKSTYIESSTKVYDDMAFRYLSWILFPLLGCYAVYSLLYLEHKGWYSWVLSMLYGFLLTFGFITMTPQLFINYKLKSVAHLPWRMLTYKALNTFIDDLFAFVIKMPVMYRIGCLRDDVVFFIYLYQRWIYRVDPTRVNEFGMSGEDPTAAAPVAEVPTAAGALTPTPAPTTTTATREEASTSLPTKPTQGASSASEPQEAPPKPAEDKKKD

SEQ ID NO: 6243 - protein, 240 aa, Homo sapiens
MKVKKGGGGAGTATESAPGPSGQSVAPIPQPPAESESGSESEPDAGPGPRPGPLQRKQPIGPEDVLGLQRITGDYLCSPEENIYKIDFVRFKIRDMDSGTVLFEIKKPPVSERLPINRRDLDPNAGRFVRYQFTPAFLRLRQVGATVEFTVGDKPVNNFRMIERHYFRNQLLKSFDFHFGFCIPSSKNTCEHIYDFPPLSEELISEMIRHPYETQSDSFYFVDDRLVMHNKADYSYSGTP

SEQ ID NO: 6244 - protein, 188 aa, Homo sapiens
MMHPVASSNPAFCGPGKPSCLNEDAMRAADQFDIYSSQQSKYSHTVNHKPMVCQRQDPLNETHLQTTSGRSIEIKDELKKKKNLNRSGKRGRPSGTTKSAGYRTSTGRPLGTTKAAGFKTSPGRPLGTTKAAGYKVSPGRPPGSIKALSRLADLGYGCGTAAFPYPMMHGRAVHGVEETSSEVKPPNE

SEQ ID NO: 6245 - protein, 794 aa, Homo sapiens
MRVRIGLTLLLCAVLLSLASASSDEEGSQDESLDSKTTLTSDESVKDHTTAGRVVAGQIFLDSEESELESSIQEEEDSLKSQEGESVTEDISFLESPNPENKDYEEPKKVRKPALTAIEGTAHGEPCHFPFLFLDKEYDECTSDGREDGRLWCATTYDYKADEKWGFCETEEEAAKRRQMQEAEMMYQTGMKILNGSNKKSQKREAYRYLQKAASMNHTKALERVSYALLFGDYLPQNIQAAREMFEKLTEEGSPKGQTALGFLYASGLGVNSSQAKALVYYTFGALGGNLIAHMVLGYRYWAGIGVLQSCESALTHYRLVANHVASDISLTGGSVVQRIRLPDEVENPGMNSGMLEEDLIQYYQFLAEKGDVQAQVGLGQLHLHGGRGVEQNHQRAFDYFNLAANAGNSHAMAFLGKMYSEGSDIVPQSNETALHYFKKAADMGNPVGQSGLGMAYLYGRGVQVNYDLALKYFQKAAEQGWVDGQLQLGSMYYNGIGVKRDYKQALKYFNLASQGGHILAFYNLAQMHASGTGVMRSCHTAVELFKNVCERGRWSERLMTAYNSYKDGDYNAAVIQYLLLAEQGYEVAQSNAAFILDQREASIVGENETYPRALLHWNRAASQGYTVARIKLGDYHFYGFGTDVDYETAFIHYRLASEQQHSAQAMFNLGYMHEKGLGIKQDIHLAKRFYDMAAEASPDAQVPVFLALCKLGVVYFLQYIRETNIRDMFTQLDMDQLLGPEWDLYLMTIIALLLGTVIAYRQRQHQDMPAPRPPGPRPAPPQQEGPPEQQPPQ

SEQ ID NO: 6246 - protein, 615 aa, Homo sapiens
MGLKAAQKTLFPLRSIDDVVRLFAAELGREEPDLVLLSLVLGFVEHFLAVNRVIPTNVPELTFQPSPAPDPPGGLTYFPVADLSIIAALYARFTAQIRGAVDLSLYPREGGVSSRELVKKVSDVIWNSLSRSYFKDRAHIQSLFSFITGWSPVGTKLDSSGVAFAVVGACQALGLRDVHLALSEDHAWVVFGPNGEQTAEVTWHGKGNEDRRGQTVNAGVAERSWLYLKGSYMRCDRKMEVAFMVCAINPSIDLHTDSLELLQLQQKLLWLLYDLGHLERYPMALGNLADLEELEPTPGRPDPLTLYHKGIASAKTYYRDEHIYPYMYLAGYHCRNRNVREALQAWADTATVIQDYNYCREDEEIYKEFFEVANDVIPNLLKEAASLLEAGEERPGEQSQGTQSQGSALQDPECFAHLLRFYDGICKWEEGSPTPVLHVGWATFLVQSLGRFEGQVRQKVRIVSREAEAAEAEEPWGEEAREGRRRGPRRESKPEEPPPPKKPALDKGLGTGQGAVSGPPRKPPGTVAGTARGPEGGSTAQVPAPTASPPPEGPVLTFQSEKMKGMKELLVATKINSSAIKLQLTAQSQVQMKKQKVSTPSDYTLSFLKRQRKGL

SEQ ID NO: 6247 - protein, 407 aa, Homo sapiens
MEPAAALHFSLPASLLLLLLLLLLSLCALVSGLGSKPLIEIKAQEDGSIWLECISGGWYPEPLTVWRDPYGEVVPALKEVSIADADGLFMVTTAVIIRDKYVRNVSCSVNNTLLGQEKETVIFIPESFMPSASPWMVALAVILTASPWMVSMTVILAVFIIFMAVSICCIKKLQREKKILSGEKKVEQEEKEIAQQLQEELRWRRTFLHAADVVLDPDTAHPELFLSEDRRSVRRGPYRQRVPDNPERFDSQPCVLGWESFASGKHYWEVEVENVMVWTVGVCRHSVERKGEVLLIPQNGFWTLEMFGNQYRALSSPERILPLKESLCRVGVFLDYEAGDVSFYNMRDRSHIYTCPRSAFTVPVRPFFRLGSDDSPIFICPALTGASGVMVPEEGLKLHRVGTHQSL

SEQ ID NO: 6248 - protein, 605 aa, Homo sapiens
MAAGQREARPQVSLTFEDVAVLFTRDEWRKLAPSQRNLYRDVMLENYRNLVSLGLPFTKPKVISLLQQGEDPWEVEKDGSGVSSLGSKSSHKTTKSTQTQDSSFQGLILKRSNRNVPWDLKLEKPYIYEGRLEKKQDKKGSFQIVSATHKKIPTIERSHKNTELSQNFSPKSVLIRQQILPREKTPPKCEIQGNSLKQNSQLLNQPKITADKRYKCSLCEKTFINTSSLRKHEKNHSGEKLFKCKECSKAFSQSSALIQHQITHTGEKPYICKECGKAFTLSTSLYKHLRTHTVEKSYRCKECGKSFSRRSGLFIHQKIHAEENPCKYNPGRKASSCSTSLSGCQRIHSRKKSYLCNECGNTFKSSSSLRYHQRIHTGEKPFKCSECGRAFSQSASLIQHERIHTGEKPYRCNECGKGFTSISRLNRHRIIHTGEKFYNCNECGKALSSHSTLIIHERIHTGEKPCKCKVCGKAFRQSSALIQHQRMHTGERPYKCNECGKTFRCNSSLSNHQRIHTGEKPYRCEECGISFGQSSALIQHRRIHTGEKPFKCNTCGKTFRQSSSRIAHQRIHTGEKPYECNTCGKLFNHRSSLTNHYKIHIEEDP

SEQ ID NO: 6249 - protein, 238 aa, Homo sapiens
MEPGLWLLFGLTVTSAAGFVPCSQSGDAGRRGVSQAPTAARSEGDCEETVAGPGEETVAGPGEGTVAPTALQGPSPGSPGQEQAAEGAPEHHRSRRCTCFTYKDKECVYYCHLDIIWINTPEQTVPYGLSNYRGSFRGKRSAGPLPGNLQLSHRPHLRCACVGRYDKACLHFCTQTLDVSSNSRTAEKTDKEEEGKVEVKDQQSKQALDLHHPKLMPGSGLALAPSTCPRCLFQEGAP

SEQ ID NO: 6250 - protein, 378 aa, Homo sapiens
MNNSGADEIGKLFVGGLDWSTTQETLRSYFSQYGEVVDCVIMKDKTTNQSRGFGFVKFKDPNCVGTVLASRPHTLDGRNIDPKPCTPRGMQPERTRPKEGWQKGPRSDNSKSNKIFVGGIPHNCGETELREYFKKFGVVTEVVMIYDAEKQRPRGFGFITFEDEQSVDQAVNMHFHDIMGKKVEVKRAEPRDSKSQAPGQPGASQWGSRVVPNAANGWAGQPPPTWQQGYGPQGMWVPAGQAIGGYGPPPAGRGAPPPPPPFTSYIVSTPPGGFPPPQGFPQGYGAPPQFSFGYGPPPPPPDQFAPPGVPPPPATPGAAPLAFPPPPSQAAPDMSKPPTAQPDFPYGQYGLGSYSPAPPGCGPHFVYSLMVRLSSDVA

SEQ ID NO: 6251 - protein, 299 aa, Homo sapiens
MSKCARKKYIKTNPRQMTMETVESQHDGSITASLTESKSAHVQTQTGQNSIPALAQVAAIAETDESAESEGVIDSHKRREILSRRPSYRKILNELSSDVPGVPKIEEERSEEEGTPPSIATMAVPTSIYQTSTGQYIAIAQGGTIQISNPGSDGVQGLQALTMTNSGAPPPGATIVQYAAQSADGTQQFFVPGSQVVVQAATGDMPTYQIRAPTAALPQGVVMAASPGSLHSPQQLAEEATRKRELRLMKNREAARECRRKKKEYVKCLENRVAVLENQNKTLIEELKALKDLYCHKVE

SEQ ID NO: 6252 - protein, 1539 aa, Homo sapiens
MDSYFKAAVSDLDKLLDDFEQNPDEQDYLQDVQNAYDSNHCSVSSELASSQRTSLLPKDQECVNSCASSETSYGTNESSLNEKTLKGLTSIQNEKNVTGLDLLSSVDGGTSDEIQPLYMGRCSKPICDLISDMGNLVHATNSEEDIKKLLPDDFKSNADSLIGLDLSSVSDTPCVSSTDHDSDTVREQQNDISSELQNREIGGIKELGIKVDTTLSDSYNYSGTENLKDKKIFNQLESIVDFNMSSALTRQSSKMFHAKDKLQHKSQPCGLLKDVGLVKEEVDVAVITAAECLKEEGKTSALTCSLPKNEDLCLNDSNSRDENFKLPDFSFQEDKTVIKQSAQEDSKSLDLKDNDVIQDSSSALHVSSKDVPSSLSCLPASGSMCGSLIESKARGDFLPQHEHKDNIQDAVTIHEEIQNSVVLGGEPFKENDLLKQEKCKSILLQSLIEGMEDRKIDPDQTVIRAESLDGGDTSSTVVESQEGLSGTHVPESSDCCEGFINTFSSNDMDGQDLDYFNIDEGAKSGPLISDAELDAFLTEQYLQTTNIKSFEENVNDSKSQMNQIDMKGLDDGNINNIYFNAEAGAIGESHGINIICEIVDKQNTIENGLSLGEKSTIPVQQGLPTSKSEITNQLSVSDINSQSVGGARPKQLFSLPSRTRSSKDLNKPDVPDTIESEPSTADTVVPITCAIDSTADPQVSFNSNYIDIESNSEGGSSFVTANEDSVPENTCKEGLVLGQKQPTWVPDSEAPNCMNCQVKFTFTKRRHHCRACGKVFCGVCCNRKCKLQYLEKEARVCVVCYETISKAQAFERMMSPTGSNLKSNHSDECTTVQPPQENQTSSIPSPATLPVSALKQPGVEGLCSKEQKRVWFADGILPNGEVADTTKLSSGSKRCSEDFSPLSPDVPMTVNTVDHSHSTTVEKPNNETGDITRNEIIQSPISQVPSVEKLSMNTGNEGLPTSGSFTLDDDVFAETEEPSSPTGVLVNSNLPIASISDYRLLCDINKYVCNKISLLPNDEDSLPPLLVASGEKGSVPVVEEHPSHEQIILLLEGESFHPVTFVLNANLLVNVKFIFYSSDKYWYFSTNGLHGLGQAEIIILLLCLPNEDTIPKDIFRLFITIYKDALKGKYIENLDNITFTESFLSSKDHGGFLFITPTFQKLDDLSLPSNPFLCGILIQKLEIPWAKVFPMRLMLRLGAEYKAYPAPLTSIRGRKPLFGEIGHTIMNLLVDLRNYQYTLHNIDQLLIHMEMGKSCIKIPRKKYSDVMKVLNSSNEHVISIGASFSTEADSHLVCIQNDGIYETQANSATGHPRKVTGASFVVFNGALKTSSGFLAKSSIVEDGLMVQITPETMNGLRLALREQKDFKITCGKVDAVDLREYVDICWVDAEEKGNKGVISSVDGISLQGFPSEKIKLEADFETDEKIVKCTEVFYFLKDQDLSILSTSYQFAKEIAMACSAALCPHLKTLKSNGMNKIGLRVSIDTDMVEFQAGSEGQLLPQHYLNDLDSALIPVIHGGTSNSSLPLEIELVFFIIEHLF

SEQ ID NO: 6253 - protein, 671 aa, Homo sapiens
MNGAPSPEDGASPSSPPLPPPPPPSWREFCESHARAAALDFARRFRLYLASHPQYAGPGAEAAFSRRFAELFLQHFEAEVARASGSLSPPILAPLSPGAEISPHDLSLESCRVGGPLAVLGPSRSSEDLAGPLPSSVSSSSTTSSKPKLKKRFSLRSVGRSVRGSVRGILQWRGTVDPPSSAGPLETSSGPPVLGGNSNSNSSGGAGTVGRGLVSDGTSPGERWTHRFERLRLSRGGGALKDGAGMVQREELLSFMGAEEAAPDPAGVGRGGGVAGPPSGGGGQPQWQKCRLLLRSEGEGGGGSRLEFFVPPKASRPRLSIPCSSITDVRTTTALEMPDRENTFVVKVEGPSEYIMETVDAQHVKAWVSDIQECLSPGPCPATSPRPMTLPLAPGTSFLTRENTDSLELSCLNHSESLPSQDLLLGPSESNDRLSQGAYGGLSDRPSASISPSSASIAASHFDSMELLPPELPPRIPIEEGPPTGTVHPLSAPYPPLDTPETATGSFLFQGEPEGGEGDQPLSGYPWFHGMLSRLKAAQLVLTGGTGSHGVFLVRQSETRRGEYVLTFNFQGKAKHLRLSLNEEGQCRVQHLWFQSIFDMLEHFRVHPIPLESGGSSDVVLVSYVPSSQRQQGREQAGSHAGVCEGDGCHPDASCTLMPFGASDCVTDHLP

SEQ ID NO: 6254 - protein, 1007 aa, Homo sapiens
MAAAETQSLREQPEMEDANSEKSINEENGEVSEDQSQNKHSRHKKKKHKHRSKHKKHKHSSEEDKDKKHKHKHKHKKHKRKEIIDASDKEGMSPAKRTKLDDLALLEDLEKQRALIKAELDNELMEGKVQSGMGLILQGYESGSEEEGEIHEKARNGNRSSTRSSSTKGKLELVDNKITTKKRSKSRSKERTRHRSDKKKSKGGIEIVKEKTTRSKSKERKKSKSPSKRSKSQDQARKSKSPTLRRRSQEKIGKARSPTDDKVKIEDKSKSKDRKKSPIINESRSRDRGKKSRSPVDLRGKSKDRRSRSKERKSKRSETDKEKKPIKSPSKDASSGKENRSPSRRPGRSPKRRSLSPKPRDKSRRSRSPLLNDRRSKQSKSPSRTLSPGRRAKSRSLERKRREPERRRLSSPRTRPRDDILSRRERSKDASPINRWSPTRRRSRSPIRRRSRSPLRRSRSPRRRSRSPRRRDRGRRSRSRLRRRSRSRGGRRRRSRSKVKEDKFKGSLSEGMKVEQESSSDDNLEDFDVEEEDEEALIEQRRIQRQAIVQKYKYLAEDSNMSVPSEPSSPQSSTRTRSPSPDDILERVAADVKEYERENVDTFEASVKAKHNLMTVEQNNGSSQKKLLAPDMFTESDDMFAAYFDSARLRAAGIGKDFKENPNLRDNWTDAEGYYRVNIGEVLDKRYNVYGYTGQGVFSNVVRARDNARANQEVAVKIIRNNELMQKTGLKELEFLKKLNDADPDDKFHCLRLFRHFYHKQHLCLVFEPLSMNLREVLKKYGKDVGLHIKAVRSYSQQLFLALKLLKRCNILHADIKPDNILVNESKTILKLCDFGSASHVADNDITPYLVSRFYRAPEIIIGKSYDYGIDMWSVGCTLYELYTGKILFPGKTNNHMLKLAMDLKGKMPNKMIRKGVFKDQHFDQNLNFMYIEVDKVTEREKVTVMSTINPTKDLLADLIGCQRLPEDQRKKVHQLKDLLDQILMLDPAKRISINQALQHAFIQEKI

SEQ ID NO: 6255 - protein, 380 aa, Homo sapiens
MASLAAANAEFCFNLFREMDDNQGNGNVFFSSLSLFAALALVRLGAQDDSLSQIDKLLHVNTASGYGNSSNSQSGLQSQLKRVFSDINASHKDYDLSIVNGLFAEKVYGFHKDYIECAEKLYDAKVERVDFTNHLEDTRRNINKWVENETHGKIKNVIGEGGISSSAVMVLVNAVYFKGKWQSAFTKSETINCHFKSPKCSGKAVAMMHQERKFNLSVIEDPSMKILELRYNGGINMYVLLPENDLSEIENKLTFQNLMEWTNPRRMTSKYVEVFFPQFKIEKNYEMKQYLRALGLKDIFDESKADLSGIASGGRLYISRMMHKSYIEVTEEGTEATAATGSNIVEKQLPQSTLFRADHPFLFVIRKDDIILFSGKVSCP

SEQ ID NO: 6256 - protein, 241 aa, Homo sapiens
MFARGLKRKCVGHEEDVEGALAGLKTVSSYSLQRQSLLDMSLVKLQLCHMLVEPNLCRSVLIANTVRQIQEEMTQDGTWRTVAPQAAERAPLDRLVSTEILCRAAWGQEGAHPAPGLGDGHTQGPVSDLCPVTSAQAPRHLQSSAWEMDGPRENRGSFHKSLDQIFETLETKNPSCMEELFSDVDSPYYDLDTVLTGMMGGARPGPCEGLEGLAPATPGPSSSCKSDLGELDHVVEILVET

SEQ ID NO: 6257 - protein, 449 aa, Homo sapiens
MSPESKKLFNIIILGVAFMFMFTAFQTCGNVAQTVIRSLNRTDFHGSGYTSMAIIYGVFSASNLITPSVVAIVGPQLSMFASGLFYSMYIAVFIQPFPWSFYTASVFIGIAAAVLWTAQGNCLTINSDEHSIGRNSGIFWALLQSSLFFGNLYIYFAWQGKTQISESDRRTVFIALTVISLVGTVLFFLIRKPDSENVLGEDESSDDQDMEVNESAQNNLTKAVDAFKKSFKLCVTKEMLLLSITTAYTGLELTFFSGVYGTCIGATNKFGAEEKSLIGLSGIFIGIGEILGGSLFGLLSKNNRFGRNPVVLLGILVHFIAFYLIFLNMPGDAPIAPVKGTDSSAYIKSSKEVAILCSFLLGLGDSCFNTQLLSILGFLYSEDSAPAFAIFKFVQSICAAVAFFYSNYLLLHWQLLVMVIFGFFGTISFFTVEWEAAAFVARGSDYRSI

SEQ ID NO: 6258 - protein, 366 aa, Homo sapiens
MLCSLLLCECLLLVAGYAHDDDWIDPTDMLNYDAASGTMRKSQAKYGISGEKDVSPDLSCADEISECYHKLDSLTYKIDECEKKKREDYESQSNPVFRRYLNKILIEAGKLGLALAVTFTTFVTEPLKHIGKGTGEFIKALMKEIPALLHLPVLIIMALAILSFCYGAGKSVHVLRHIGGPESEPPQALRPRDRRRQEEIDYRPDGGAGDADFHYRGQMGPTEQGPYAKTYEGRREILRERDVDLRFQTGNKSPEVLRAFDVPDAEAREHPTVVPSHKSPVLDTKPKETGGILGEGTPKESSTESSQSAKPVSGQDTSGNTEGSPAAEKAQLKSEAAGSPDQGSTYSPARGVAGPRGQDPVSSPCG

SEQ ID NO: 6259 - protein, 927 aa, Homo sapiens
MASLSTWSSPAEPREMEDFARGAASPGPSRPGLVPVSIIGAEDEDFENELETNSEEQNSQFQSLEQVKRRPAHLMALLQHVALQFEPGPLLCCLHADMLGSLGPKEAKKAFLDFYHSFLEKTAVLRVPVPPNVAFELDRTRADLISEDVQRRFVQEVVQSQQVAVGRQLEDFRSKRLMGMTPWEQELAQLEAWVGRDRASYEARERHVAERLLMHLEEMQHTISTDEEKSAAVVNAIGLYMRHLGVRTKSGDKKSGRNFFRKKVMGNRRSDEPAKTKKGLSSILDAARWNRGEPQVPDFRHLKAEVDAEKPGATDRKGGVGMPSRDRNIGAPGQDTPGVSLHPLSLDSPDREPGADAPLELGDSSPQGPMSLESLAPPESTDEGAETESPEPGDEGEPGRSGLELEPEEPPGWRELVPPDTLHSLPKSQVKRQEVISELLVTEAAHVRMLRVLHDLFFQPMAECLFFPLEELQNIFPSLDELIEVHSLFLDRLMKRRQESGYLIEEIGDVLLARFDGAEGSWFQKISSRFCSRQSFALEQLKAKQRKDPRFCAFVQEAESRPRCRRLQLKDMIPTEMQRLTKYPLLLQSIGQNTEEPTEREKVELAAECCREILHHVNQAVRDMEDLLRLKDYQRRLDLSHLRQSSDPMLSEFKNLDITKKKLVHEGPLTWRVTKDKAVEVHVLLLDDLLLLLQRQDERLLLKSHSRTLTPTPDGKTMLRPVLRLTSAMTREVATDHKAFYVLFTWDQEAQIYELVAQTVSERKNWCALITETAGSLKVPAPASRPKPRPSPSSTREPLLSSSENGNGGRETSPADARTERILSDLLPFCRPGPEGQLAATALRKVLSLKQLLFPAEEDNGAGPPRDGDGVPGGGPLSPARTQEIQENLLSLEETMKQLEELEEEFCRLRPLLSQLGGNSVPQPGCT

SEQ ID NO: 6260 - protein, 268 aa, Homo sapiens
MSGKANASKKNAQQLKRNPKRKKDNEEVVLSENKVRNTVKKNKNHLKDLSSEGQTKHTNLKHGKTAASKRKTWQPLSKSTRDHLQTMMESVIMTILSNSIKEKEEIQYHLNFLKKRLLQQCETLKVPPKKMEDLTNVSSLLNMERARDKANEEGLALLQEEIDKMVETTELMTGNIQSLKNKIQILASEVEEEEERVKQMHQINSSGVLSLPELSQKTLKAPTLQKEILALIPNQNALLKDLDILHNSSQMKSMSTFIEEAYKKLDAS

SEQ ID NO: 6261 - protein, 261 aa, Homo sapiens
MIYKCPMCREFFSERADLFMHQKIHTAEKPHKCDKCDKGFFHISELHIHWRDHTGEKVYKCDDCGKDFSTTTKLNRHKKIHTVEKPYKCYECGKAFNWSSHLQIHMRVHTGEKPYVCSECGRGFSNSSNLCMHQRVHTGEKPFKCEECGKAFRHTSSLCMHQRVHTGEKPYKCYECGKAFSQSSSLCIHQRVHTGEKPYRCCGCGKAFSQSSSLCIHQRVHTGEKPFKCDECGKAFSQSTSLCIHQRVHTKERNHLKISVI

SEQ ID NO: 6262 - protein, 355 aa, Homo sapiens
MSVNYAAGLSPYADKGKCGLPEIFDPPEELERKVWELARLVWQSSSVVFHTGAGISTASGIPDFRGPHGVWTMEERGLAPKFDTTFESARPTQTHMALVQLERVGLLRFLVSQNVDGLHVRSGFPRDKLAELHGNMFVEECAKCKTQYVRDTVVGTMGLKATGRLCTVAKARGLRACRGELRDTILDWEDSLPDRDLALADEASRNADLSITLGTSLQIRPSGNLPLATKRRGGRLVIVNLQPTKHDRHADLRIHGYVDEVMTRLMKHLGLEIPAWDGPRVLERALPPLPRPPTPKLEPKEESPTRINGSIPAGPKQEPCAQHNGSEPASPKRERPTSPAPHRPPKRVKAKAVPS

SEQ ID NO: 6263 - protein, 608 aa, Homo sapiens
MSQEGDYGRWTISSSDESEEEKPKPDKPSTSSLLCARQGAANEPRYTCSEAQKAAHKRKISPVKFSNTDSVLPPKRQKSGSQEDLGWCLSSSDDELQPEMPQKQAEKVVIKKEKDISAPNDGTAQRTENHGAPACHRLKEEEDEYETSGEGQDIWDMLDKGNPFQFYLTRVSGVKPKYNSGALHIKDILSPLFGTLVSSAQFNYCFDVDWLVKQYPPEFRKKPILLVHGDKREAKAHLHAQAKPYENISLCQAKLDIAFGTHHTKMMLLLYEEGLRVVIHTSNLIHADWHQKTQGIWLSPLYPRIADGTHKSGESPTHFKADLISYLMAYNAPSLKEWIDVIHKHDLSETNVYLIGSTPGRFQGSQKDNWGHFRLKKLLKDHASSMPNAESWPVVGQFSSVGSLGADESKWLCSEFKESMLTLGKESKTPGKSSVPLYLIYPSVENVRTSLEGYPAGGSLPYSIQTAEKQNWLHSYFHKWSAETSGRSNAMPHIKTYMRPSPDFSKIAWFLVTSANLSKAAWGALEKNGTQLMIRSYELGVLFLPSAFGLDSFKVKQKFFAGSQEPMATFPVPYDLPPELYGSKDRPWIWNIPYVKAPDTHGNMWVPS

SEQ ID NO: 6264 - protein, 399 aa, Homo sapiens
MKMRFLGLVVCLVLWTLHSEGSGGKLTAVDPETNMNVSEIISYWGFPSEEYLVETEDGYILCLNRIPHGRKNHSDKGPKPVVFLQHGLLADSSNWVTNLANSSLGFILADAGFDVWMGNSRGNTWSRKHKTLSVSQDEFWAFSYDEMAKYDLPASINFILNKTGQEQVYYVGHSQGTTIGFIAFSQIPELAKRIKMFFALGPVASVAFCTSPMAKLGRLPDHLIKDLFGDKEFLPQSAFLKWLGTHVCTHVILKELCGNLCFLLCGFNERNLNMSRVDVYTTHSPAGTSVQNMLHWSQAVKFQKFQAFDWGSSAKNYFHYNQSYPPTYNVKDMLVPTAVWSGGHDWLADVYDVNILLTQITNLVFHESIPEWEHLDFIWGLDAPWRLYNKIINLMRKYQ

SEQ ID NO: 6265 - protein, 423 aa, Homo sapiens
MAAWGCVAALGAARGLCWRAARAAAGLQGRPARRCYAVGPAQSPPTFGFLLDIDGVLVRGHRVIPAALKAFRRLVNSQGQLRVPVVFVTNAGNILQHSKAQELSALLGCEVDADQVILSHSPMKLFSEYHEKRMLVSGQGPVMENAQGLGFRNVVTVDELRMAFPLLDMVDLERRLKTTPLPRNDFPRIEGVLLLGEPVRWETSLQLIMDVLLSNGSPGAGLATPPYPHLPVLASNMDLLWMAEAKMPRFGHGTFLLCLETIYQKVTGKELRYEGLMGKPSILTYQYAEDLIRRQAERRGWAAPIRKLYAVGDNPMSDVYGANLFHQYLQKATHDGAPELGAGGTRQQQPSASQSCISILVCTGVYNPRNPQSTEPVLGGGEPPFHGHRDLCFSPGLMEASHVVNDVNEAVQLVFRKEGWALE

SEQ ID NO: 6266 - protein, 707 aa, Homo sapiens
MTTFKEAMTFKDVAVVFTEEELGLLDLAQRKLYRDVMLENFRNLLSVGHQAFHRDTFHFLREEKIWMMKTAIQREGNSGDKIQTEMETVSEAGTHQEWSFQQIWEKIASDLTRSQDLMINSSQFSKEGDFPCQTEAGLSVIHTRQKSSQGNGYKPSFSDVSHFDFHQQLHSGEKSHTCDECGKNFCYISALRIHQRVHMGEKCYKCDVCGKEFSQSSHLQTHQRVHTGEKPFKCVECGKGFSRRSALNVHHKLHTGEKPYNCEECGKAFIHDSQLQEHQRIHTGEKPFKCDICGKSFCGRSRLNRHSMVHTAEKPFRCDTCDKSFRQRSALNSHRMIHTGEKPYKCEECGKGFICRRDLYTHHMVHTGEKPYNCKECGKSFRWASCLLKHQRVHSGEKPFKCEECGKGFYTNSQCYSHQRSHSGEKPYKCVECGKGYKRRLDLDFHQRVHTGEKLYNCKECGKSFSRAPCLLKHERLHSGEKPFQCEECGKRFTQNSHLHSHQRVHTGEKPYKCEKCGKGYNSKFNLDMHQKVHTGERPYNCKECGKSFGWASCLLKHQRLHSGEKPFKCEECGKRFTQNSQLHSHQRVHTGEKPYKCDECGKGFSWSSTRLTHQRRHSRETPLKCEQHGKNIVQNSFSKVQEKVHSVEKPYKCEDCGKGYNRRLNLDMHQRVHMGEKTWKCRECDMCFSQASSLRLHQNVHVGEKP

SEQ ID NO: 6267 - protein, 338 aa, Homo sapiens
MTTTLVSATIFDLSEVLCKGNKMLNYSAPSAGGCLLDRKAVGTPAGGGFPRRHSVTLPSSKFHQNQLLSSLKGEPAPALSSRDSRFRDRSFSEGGERLLPTQKQPGGGQVNSSRYKTELCRPFEENGACKYGDKCQFAHGIHELRSLTRHPKYKTELCRTFHTIGFCPYGPRCHFIHNAEERRALAGARDLSADRPRLQHSFSFAGFPSAAATAAATGLLDSPTSITPPPILSADDLLGSPTLPDGTNNPFAFSSQELASLFAPSMGLPGGGSPTTFLFRPMSESPHMFDSPPSPQDSLSDQEGYLSSSSSSHSGSDSPTLDNSRRLPIFSRLSISDD

SEQ ID NO: 6268 - protein, 169 aa, Homo sapiens
MVFPLPTPQEPIMATPPKRRAVEATGEKVLRYETFISDVLQRDLRKVLDHRDKVYEQLAKYLQLRNVIERLQEAKHSELYMQVDLGCNFFVDTVVPDTSRIYVALGYGFFLELTLAEALKFIDRKSSLLTELSNSLTKDSMNIKAHIHMLLEGLRELQGLQNFPEKPHH

SEQ ID NO: 6269 - protein, 991 aa, Homo sapiens
MSAVGLVLLVLALRLRATTVKPEEGSFCSNSQVAFRDACYEFVPLGRTFRDAQSWCEGQGGHLVFIQDEGTQWFLQKHISQDREWWIGLTWNLARNGTTEGPGTWLDTSNVTYSNWHGGQAAAAPDTCGHIGRGPSSEWVTSDCAQTFAFMCEFRVGQSLACEGLNATVHCGLGQVIQVQDAVYGRQNPHFCTQDAGRPSDLEQGCSWANVKEEVAGQCQELQSCQVAADETYFGNLCPTQGSYLWVQYQCREALQLMVSSESFIFDNVTISLTWLLSPYIGNLSCIISTGDSHTFDPYNPPSVSSNVTHQFTSPGEFTVFAECTTSEWHVTAQRQVTVRDKMETLSVTACSGLSQSGAGPLCQAVFGDPLWIQVELDGGTGVTYTVLLGDITLAESTTQKGSLPYNLILDRETQKLMGPGRHRLEIQATGNTTTSTISRNITVHLVELLSGLQASWASDHLELGQDLLITISLAQGTPEELTFEVAGLNATFSHEQVSFGEPFGICRLAVPVEGTFLVTMLVRNAFSNLSLEIGNITITAPSGLQEPSGMNAEGKSKDKGDMEVYIQPGPYVDPFTTVTLGWPDNDKELRFQWSCGSCWALWSSCVERQLLRTDQRELVVPASCLPPPDSAVTLRLAVLRGQELENRAEQCLYVSAPWELRPRVSCERNCRPVNASKDILLRVTMGEDSPVAMFSWYLDNTPTEQAEPLLDACRLRGFWPRSLTLLQSNTSTLLLNSSFLQSRGEVIRIRATALTRHAYGEDTYVISTVPPREVPACTIAPEEGTVLTSFAIFCNASTALGPLEFCFCLESGSCLHCGPEPALPSVYLPLGEENNDFVLTVVISATNRAGDTQQTQAMAKVALGDTCVEDVAFQAAVSEKIPTALQGEGGPEQLLQLAKAVSSMLNQEHESQGSGQSLSIDVRQKVREHVLGSLSAVTTGLEDVQRVQELAEVLREVTCRSKELTPSAQGSCMGDSWEGAPPAAHVSHAR

SEQ ID NO: 6270 - protein, 304 aa, Homo sapiens
MGVFCLGPWGLGRKLRTPGKGPLQLLSRLCGDHLQAIPAKKAPAGQEEPGTPPSSPLSAEQLDRIQRNKAAALLRLAARNVPVGFGESWKKHLSGEFGKPYFIKLMGFVAEERKHYTVYPPPHQVFTWTQMCDIKDVKVVILGQDPYHGPNQAHGLCFSVQRPVPPPPSLENIYKELSTDIEDFVHPGHGDLSGWAKQGVLLLNAVLTVRAHQANSHKERGWEQFTDAVVSWLNQNSNGLVFLLWGSYAQKKGSAIDRKRHHVLQTAHPSPLSVYRGFFGCRHFSKTNELLQKSGKKPIDWKEL

SEQ ID NO: 6271 - protein, 399 aa, Homo sapiens
MAHITINQYLQQVYEAIDSRDGASCAELVSFKHPHVANPRLQMASPEEKCQQVLEPPYDEMFAAHLRCTYAVGNHDFIEAYKCQTVIVQSFLRAFQAHKEENWALPVMYAVALDLRVFANNADQQLVKKGKSKVGDMLEKAAELLMSCFRVCASDTRAGIEDSKKWGMLFLVNQLFKIYFKINKLHLCKPLIRAIDSSNLKDDYSTAQRVTYKYYVGRKAMFDSDFKQAEEYLSFAFEHCHRSSQKNKRMILIYLLPVKMLLGHMPTVELLKKYHLMQFAEVTRAVSEGNLLLLHEALAKHEAFFIRCGIFLILEKLKIITYRNLFKKVYLLLKTHQLSLDAFLVALKFMQVEDVDIDEVQCILANLIYMGHVKGYISHQHQKLVVSKQNPFPPLSTVC

SEQ ID NO: 6272 - protein, 994 aa, Homo sapiens
MRPVALLLLPSLLALLAHGLSLEAPTVGKGQAPGIEETDGELTAAPTPEQPERGVHFVTTAPTLKLLNHHPLLEEFLQEGLEKGDEELRPALPFQPDPPAPFTPSPLPRLANQDSRPVFTSPTPAMAAVPTQPQSKEGPWSPESESPMLRITAPLPPGPSMAVPTLGPGEIASTTPPSRAWTPTQEGPGDMGRPWVAEVVSQGAGIGIQGTITSSTASGDDEETTTTTTIITTTITTVQTPGPCSWNFSGPEGSLDSPTDLSSPTDVGLDCFFYISVYPGYGVEIKVQNISLREGETVTVEGLGGPDPLPLANQSFLLRGQVIRSPTHQAALRFQSLPPPAGPGTFHFHYQAYLLSCHFPRRPAYGDVTVTSLHPGGSARFHCATGYQLKGARHLTCLNATQPFWDSKEPVCIGECPGVIRNATTGRIVSPGFPGNYSNNLTCHWLLEAPEGQRLHLHFEKVSLAEDDDRLIIRNGDNVEAPPVYDSYEVEYLPIEGLLSSGKHFFVELSTDSSGAAAGMALRYEAFQQGHCYEPFVKYGNFSSSTPTYPVGTTVEFSCDPGYTLEQGSIIIECVDPHDPQWNETEPACRAVCSGEITDSAGVVLSPNWPEPYGRGQDCIWGVHVEEDKRIMLDIRVLRIGPGDVLTFYDGDDLTARVLGQYSGPRSHFKLFTSMADVTIQFQSDPGTSVLGYQQGFVIHFFEVPRNDTCPELPEIPNGWKSPSQPELVHGTVVTYQCYPGYQVVGSSVLMCQWDLTWSEDLPSCQRVTSCHDPGDVEHSRRLISSPKFPVGATVQYICDQGFVLMGSSILTCHDRQAGSPKWSDRAPKCLLEQLKPCHGLSAPENGARSPEKQLHPAGATIHFSCAPGYVLKGQASIKCVPGHPSHWSDPPPICRAASLDGSTTVAAWMVAKAPAASSTLDAAHIAAAIFLPLVAMVLLVGGVYFYFSRLQGKSSLQLPRPRPRPYNRITIESAFDNPTYETGSLSFAGDERI

SEQ ID NO: 6273 - protein, 291 aa, Homo sapiens
MHPAGLAAAAAGTPRLPSKRRIPVSQPGMADPHQLFDDTSSAQSRGYGAQRAPGGLSYPAASPTPHAAFLADPVSNMAMAYGSSLAAQGKELVDKNIDRFIPITKLKYYFAVDTMYVGRKLGLLFFPYLHQDWEVQYQQDTPVAPRFDVNAPDLYIPAMAFITYVLVAGLALGTQDRFSPDLLGLQASSALAWLTLEVLAILLSLYLVTVNTDLTTIDLVAFLGYKYVGMIGGVLMGLLFGKIGYYLVLGWCCVAIFVFMFPLLPGAVAHACNPSTLGGRGGRITRSGRCG

SEQ ID NO: 6274 - protein, 417 aa, Homo sapiens
MTTQLGPALVLGVALCLGCGQPLPQVPERPFSVLWNVPSAHCEARFGVHLPLNALGIIANRGQHFHGQNMTIFYKNQLGLYPYFGPRGTAHNGGIPQALPLDRHLALAAYQIHHSLRPGFAGPAVLDWEEWCPLWAGNWGRRRAYQAASWAWAQQVFPDLDPQEQLYKAYTGFEQAARALMEDTLRVAQALRPHGLWGFYHYPACGNGWHSMASNYTGRCHAATLARNTQLHWLWAASSALFPSIYLPPRLPPAHHQAFVRHRLEEAFRVALVGHRHPLPVLAYVRLTHRRSGRFLSQDDLVQSIGVSAALGAAGVVLWGDLSLSSSEEECWHLHDYLVDTLGPYVINVTRAAMACSHQRCHGHGRCARRDPGQMEAFLHLWPDGSLGDWKSFSCHCYWGWAGPTCQEPRPGPKEAV

SEQ ID NO: 6275 - protein, 163 aa, Homo sapiens
MTVKTLHGPAMVKYLLLSILGLAFLSEAAARKIPKVGHTFFQKPESCPPVPGGSMKLDIGIINENQRVSMSRNIESRSTSPWNYTVTWDPNRYPSEVVQAQCRNLGCINAQGKEDISMNSVPIQQETLVVRRKHQGCSVSFQLEKVLVTVGCTCVTPVIHHVQ

SEQ ID NO: 6276 - protein, 836 aa, Homo sapiens
MKPSPAGTAKELEPPAPARGEQRTAEPEGRWREKGEADTERQRTRERQEATLAGLAELEYLRQRQELLVRGALRGAGGAGAAAPRAGELLGEAAQRSRLEEKFLEENILLLRKQLNCLRRRDAGLLNQLQELDKQISDLRLDVEKTSEEHLETDSRPSSGFYELSDGASGSLSNSSNSVFSECLSSCHSSTCFCSPLEATLSLSDGCPKSADLIGLLEYKEGHCEDQASGAVCRSLSTPQFNSLDVIADVNPKYQCDLVSKNGNDVYRYPSPLHAVAVQSPMFLLCLTGNPLREEDRLGNHASDICGGSELDAVKTDSSLPSPSSLWSASHPSSSKKMDGYILSLVQKKTHPVRTNKPRTSVNADPTKGLLRNGSVCVRAPGGVSQGNSVNLKNSKQACLPSGGIPSLNNGTFSPPKQWSKESKAEQAESKRVPLPEGCPSGAASDLQSKHLPKTAKPASQEHARCSAIGTGESPKESAQLSGASPKESPSRGPAPPQENKVVQPLKKMSQKNSLQGVPPATPPLLSTAFPVEERPALDFKSEGSSQSLEEAHLVKAQFIPGQQPSVRLHRGHRNMGVVKNSSLKHRGPALQGLENGLPTVREKTRAGSKKCRFPDDLDTNKKLKKASSKGRKSGGGPEAGVPGRPAGGGHRAGSRAHGHGREAVVAKPKHKRTDYRRWKSSAEISYEEALRRARRGRRENVGLYPAPVPLPYASPYAYVASDSEYSAECESLFHSTVVDTSEDEQSNYTTNCFGDSESSVSEGEFVGESTTTSDSEESGGLIWSQFVQTLPIQTVTAPDLHNHPAKTFVKIKASHNLKKKILRFRSGSLKLMTTV

SEQ ID NO: 6277 - protein, 435 aa, Homo sapiens
MSGFLEELLGEKLVTGGGEEVDVHSLGARGISLLGLYFGCSLSAPCAQLSASLAAFYGRLRGDAAAGPGPGAGAGAAAEPEPRRRLEIVFVSSDQDQRQWQDFVRDMPWLALPYKEKHRKLKLWNKYRISNIPSLIFLDATTGKVVCRNGLLVIRDDPEGLEFPWGPKPFREVIAGPLLRNNGQSLESSSLEGSHVGVYFSAHWCPPCRSLTRVLVESYRKIKEAGQNFEIIFVSADRSEESFKQYFSEMPWLAVPYTDEARRSRLNRLYGIQGIPTLIMLDPQGEVITRQGRVEVLNDEDCREFPWHPKPVLELSDSNAAQLNEGPCLVLFVDSEDDGESEAAKQLIQPIAEKIIAKYKAKEEEAPLLFFVAGEDDMTDSLRDYTNLPEAAPLLTILDMSARAKYVMDVEEITPAIVEAFVNDFLAEKLKPEPI

SEQ ID NO: 6278 - protein, 826 aa, Homo sapiens
MWALCSLLRSAAGRTMSQGRTISQAPARRERPRKDPLRHLRTREKRGPSGCSGGPNTVYLQVVAAGSRDSGAALYVFSEFNRYLFNCGEGVQRLMQEHKLKVARLDNIFLTRMHWSNVGGLSGMILTLKETGLPKCVLSGPPQLEKYLEAIKIFSGPLKGIELAVRPHSAPEYEDETMTVYQIPIHSEQRRGKHQPWQSPERPLSRLSPERSSDSESNENEPHLPHGVSQRRGVRDSSLVVAFICKLHLKRGNFLVLKAKEMGLPVGTAAIAPIIAAVKDGKSITHEGREILAEELCTPPDPGAAFVVVECPDESFIQPICENATFQRYQGKADAPVALVVHMAPASVLVDSRYQQWMERFGPDTQHLVLNENCASVHNLRSHKIQTQLNLIHPDIFPLLTSFRCKKEGPTLSVPMVQGECLLKYQLRPRREWQRDAIITCNPEEFIVEALQLPNFQQSVQEYRRSAQDGPAPAEKRSQYPEIIFLGTGSAIPMKIRNVSATLVNISPDTSLLLDCGEGTFGQLCRHYGDQVDRVLGTLAAVFVSHLHADHHTGLPSILLQRERALASLGKPLHPLLVVAPNQLKAWLQQYHNQCQEVLHHISMIPAKCLQEGAEISSPAVERLISSLLRTCDLEEFQTCLVRHCKHAFGCALVHTSGWKVVYSGDTMPCEALVRMGKDATLLIHEATLEDGLEEEAVEKTHSTTSQAISVGMRMNAEFIMLNHFSQRYAKVPLFSPNFSEKVGVAFDHMKVCFGDFPTMPKLIPPLKALFAGDIEEMEERREKRELRQVRAALLSRELAGGLEDGEPQQKRAHTEEPQAKKVRAQ

SEQ ID NO: 6279 - protein, 445 aa, Homo sapiens
MSKLPRELTRDLERSLPAVASLGSSLSHSQSLSSHLLPPPEKRRAISDVRRTFCLFVTFDLLFISLLWIIELNTNTGIRKNLEQEIIQYNFKTSFFDIFVLAFFRFSGLLLGYAVLRLRHWWVIAVTTLVSSAFLIVKVILSELLSKGAFGYLLPIVSFVLAWLETWFLDFKVLPQEAEEERWYLAAQVAVARGPLLFSGALSEGQFYSPPESFAGSDNESDEEVAGKKSFSAQEREYIRQGKEATAVVDQILAQEENWKFEKNNEYGDTVYTIEVPFHGKTFILKTFLPCPAELVYQEVILQPERMVLWNKTVTACQILQRVEDNTLISYDVSAGAAGGVVSPRDFVNVRRIERRRDRYLSSGIATSHSAKPPTHKYVRGENGPGGFIVLKSASNPRVCTFVWILNTDLKGRLPRYLIHQSLAATMFEFAFHLRQRISELGARA

SEQ ID NO: 6280 - protein, 358 aa, Homo sapiens
MAEGERQPPPDSSEEAPPATQNFIIPKKEIHTVPDMGKWKRSQAYADYIGFILTLNEGVKGKKLTFEYRVSEMWNEVHEEKEQAAKQSVSCDECIPLPRAGHCAPSEAIEKLVALLNTLDRWIDETPPVDQPSRFGNKAYRTWYAKLDEEAENLVATVVPTHLAAAVPEVAVYLKESVGNSTRIDYGTGHEAAFAAFLCCLCKIGVLRVDDQIAIVFKVFNRYLEVMRKLQKTYRMEPAGSQGVWGLDDFQFLPFIWGSSQLIDHPYLEPRHFVDEKAVNENHKDYMFLECILFITEMKTGPFAEHSNQLWNISAVPSWSKVNQGLIRMYKAECLEKFPVIQHFKFGSLLPIHPVTSG

SEQ ID NO: 6281 - protein, 983 aa, Homo sapiens
MDCQLSILLLLSCSVLDSFGELIPQPSNEVNLLDSKTIQGELGWISYPSHGWEEISGVDEHYTPIRTYQVCNVMDHSQNNWLRTNWVPRNSAQKIYVELKFTLRDCNSIPLVLGTCKETFNLYYMESDDDHGVKFREHQFTKIDTIAADESFTQMDLGDRILKLNTEIREVGPVNKKGFYLAFQDVGACVALVSVRVYFKKCPFTVKNLAMFPDTVPMDSQSLVEVRGSCVNNSKEEDPPRMYCSTEGEWLVPIGKCSCNAGYEERGFMCQACRPGFYKALDGNMKCAKCPPHSSTQEDGSMNCRCENNYFRADKDPPSMACTRPPSSPRNVISNINETSVILDWSWPLDTGGRKDVTFNIICKKCGWNIKQCEPCSPNVRFLPRQFGLTNTTVTVTDLLAHTNYTFEIDAVNGVSELSSPPRQFAAVSITTNQAAPSPVLTIKKDRTSRNSISLSWQEPEHPNGIILDYEVKYYEKQEQETSYTILRARGTNVTISSLKPDTIYVFQIRARTAAGYGTNSRKFEFETSPDSFSISGESSQVVMIAISAAVAIILLTVVIYVLIGRFCGYKSKHGADEKRLHFGNGHLKLPGLRTYVDPHTYEDPTQAVHEFAKELDATNISIDKVVGAGEFGEVCSGRLKLPSKKEISVAIKTLKVGYTEKQRRDFLGEASIMGQFDHPNIIRLEGVVTKSKPVMIVTEYMENGSLDSFLRKHDAQFTVIQLVGMLRGIASGMKYLSDMGYVHRDLAARNILINSNLVCKVSDFGLSRVLEDDPEAAYTTRGGKIPIRWTSPEAIAYRKFTSASDVWSYGIVLWEVMSYGERPYWEMSNQDVIKAVDEGYRLPPPMDCPAALYQLMLDCWQKDRNNRPKFEQIVSILDKLIRNPGSLKIITSAAARPSNLLLDQSNVDITTFRTTGDWLNGVWTAHCKEIFTGVEYSSCDTIAKISTDDMKKVGVTVVGPQKKIISSIKALETQSKNGPVPV

SEQ ID NO: 6282 - protein, 329 aa, Homo sapiens
MGTAAAAAAAAAAAAAGEGARSPSPAAVSLGLGVAVVSSLVNGSTFVLQKKGIVRAKRRGTSYLTDIVWWAGTIAMAVGQIGNFLAYTAVPTVLVTPLGALGVPFGSILASYLLKEKLNILGKLGCLLSCAGSVVLIIHSPKSESVTTQAELEEKLTNPVFVGYLCIVLLMLLLLIFWIAPAHGPTNIMVYISICSLLGSFTVPSTKGIGLAAQDILHNNPSSQRALCLCLVLLAVLGCSIIVQFRYINKALECFDSSVFGAIYYVVFTTLVLLASAILFREWSNVGLVDFLGMACGFTTVSVGIVLIQVFKEFNFNLGEMNKSNMKTD

SEQ ID NO: 6283 - protein, 334 aa, Homo sapiens
MDNSAQKNERTGKHPRRASEVQKGFTAAYPTQSSIPFKSQASVIPESEKKGFNSQAKRFPHKKNDIPGPGFYNVIHQSPVSNSVSLSKKGTCMFPSMCARLDTIISKYPAANAYTIPSDFISKRDFSNSCSSMFQLPSFMKALKFETPAPNYYNASVSCCKQRNNVCTRAGFMSKTQRGSFAFADKGPPPGHYDINESLVKQSPNTLMSCFKSKTNRGLKLTSTGPGPGYYNPSDCTKVPKKTLFPKNPILNFSAQPSPLPPKPPFPGPGQYEIVDYLGPRKHFISSASFVSNTSRWTAAPPQPGLPGPATYKPELPGKQSFLYNEDKKWIPVL

SEQ ID NO: 6284 - protein, 283 aa, Homo sapiens
MDLWPGAWMLLLLLFLLLLFLLPTLWFCSPSAKYFFKMAFYNGWILFLAVLAIPVCAVRGRNVENMKILRLMLLHIKYLYGIRVEVRGAHHFPPSQPYVVVSNHQSSLDLLGMMEVLPGRCVPIAKRELLWAGSAGLACWLAGVIFIDRKRTGDAISVMSEVAQTLLTQDVRVWVFPEGTRNHNGSMLPFKRGAFHLAVQAQVPIVPIVMSSYQDFYCKKERRFTSGQCQVRVLPPVPTEGLTPDDVPALADRVRHSMLTVFREISTDGRGGGDYLKKPGGGG

SEQ ID NO: 6285 - protein, 344 aa, Homo sapiens
MDFLVLFLFYLASVLMGLVLICVCSKTHSLKGLARGGAQIFSCIIPECLQRAVHGLLHYLFHTRNHTFIVLHLVLQGMVYTEYTWEVFGYCQELELSLHYLLLPYLLLGVNLFFFTLTCGTNPGIITKANELLFLHVYEFDEVMFPKNVRCSTCDLRKPARSKHCSVCNWCVHRFDHHCVWVNNCIGAWNIRYFLIYVLTLTASAATVAIVSTTFLVHLVVMSDLYQETYIDDLGHLHVMDTVFLIQYLFLTFPRIVFMLGFVVVLSFLLGGYLLFVLYLAATNQTTNEWYRGDWAWCQRCPLVAWPPSAEPQVHRNIHSHGLRSNLQEIFLPAFPCHERKKQE

SEQ ID NO: 6286 - protein, 256 aa, Homo sapiens
MATQRKHLVKDFNPYITCYICKGYLIKPTTVTECLHTFCKTCIVQHFEDSNDCPRCGNQVHETNPLEMLRLDNTLEEIIFKLVPGLREQELERESEFWKKNKPQENGQDDTSKADKPKVDEEGDENEDDKDYHRSDPQIAICLDCLRNNGQSGDNVVKGLMKKFIRCSTRVTVGTIKKFLSLKLKLPSSYELDVLCNGEIMGKDHTMEFIYMTRWRLRGENFRCLNCSASQVCSQDGPLYQSYPMVLQYRPRIDFG

SEQ ID NO: 6287 - protein, 770 aa, Homo sapiens
MSKCRKTPVQQLASPASFSPDILADIFELFAKNFSYGKPLNNEWQLPDPSEIFTCDHTELNAFLDLKNSLNEVKNLLSDKKLDEWHEHTAFTNKAGKIISHVRKSVNAELCTQAWCKFHEILCSFPLIPQEAFQNGKLNSLHLCEAPGAFIASLNHYLKSHRFPCHWSWVANTLNPYHEANDDLMMIMDDRLIANTLHWWYFGPDNTGDIMTLKFLTGLQNFISSMATVHLVTADGSFDCQGNPGEQEALVSSLHYCEVVTALTTLGNGGSFVLKMFTMFEHCSINLMYLLNCCFDQVHVFKPATSKAGNSEVYVVCLHYKGREAIHPLLSKMTLNFGTEMKRKALFPHHVIPDSFLKRHEECCVFFHKYQLETISENIRLFECMGKAEQEKLNNLRDCAIQYFMQKFQLKHLSRNNWLVKKSSIGCSTNTKWFGQRNKYFKTYNERKMLEALSWKDKVAKGYFNSWAEEHGVYHPGQSSILEGTASNLECHLWHILEGKKLPKVKCSPFCNGEILKTLNEAIEKSLGGAFNLDSKFRPKQQYSCSCHVFSEELIFSELCSLTECLQDEQVVVPSNQIKCLLVGFSTLRNIKMHIPLEVRLLESAELTTFSCSLLHDGDPTYQRLFLDCLLHSLRELHTGDVMILPVLSCFTRFMAGLIFVLHSCFRFITFVCPTSSDPLRTCAVLLCVGYQDLPNPVFRYLQSVNELLSTLLNSDSPQQVLQFVPMEVLLKGALLDFLWDLNAAIAKRHLHFIIQREREEIINSLQLQN

SEQ ID NO: 6288 - protein, 236 aa, Homo sapiens
MTRCPAGQAEVEMAELYVKPGNKERGWNDPPQFSYGLQTQAGGPRRSLLTKRVAAPQDGSPRVPASETSPGPPPMGPPPPSSKAPRSPPVGSGPASGVEPTSFPVESEAVMEDVLRPLEQALEDCRGHTRKQVCDDISRRLALLQEQWAGGKLSIPVKKRMALLVQELSSHRWDAADDIHRSLMVDHVTEVSQWMVGVKRLIAEKRSLFSEEAANEEKSAATAEKNHTIPGFQQAS

SEQ ID NO: 6289 - protein, 545 aa, Homo sapiens
MNLTEGPLAMAEMDPTQGRVVFEDVAIYFSQEEWGHLDEAQRLLYRDVMLENLALLSSLGSWHGAEDEEAPSQQGFSVGVSEVTASKPCLSSQKVHPSETCGPPLKDILCLVEHNGIHPEQHIYICEAELFQHPKQQIGENLSRGDDWIPSFGKNHRVHMAEEIFTCMEGWKDLPATSCLLQHQGPQSEWKPYRDTEDREAFQTGQNDYKCSECGKTFTCSYSFVEHQKIHTGERSYECNKCGKFFKYSANFMKHQTVHTSERTYECRECGKSFMYNYRLMRHKRVHTGERPYECNTCGKFFRYSSTFVRHQRVHTGERPYECRECGKFFMDSSTLIKHQRVHTGERPYKCNDCGKFFRYISTLIRHQRIHTGERPYECSVCGELFRYNSSLVKHWRNHTGERPYKCSECGKSFRYHCRLIRHQRVHTGERPYECSECGKFFRYNSNLIKHWRNHTGERPYECRECGKAFSHKHILVEHQKIHSGERPYECSECQKAFIRKSHLVHHQKIHSEERLVCSMNVGNSLAKTPTSLNIRDFTMEKVYH

SEQ ID NO: 6290 - protein, 491 aa, Homo sapiens
MAGQGLPLHVATLLTGLLECLGFAGVLFGWPSLVFVFKNEDYFKDLCGPDAGPIGNATGQADCKAQDERFSLIFTLGSFMNNFMTFPTGYIFDRFKTTVARLIAIFFYTTATLIIAFTSAGSAVLLFLAMPMLTIGGILFLITNLQIGNLFGQHRSTIITLYNGAFDSSSAVFLIIKLLYEKGISLRASFIFISVCSTWHVARTFLLMPRGHIPYPLPPNYSYGLCPGNGTTKEEKETAEHENRELQSKEFLSAKEETPGAGQKQELRSFWSYAFSRRFAWHLVWLSVIQLWHYLFIGTLNSLLTNMAGGDMARVSTYTNAFAFTQFGVLCAPWNGLLMDRLKQKYQKEARKTGSSTLAVALCSTVPSLALTSLLCLGFALCASVPILPLQYLTFILQVISRSFLYGSNAAFLTLAFPSEHFGKLFGLVMALSAVVSLLQFPIFTLIKGSLQNDPFYVNVMFMLAILLTFFHPFLVYRECRTWKESPSAIA

SEQ ID NO: 6291 - protein, 562 aa, Homo sapiens
MNPLFGPNLFLLQQEQQGLAGPLGDSLGGDHFAGGGDLPPAPLSPAGPAAYSPPGPGPAPPAAMALRNDLGSNINVLKTLNLRFRCFLAKVHELERRNRLLEKQLQQALEEGKQGRRGLGRRDQAVQTGFVSPIRPLGLQLGARPAAVCSPSARVLGSPARSPAGPLAPSAASLSSSSTSTSTTYSSSARFMPGTIWSFSHARRLGPGLEPTLVQGPGLSWVHPDGVGVQIDTITPEIRALYNVLAKVKRERDEYKRRWEEEYTVRIQLQDRVNELQEEAQEADACQEELALKVEQLKAELVVFKGLMSNNLSELDTKIQEKAMKVDMDICRRIDITAKLCDVAQQRNCEDMIQMFQKKLVPSMGGRKRERKAAVEEDTSLSESEGPRQPDGDEEESTALSINEEMQRMLNQLREYDFEDDCDSLTWEETEETLLLWEDFSGYAMAAAEAQGEQEDSLEKVIKDTESLFKTREKEYQETIDQIELELATAKNDMNRHLHEYMEMCSMKRGLDVQMETCRRLITQSGDRKSPAFTAVPLSDPPPPPSEAEDSDRDVSSDSSMR

SEQ ID NO: 6292 - protein, 1181 aa, Homo sapiens
MKLKEVDRTAMQAWSPAQNHPIYLATGTSAQQLDATFSTNASLEIFELDLSDPSLDMKSCATFSSSHRYHKLIWGPYKMDSKGDVSGVLIAGGENGNIILYDPSKIIAGDKEVVIAQNDKHTGPVRALDVNIFQTNLVASGANESEIYIWDLNNFATPMTPGAKTQPPEDISCIAWNRQVQHILASASPSGRATVWDLRKNEPIIKVSDHSNRMHCSGLAWHPDVATQMVLASEDDRLPVIQMWDLRFASSPLRVLENHARGILAIAWSMADPELLLSCGKDAKILCSNPNTGEVLYELPTNTQWCFDIQWCPRNPAVLSAASFDGRISVYSIMGGSTDGLRQKQVDKLSSSFGNLDPFGTGQPLPPLQIPQQTAQHSIVLPLKKPPKWIRRPVGASFSFGGKLVTFENVRMPSHQGAEQQQQQHHVFISQVVTEKEFLSRSDQLQQAVQSQGFINYCQKKIDASQTEFEKNVWSFLKVNFEDDSRGKYLELLGYRKEDLGKKHIKEEKEESEFLPSSGGTFNISVSGDIDGLITQALLTGNFESAVDLCLHDNRMADAIILAIAGGQELLARTQKKYFAKSQSKITRLITAVVMKNWKEIVESCDLKNWREALAAVLTYAKPDEFSALCDLLGTRLENEGDSLLQTQACLCYICAGNVEKLVACWTKAQDGSHPLSLQDLIEKVVILRKAVQLTQAMDTSTVGVLLAAKMSQYANLLAAQGSIAAALAFLPDNTNQPNIMQLRDRLCRAQGEPVAGHESPKIPYEKQQLPKGRPGPVAGHHQMPRVQTQQYYPHGENPPPPGFIMHGNVNPNAAGQLPTSPGHMHTQVPPYPQPQPYQPAQPYPFGTGGSAMYRPQQPVAPPTSNAYPNTPYISSASSYTGQSQLYAAQHQASSPTSSPATSFPPPPSSGASFQHGGPGAPPSSSAYALPPGTTGTLPAASELPASQRTGPQNGWNDPPALNRVPKKKKMPENFMPPVPITSPIMNPLGDPQSQMLQQQPSAPVPLSSQSSFPQPHLPGGQPFHGVQQPLGQTGMPPSFSKPNIEGAPGAPIGNTFQHVQSLPTKKITKKPIPDEHLILKTTFEDLIQRCLSSATDPQTKRKLDDASKRLEFLYDKLREQTLSPTITSGLHNIARSIETRNYSEGLTMHTHIVSTSNFSETSAFMPVLKVVLTQANKLGV

SEQ ID NO: 6293 - protein, 360 aa, Homo sapiens
MSQGRGKYDFYIGLGLAMSSSIFIGGSFILKKKGLLRLARKGSMRAGQGGHAYLKEWLWWAGLLSMGAGEVANFAAYAFAPATLVTPLGALSVLVSAILSSYFLNERLNLHGKIGCLLSILGSTVMVIHAPKEEEIETLNEMSHKLGDPGFVVFATLVVIVALILIFVVGPRHGQTNILVYITICSVIGAFSVSCVKGLGIAIKELFAGKPVLRHPLAWILLLSLIVCVSTQINYLNRALDIFNTSIVTPIYYVFFTTSVLTCSAILFKEWQDMPVDDVIGTLSGFFTIIVGIFLLHAFKDVSFSLASLPVSFRKDEKAMNGNLSNMYEVLNNNEESLTCGIEQHTGENVSRRNGNLTAF

SEQ ID NO: 6294 - protein, 210 aa, Homo sapiens
MATETVELHKLKLAELKQECLARGLETKGIKQDLIHRLQAYLEEHAEEEANEEDVLGDETEEEETKPIELPVKEEEPPEKTVDVAAEKKVVKITSEIPQTERMQKRAERFNVPVSLESKKAARAARFGISSVPTKGLSSDNKPMVNLDKLKERAQRFGLNVSSISRKSEDDEKLKKRKERFGIVTSSAGTGTTEDTEAKKRKRAERFGIA

SEQ ID NO: 6295 - protein, 143 aa, Homo sapiens
MATATEQWVLVEMVQALYEAPAYHLILEGILILWIIRLLFSKTYKLQERSDLTVKEKEELIEEWQPEPLVPPVPKDHPALNYNIVSGPPSHKTVVNGKECINFASFNFLGLLDNPRVKAAALASLKKYGVGTCGPRGFYGTFE

SEQ ID NO: 6296 - protein, 467 aa, Homo sapiens
MSSAPTTPPSVDKVDGFSRKSVRKARQKRSQSSSQFRSQGKPIELTPLPLLKDVPSSEQPELFLKKLQQCCVIFDFMDTLSDLKMKEYKRSTLNELVDYITISRGCLTEQTYPEVVRMVSCNIFRTLPPSDSNEFDPEEDEPTLEASWPHLQLVYEFFIRFLESQEFQPSIAKKYIDQKFVLQLLELFDSEDPRERDYLKTVLHRIYGKFLGLRAFIRKQINNIFLRFVYETEHFNGVAELLEILGSIINGFALPLKAEHKQFLVKVLIPLHTVRSLSLFHAQLAYCIVQFLEKDPSLTEPVIRGLMKFWPKTCSQKEVMFLGELEEILDVIEPSQFVKIQEPLFKQIAKCVSSPHFQVAERALYYWNNEYIMSLIEENSNVILPIMFSSLYRISKEHWNPAIVALVYNVLKAFMEMNSTMFDELTATYKSDRQREKKKEKEREELWKKLEDLELKRGLRRDGIIPT

SEQ ID NO: 6297 - protein, 669 aa, Homo sapiens
MVSWGRFICLVVVTMATLSLARPSFSLVEDTTLEPEDAISSGDDEDDTDGAEDFVSENSNNKRAPYWTNTEKMEKRLHAVPAANTVKFRCPAGGNPMPTMRWLKNGKEFKQEHRIGGYKVRNQHWSLIMESVVPSDKGNYTCVVENEYGSINHTYHLDVVERSPHRPILQAGLPANASTVVGGDVEFVCKVYSDAQPHIQWIKHVEKNGSKYGPDGLPYLKVLKAAGVNTTDKEIEVLYIRNVTFEDAGEYTCLAGNSIGISFHSAWLTVLPAPGREKEITASPDYLEIAIYCIGVFLIACMVVTVILCRMKNTTKKPDFSSQPAVHKLTKRIPLRRQVSAESSSSMNSNTPLVRITTRLSSTADTPMLAGVSEYELPEDPKWEFPRDKLTLGKPLGEGCFGQVVMAEAVGIDKDKPKEAVTVAVKMLKDDATEKDLSDLVSEMEMMKMIGKHKNIINLLGACTQDGPLYVIVEYASKGNLREYLRARRPPGMEYSYDINRVPEEQMTFKDLVSCTYQLARGMEYLASQKCIHRDLAARNVLVTENNVMKIADFGLARDINNIDYYKKTTNGRLPVKWMAPEALFDRVYTHQSDVWSFGVLMWEIFTLGGSPYPGIPVEELFKLLKEGHRMDKPANCTNELYMMMRDCWHAVPSQRPTFKQLVEDLDRI

SEQ ID NO: 6298 - protein, 213 aa, Homo sapiens
MAITQFRLFKFCTCLATVFSFLKRLICRSGRGRKLSGDQITLPTTVDYSSVPKQTDVEEWTSWDEDAPTSVKIEGGNGNVATQQNSLEQLEPDYFKDMTPTIRKTQKIVIKKREPLNFGIPDGSTGFSSRLAATQDLPFIHQSSELGDLDTWQENTNAWEEEEDAAWQAEEVLRQQKLADREKRAAEQQRKKMEKEAQRLMKKEQNKIGVKLS

SEQ ID NO: 6299 - protein, 399 aa, Homo sapiens
MAERRRHKKRIQEVGEPSKEEKAVAKYLRFNCPTKSTNMMGHRVDYFIASKAVDCLLDSKWAKAKKGEEALFTTRESVVDYCNRLLKKQFFHRALKVMKMKYDKDIKKEKDKGKAESGKEEDKKSKKENIKDEKTKKEKEKKKDGEKEESKKEETPGTPKKKETKKKFKLEPHDDQVFLDGNEVYVWIYDPVHFKTFVMGLILVIAVIAATLFPLWPAEMRVGVYYLSVGAGCFVASILLLAVARCILFLIIWLITGGRHHFWFLPNLTADVGFIDSFRPLYTHEYKGPKADLKKDEKSETKKQQKSDSEEKSDSEKKEDEEGKVGPGNHGTEGSGGERHSDTDSDRREDDRSQHSSGNGNDFEMITKEELEQQTDGDCEEDEEEENDGETPKSSHEKS

SEQ ID NO: 6300 - protein, 710 aa, Homo sapiens
MDLPALLPAPTARGGQHGGGPGPLRRAPAPLGASPARRRLLLVRGPEDGGPGARPGEASGPSPPPAEDDSDGDSFLVLLEVPHGGAAAEAAGSQEAEPGSRVNLASRPEQGPSGPAAPPGPGVAPAGAVTISSQDLLVRLDRGVLALSAPPGPATAGAAAPRRAPQASGPSTPGYRCPEPQCALAFAKKHQLKVHLLTHGGGQGRRPFKCPLEGCGWAFTTSYKLKRHLQSHDKLRPFGCPVGGCGKKFTTVYNLKAHMKGHEQESLFKCEVCAERFPTHAKLSSHQRSHFEPERPYKCDFPGCEKTFITVSALFSHNRAHFREQELFSCSFPGCSKQYDKACRLKIHLRSHTGERPFICDSDSCGWTFTSMSKLLRHRRKHDDDRRFTCPVEGCGKSFTRAEHLKGHSITHLGTKPFECPVEGCCARFSARSSLYIHSKKHVQDVGAPKSRCPVSTCNRLFTSKHSMKAHMVRQHSRRQDLLPQLEAPSSLTPSSELSSPGQSELTNMDLAALFSDTPANASGSAGGSDEALNSGILTIDVTSVSSSLGGNLPANNSSLGPMEPLVLVAHSDIPPSLDSPLVLGTAATVLQQGSFSVDDVQTVSAGALGCLVALPMKNLSDDPLALTSNSNLAAHITTPTSSSTPRENASVPELLAPIKVEPDSPSRPGAVGQQEGSHGLPQSTLPSPAEQHGAQDTELSAGTGNFYLV

SEQ ID NO: 6301 - protein, 504 aa, Homo sapiens
MFPREKTWNISFAGCGFLGVYYVGVASCLREHAPFLVANATHIYGASAGALTATALVTGVCLGEAGAKFIEVSKEARKRFLGPLHPSFNLVKIIRSFLLKVLPADSHEHASGRLGISLTRVSDGENVIISHFNSKDELIQANVCSGFIPVYCGLIPPSLQGVRYVDGGISDNLPLYELKNTITVSPFSGESDICPQDSSTNIHELRVTNTSIQFNLRNLYRLSKALFPPEPLVLREMCKQGYRDGLRFLQRNGLLNRPNPLLALPPARPHGPEDKDQAVESAQAEDYSQLPGEDHILEHLPARLNEALLEACVEPTDLLTTLSNMLPVRLATAMMVPYTLPLESALSFTIRLLEWLPDVPEDIRWMKEQTGSICQYLVMRAKRKLGRHLPSRLPEQVELRRVQSLPSVPLSCAAYREALPGWMRNNLSLGDALAKWEECQRQLLLGLFCTNVAFPPEALRMRAPADPAPAPADPASPQHQLAGPAPLLSTPAPEARPVIGALGL

SEQ ID NO: 6302 - protein, 380 aa, Homo sapiens
MEQRPRGCAAVAAALLLVLLGARAQGGTRSPRCDCAGDFHKKIGLFCCRGCPAGHYLKAPCTEPCGNSTCLVCPQDTFLAWENHHNSECARCQACDEQASQVALENCSAVADTRCGCKPGWFVECQVSQCVSSSPFYCQPCLDCGALHRHTRLLCSRRDTDCGTCLPGFYEHGDGCVSCPTSTLGSCPERCAAVCGWRQNEAGMEALTPPPATHLSPLDSAHTLLAPPDSSEKICTVQLVGNSWTPGYPETQEALCPQVTWSWDQLPSRALGPAAAPTLSPESPAGSPAMMLQPGPQLYDVMDAVPARRWKEFVRTLGLREAEIEAVEVEIGRFRDQQYEMLKRWRQQQPAGLGAVYAALERMGLDGCVEDLRSRLQRGP

SEQ ID NO: 6303 - protein, 186 aa, Homo sapiens
MGLLDRLSVLLGLKKKEVHVLCLGLDNSGKTTIINKLKPSNAQSQNILPTIGFSIEKFKSSSLSFTVFDMSGQGRYRNLWEHYYKEGQAIIFVIDSSDRLRMVVAKEELDTLLNHPDIKHRRIPILFFANKMDLRDAVTSVKVSQLLCLENIKDKPWHICASDAIKGEGLQEGVDWLQDQIQTVKT

SEQ ID NO: 6304 - protein, 293 aa, Homo sapiens
MATARPPWMWVLCALITALLLGVTEHVLANNDVSCDHPSNTVPSGSNQDLGAGAGEDARSDDSSSRIINGSDCDMHTQPWQAALLLRPNQLYCGAVLVHPQWLLTAAHCRKKVFRVRLGHYSLSPVYESGQQMFQGVKSIPHPGYSHPGHSNDLMLIKLNRRIRPTKDVRPINVSSHCPSAGTKCLVSGWGTTKSPQVHFPKVLQCLNISVLSQKRCEDAYPRQIDDTMFCAGDKAGRDSCQGDSGGPVVCNGSLQGLVSWGDYPCARPNRPGVYTNLCKFTKWIQETIQANS

SEQ ID NO: 6305 - protein, 903 aa, Homo sapiens
MAIQFRSLFPLALPGMLALLGWWWFFSRKKGHVSSHDEQQVEAGAVQLRADPAIKEPLPVEDVCPKVVSTPPSVTEPPEKELSTVSKLPAEPPALLQTHPPCRRSESSGILPNTTDMRLRPGTRRDDSTKLELALTGGEAKSIPLECPLSSPKGVLFSSKSAEVCKQDSPFSRVPRKVQPGYPVVPAEKRSSGERARETGGAEGTGDAVLGEKVLEEALLSREHVLELENSKGPSLASLEGEEDKGKSSSSQVVGPVQEEEYVAEKLPSRFIESAHTELAKDDAAPAPPVADAKAQDRGVEGELGNEESLDRNEEGLDRNEEGLDRNEESLDRNEEGLDRNEEIKRAAFQIISQVISEATEQVLATTVGKVAGRVCQASQLQGQKEESCVPVHQKTVLGPDTAEPATAEAAVAPPDAGLPLPGLPAEGSPPPKTYVSCLKSLLSSPTKDSKPNISAHHISLASCLALTTPSEELPDRAGILVEDATCVTCMSDSSQSVPLVASPGHCSDSFSTSGLEDSCTETSSSPRDKAITPPLPESTVPFSNGVLKGELSDLGAEDGWTMDAEADHSGGSDRNSMDSVDSCCSLKKTESFQNAQAGSNPKKVDLIIWEIEVPKHLVGRLIGKQGRYVSFLKQTSGAKIYISTLPYTQSVQICHIEGSQHHVDKALNLIGKKFKELNLTNIYAPPLPSLALPSLPMTSWLMLPDGITVEVIVVNQVNAGHLFVQQHTHPTFHALRSLDQQMYLCYSQPGIPTLPTPVEITVICAAPGADGAWWRAQVVASYEETNEVEIRYVDYGGYKRVKVDVLRQIRSDFVTLPFQGAEVLLDSVMPLSDDDQFSPEADAAMSEMTGNTALLAQVTSYSPTGLPLIQLWSVVGDEVVLINRSLVERGLAQWVDSYYTSL

SEQ ID NO: 6306 - protein, 396 aa, Homo sapiens
MDPRGTKRGAEKTEVAEPRNKLPRPAPSLPTDPALYSGPFPFYRRPSELGCFSLDAQRQYHGDARALRYYSPPPTNGPGPNFDLRDGYPDRYQPRDEEVQERLDHLLCWLLEHRGRLEGGPGWLAEAIVTWRGHLTKLLTTPYERQEGWQLAASRFQGTLYLSEVETPNARAQRLARPPLLRELMYMGYKFEQYMCADKPGSSPDPSGEVNTNVAFCSVLRSRLGSHPLLFSGEVDCTDPQAPSTQPPTCYVELKTSKEMHSPGQWRSFYRHKLLKWWAQSFLPGVPNVVAGFRNPDGFVSSLKTFPTMKMFEYVRNDRDGWNPSVCMNFCAAFLSFAQSTVVQDDPRLVHLFSWEPGGPVTVSVHQDAPYAFLPIWYVEAMTQDLPSPPKTPSPK

SEQ ID NO: 6307 - protein, 221 aa, Homo sapiens
MSDGDYDYLIKFLALGDSGVGKTSVLYQYTDGKFNSKFITTVGIDFREKRVVYRASGPDGATGRGQRIHLQLWDTAGQERFRSLTTAFFRDAMGFLLLFDLTNEQSFLNVRNWISQLQMHAYCENPDIVLCGNKSDLEDQRVVKEEEAIALAEKYGIPYFETSAANGTNISQAIEMLLDLIMKRMERCVDKSWIPEGVVRSNGHASTDQLSEEKEKGACGC

SEQ ID NO: 6308 - protein, 231 aa, Homo sapiens
MAGKKVLIVYAHQEPKSFNGSLKNVAVDELSRQGCTVTVSDLYAMNLEPRATDKDITGTLSNPEVFNYGVETHEAYKQRSLASDITDEQKKVREADLVIFQFPLYWFSVPAILKGWMDRVLCQGFAFDIPGFYDSGLLQGKLALLSVTTGGTAEMYTKTGVNGDSRYFLWPLQHGTLHFCGFKVLAPQISFAPEIASEEERKGMVAAWSQRLQTIWKEEPIPCTAHWHFGQ

SEQ ID NO: 6309 - protein, 562 aa, Homo sapiens
MRLRLRLLALLLLLLAPPARAPKPSAQDVSLGVDWLTRYGYLPPPHPAQAQLQSPEKLRDAIKVMQRFAGLPETGRMDPGTVATMRKPRCSLPDVLGVAGLVRRRRRYALSGSVWKKRTLTWRVRSFPQSSQLSQETVRVLMSYALMAWGMESGLTFHEVDSPQGQEPDILIDFARAFHQDSYPFDGLGGTLAHAFFPGEHPISGDTHFDDEETWTFGSKDGEGTDLFAVAVHEFGHALGLGHSSAPNSIMRPFYQGPVGDPDKYRLSQDDRDGLQQLYGKAPQTPYDKPTRKPLAPPPQPPASPTHSPSFPIPDRCEGNFDAIANIRGETFFFKGPWFWRLQPSGQLVSPRPARLHRFWEGLPAQVRVVQAAYARHRDGRILLFSGPQFWVFQDRQLEGGARPLTELGLPPGEEVDAVFSWPQNGKTYLVRGRQYWRYDEAAARPDPGYPRDLSLWEGAPPSPDDVTVSNAGDTYFFKGAHYWRFPKNSIKTEPDAPQPMGPNWLDCPAPSSGPRAPRPPKATPVSETCDCQCELNQAAGRWPAPIPLLLLPLLVGGVASR

SEQ ID NO: 6310 - protein, 242 aa, Homo sapiens
MGPRARPALLLLMLLQTAVLQGRLLRSHSLHYLFMGASEQDLGLSLFEALGYVDDQLFVFYDHESRRVEPRTPWVSSRISSQMWLQLSQSLKGWDHMFTVDFWTIMENHNHSKVTTLRCRALNYYPQNITMKWLKDKQPMDAKEFEPKDVLPNGDGTYQGWITLAVPPGEEQRYTCQVEHPGLDQPLIVIWEPSPSGTLVIGVISGIAVFVVILFIGILFIILRKRQGSRGAMGHYVLAERE

SEQ ID NO: 6311 - protein, 543 aa, Homo sapiens
MMFGGYETIEAYEDDLYRDESSSELSVDSEVEFQLYSQIHYAQDLDDVIREEEHEEKNSGNSESSSSKPNQKKLIVLSDSEVIQLSDGSEVITLSDEDSIYRCKGKNVRVQAQENAHGLSSSLQSNELVDKKCKSDIEKPKSEERSGVIREVMIIEVSSSEEEESTISEGDNVESWMLLGCEVDDKDDDILLNLVGCENSVTEGEDGINWSISDKDIEAQIANNRTPGRWTQRYYSANKNIICRNCDKRGHLSKNCPLPRKVRRCFLCSRRGHLLYSCPAPLCEYCPVPKMLDHSCLFRHSWDKQCDRCHMLGHYTDACTEIWRQYHLTTKPGPPKKPKTPSRPSALAYCYHCAQKGHYGHECPEREVYDPSPVSPFICYYDDKYEIQEREKRLKQKIKVLKKNGVIPEPSKLPYIKAANENPHHDIRKGRASWKSNRWPQENKETQKEMKNKNRNWEKHRKADRHREVDEDFPRGPKTYSSPGSFKTQKPSKPFHRSSHYHTSREDKSPKEGKRGKQKKKERCWEDDDNDNLFLIKQRKKKS

SEQ ID NO: 6312 - protein, 170 aa, Homo sapiens
MEDPNPEENMKQQDSPKERSPQSPGGNICHLGAPKCTRCLITFADSKFQERHMKREHPADFVAQKLQGVLFICFTCARSFPSSKALITHQRSHGPAAKPTLPVATTTAQPTFPCPDCGKTFGQAVSLRRHRQMHEVRAPPGTFACTECGQDFAQEAGLHQHYIRHARGEL

SEQ ID NO: 6313 - protein, 522 aa, Homo sapiens
MSLLNCENSCGSSQSESDCCVAMASSCSAVTKDDSVGGTASTGNLSSSFMEEIQGYDVEFDPPLESKYECPICLMALREAVQTPCGHRFCKACIIKSIRDAGHKCPVDNEILLENQLFPDNFAKREILSLMVKCPNEGCLHKMELRHLEDHQAHCEFALMDCPQCQRPFQKFHINIHILKDCPRRQVSCDNCAASMAFEDKEIHDQNCPLANVICEYCNTILIREQMPNHYDLDCPTAPIPCTFSTFGCHEKMQRNHLARHLQENTQSHMRMLAQAVHSLSVIPDSGYISEVRNFQETIHQLEGRLVRQDHQIRELTAKMETQSMYVSELKRTIRTLEDKVAEIEAQQCNGIYIWKIGNFGMHLKCQEEEKPVVIHSPGFYTGKPGYKLCMRLHLQLPTAQRCANYISLFVHTMQGEYDSHLPWPFQGTIRLTILDQSEAPVRQNHEEIMDAKPELLAFQRPTIPRNPKGFGYVTFMHLEALRQRTFIKDDTLLVRCEVSTRFDMGSLRREGFQPRSTDAGV

SEQ ID NO: 6314 - protein, 209 aa, Homo sapiens
MELNSLLILLEAAEYLERRDREAEHGYASVLPFDGDFAREKTKAAGLVRKAPNNRSSHNELEKHRRAKLRLYLEQLKQLVPLGPDSTRHTTLSLLKRAKVHIKKLEEQDRRALSIKEQLQQEHRFLKRRLEQLSVQSVERVRTDSTGSAVSTDDSEQEVDIEGMEFGPGELDSVGSSSDADDHYSLQSGTGGDSGFGPHCRRLGRPALS

SEQ ID NO: 6315 - protein, 534 aa, Homo sapiens
MALIPDLAMETWLLLAVSLVLLYLYGTHSHGLFKKLGIPGPTPLPFLGNILSYHKGFCMFDMECHKKYGKVWGFYDGQQPVLAITDPDMIKTVLVKECYSVFTNRRPFGPVGFMKSAISIAEDEEWKRLRSLLSPTFTSGKLKEMVPIIAQYGDVLVRNLRREAETGKPVTLKDVFGAYSMDVITSTSFGVNIDSLNNPQDPFVENTKKLLRFDFLDPFFLSITVFPFLIPILEVLNICVFPREVTNFLRKSVKRMKESRLEDTQKHRVDFLQLMIDSQNSKETESHKALSDLELVAQSIIFIFAGYETTSSVLSFIMYELATHPDVQQKLQEEIDAVLPNKAPPTYDTVLQMEYLDMVVNETLRLFPIAMRLERVCKKDVEINGMFIPKGVVVMIPSYALHRDPKYWTEPEKFLPERLEKRKLQSSTIPTTYDEGHQLCPYGSSVSKIFSKKNKDNIDPYIYTPFGSGPRNCIGMRFALMNMKLALIRVLQNFSFKPCKETQIPLKLSLGGLLQPEKPVVLKVESRDGTVSGA

SEQ ID NO: 6316 - protein, 605 aa, Homo sapiens
MVRHQPLQYYEPQLCLSCLTGIYGCRWKRYQRSHDDTTPWERLWFLLLTFTFGLTLTWLYFWWEVHNDYDEFNWYLYNRMGYWSDWPVPILVTTAAAFAYIAGLLVLALCHIAVGQQMNLHWLHKIGLVVILASTVVAMSAVAQLWEDEWEVLLISLQGTAPFLHVGAVAAVTMLSWIVAGQFARAERTSSQVTILCTFFTVVFALYLAPLTISSPCIMEKKDLGPKPALIGHRGAPMLAPEHTLMSFRKALEQKLYGLQADITISLDGVPFLMHDTTLRRTTNVEEEFPELARRPASMLNWTTLQRLNAGQWFLKTDPFWTASSLSPSDHREAQNQSICSLAELLELAKGNATLLLNLRDPPREHPYRSSFINVTLEAVLHSGFPQHQVMWLPSRQRPLVRKVAPGFQQTSGSKEAVASLRRGHIQRLNLRYTQVSRQELRDYASWNLSVNLYTVNAPWLFSLLWCAGVPSVTSDNSHALSQVPSPLWIMPPDEYCLMWVTADLVSFTLIVGIFVLQKWRLGGIRSYNPEQIMLSAAVRRTSRDVSIMKEKLIFSEISDGVEVSDVLSVCSDNSYDTYANSTATPVGPRGGGSHTKTLIERSGR

SEQ ID NO: 6317 - protein, 685 aa, Homo sapiens
MDFREILMIASKGQGVNNVPKRYSLAVGPPKKDPKVKGVQSAAVQAFLKRKEEELRRKALEEKRRKEELVKKRIELKHDKKARAMAKRTKDNFHGYNGIPIEEKSKKRQATESHTSQGTDREYEMEEENEFLEYNHAESEQEYEEEQEPPKVESKPKVPLKSAPPPMNFTDLLRLAEKKQFEPVEIKVVKKSEERPMTAEELREREFLERKHRRKKLETDGKLPPTVSKKAPSQKESVGTKLSKGSGDRHPSSKGMPLPHAEKKSRPSMANEKHLALSSSKSMPGERIKAGSGNSSQPSLREGHDKPVFNGAGKPHSSTSSPSVPKTSASRTQKSAVEHKAKKSLSHPSHSRPGPMVTPHNKAKSPGVRQPGSSSSSAPGQPSTGVARPTVSSGPVPRRQNGSSSSGPERSISGSKKPTNDSNPSRRTVSGTCGPGQPASSSGGPGRPISGSVSSARPLGSSRGPGRPVSSPHELRRPVSGLGPPGRSVSGPGRSISGSIPAGRTVSNSVPGRPVSSLGPGQTVSSSGPTIKPKCTVVSETISSKNIISRSSNGQMNGMKPPLSGYRAAQGPQRLPFPTGYKRQREYEEEDDDDDEYDSEMEDFIEDEGEPQEEISKHIREIFGYDRKKYKDESDYALRYMESSWKEQQKEEAKSLRLGMQEDLEEMRREEEEMQRRRAKKLKRR

SEQ ID NO: 6318 - protein, 1334 aa, Homo sapiens
MSEAMDQPAGGPGNPRPGEGDDGSMEPGTCQELLHRLRELEAENSALAQANENQRETYERCLDEVANHVVQALLNQKDLREECIKLKKRVFDLERQNQMLSALFQQKLQLTTGSLPQIPLTPLQPPSEPPASPSLSSTEGPAAPLPLGHCAGQREVCWEQQLRPGGPGPPAAPPPALDALSPFLRKKAQILEVLRALEETDPLLLCSPATPWRPPGQGPGSPEPINGELCGPPQPEPSPWAPCLLLGPGNLGGLLHWERLLGGLGGEEDTGRPWGPSRGPPQAQGTSSGPNCAPGSSSSSSSDEAGDPNEAPSPDTLLGALARRQLNLGQLLEDTESYLQAFLAGAAGPLNGDHPGPGQSSSPDQAPPQLSKSKGLPKSAWGGGTPEAHRPGFGATSEGQGPLPFLSMFMGAGDAPLGSRPGHPHSSSQVKSKLQIGPPSPGEAQGPLLPSPARGLKFLKLPPTSEKSPSPGGPQLSPQLPRNSRIPCRNSGSDGSPSPLLARRGLGGGELSPEGAQGLPTSPSPCYTTPDSTQLRPPQSALSTTLSPGPVVSPCYENILDLSRSTFRGPSPEPPPSPLQVPTYPQLTLEVPQAPEVLRSPGVPPSPCLPESYPYGSPQEKSLDKAGSESPHPGRRTPGNSSKKPSQGSGRRPGDPGSTPLRDRLAALGKLKTGPEGALGSEKNGVPARPGTEKTRGPGKSGESAGDMVPSIHRPLEQLEAKGGIRGAVALGTNSLKQQEPGLMGDPGARVYSSHSMGARVDLEPVSPRSCLTKVELAKSRLAGALCPQVPRTPAKVPTSAPSLGKPNKSPHSSPTKLPSKSPTKVVPRPGAPLVTKESPKPDKGKGPPWADCGSTTAQSTPLVPGPTDPSQGPEGLAPHSAIEEKVMKGIEENVLRLQGQERAPGAEVKHRNTSSIASWFGLKKSKLPALNRRTEATKNKEGAGGGSPLRREVKMEARKLEAESLNISKLMAKAEDLRRALEEEKAYLSSRARPRPGGPAPGPNTGLGQVQGQLAGMYQGADTFMQQLLNRVDGKELPSKSWREPKPEYGDFQPVSSDPKSPWPACGPRNGLVGPLQGCGKPPGKPSSEPGRREEMPSEDSLAEPVPTSHFTACGSLTRTLDSGIGTFPPPDHGSSGTPSKNLPKTKPPRLDPPPGVPPARPPPLTKVPRRAHTLEREVPGIEELLVSGRHPSMPAFPALLPAAPGHRGHETCPDDPCEDPGPTPPVQLAKNWTFPNTRAAGSSSDPLMCPPRQLEGLPRTPMALPVDRKRSQEPSRPSPTPQGPPFGGSRTPSTSDMAEEGRVASGGPPGLETSESLSDSLYDSLSSCGSQG

SEQ ID NO: 6319 - protein, 571 aa, Homo sapiens
MVMVANKKSQDQMTEDLSLFLGNNTIRFTVWLHGVLDKLRSVTTEPSSLKSSDTNIFDSNVPSNKSNFSRGDERRHEAAVPPLAIPSARPEKRDSRVSTSSQESKTTNVRQTYDDGAATRLMSTVKPLREPAPSEDVIDIKPEPDDLIDEDLNFVQENPLSQKKPTVTLTYGSSRPSIEIYRPPASRNADSGVHLNRLQFQQQQNSIHAAKQLDMQSSWVYETGRLCEPEVLNSLEETYSPFFRNNSEKMSMEDENFRKRKLPVVSSVVKVKKFNHDGEEEEEDDDYGSRTGSISSSVSVPAKPERRPSLPPSKQANKNLILKAISEAQESVTKTTNYSTVPQKQTLPVAPRTRTSQEELLAEVVQGQSRTPRISPPIKEEETKGDSVEKNQGTQQRQLLSRLQIDPVMAETLQMSQAEMSELSVAQKPEKLLERCKYWPACKNGDECAYHHPISPCKAFPNCKFAEKCLFVHPNCKYDAKCTKPDCPFTHVSRRIPVLSPKPAVAPPAPPSSSQLCRYFPACKKMECPFYHPKHCRFNTQCTRPDCTFYHPTINVPPRHALKWIRPQTSE

SEQ ID NO: 6320 - protein, 538 aa, Homo sapiens
MPRGWAAPLLLLLLQGGWGCPDLVCYTDYLQTVICILEMWNLHPSTLTLTWQDQYEELKDEATSCSLHRSAHNATHATYTCHMDVFHFMADDIFSVNITDQSGNYSQECGSFLLAESIKPAPPFNVTVTFSGQYNISWRSDYEDPAFYMLKGKLQYELQYRNRGDPWAVSPRRKLISVDSRSVSLLPLEFRKDSSYELQVRAGPMPGSSYQGTWSEWSDPVIFQTQSEELKEGWNPHLLLLLLLVIVFIPAFWSLKTHPLWRLWKKIWAVPSPERFFMPLYKGCSGDFKKWVGAPFTGSSLELGPWSPEVPSTLEVYSCHPPRSPAKRLQLTELQEPAELVESDGVPKPSFWPTAQNSGGSAYSEERDRPYGLVSIDTVTVLDAEGPCTWPCSCEDDGYPALDLDAGLEPSPGLEDPLLDAGTTVLSCGCVSAGSPGLGGPLGSLLDRLKPPLADGEDWAGGLPWGGRSPGGVSESEAGSPLAGLDMDTFDSGFVGSDCSSPVECDFTSPGDEGPPRSYLRQWVVIPPPLSSPGPQAS

SEQ ID NO: 6321 - protein, 826 aa, Homo sapiens
MEGAGGANDKKKISSERRKEKSRDAARSRRSKESEVFYELAHQLPLPHNVSSHLDKASVMRLTISYLRVRKLLDAGDLDIEDDMKAQMNCFYLKALDGFVMVLTDDGDMIYISDNVNKYMGLTQFELTGHSVFDFTHPCDHEEMREMLTHRNGLVKKGKEQNTQRSFFLRMKCTLTSRGRTMNIKSATWKVLHCTGHIHVYDTNSNQPQCGYKKPPMTCLVLICEPIPHPSNIEIPLDSKTFLSRHSLDMKFSYCDERITELMGYEPEELLGRSIYEYYHALDSDHLTKTHHDMFTKGQVTTGQYRMLAKRGGYVWVETQATVIYNTKNSQPQCIVCVNYVVSGIIQHDLIFSLQQTECVLKPVESSDMKMTQLFTKVESEDTSSLFDKLKKEPDALTLLAPAAGDTIISLDFGSNDTETDDQQLEEVPLYNDVMLPSPNEKLQNINLAMSPLPTAETPKPLRSSADPALNQEVALKLEPNPESLELSFTMPQIQDQTPSPSDGSTRQSSPEPNSPSEYCFYVDSDMVNEFKLELVEKLFAEDTEAKNPFSTQDTDLDLEMLAPYIPMDDDFQLRSFDQLSPLESSSASPESASPQSTVTVFQQTQIQEPTANATTTTATTDELKTVTKDRMEDIKILIASPSPTHIHKETTSATSSPYRDTQSRTASPNRAGKGVIEQTEKSHPRSPNVLSVALSQRTTVPEEELNPKILALQNAQRKRKMEHDGSLFQAVGIGTLLQQPDDHAATTSLSWKRVKGCKSSEQNGMEQKTIILIPSDLACRLLGQSMDESGLPQLTSYDCEVNAPIQGSRNLLQGEELLRALDQVN

SEQ ID NO: 6322 - protein, 324 aa, Homo sapiens
MASYYEILDVPRSASADDIKKAYRRKALQWHPDKNPDNKEFAEKKFKEVAEAYEVLSDKHKREIYDRYGREGLTGTGTGPSRAEAGSGGPGFTFTFRSPEEVFREFFGSGDPFAELFDDLGPFSELQNRGSRHSGPFFTFSSSFPGHSDFSSSSFSFSPGAGAFRSVSTSTTFVQGRRITTRRIMENGQERVEVEEDGQLKSVTINGVPDDLALGLELSRREQQPSVTSRSGGTQVQQTPASCPLDSDLSEDEDLQLAMAYSLSEMEAAGKKPAGGREAQHRRQGRPKAQHQDPGLGGTQEGARGEATKRSPSPEEKASRCLIL

SEQ ID NO: 6323 - protein, 1606 aa, Homo sapiens
MNKAPQSTGPPPAPSPGLPQPAFPPGQTAPVVFSTPQATQMNTPSQPRQGGFRSLQHFYPSRAQPPSSAASRVQSAAPARPGPAAHVYPAGSQVMMIPSQISYPASQGAYYIPGQGRSTYVVPTQQYPVQPGAPGFYPGASPTEFGTYAGAYYPAQGVQQFPTGVAPTPVLMNQPPQIAPKRERKTIRIRDPNQGGKDITEEIMSGARTASTPTPPQTGGGLEPQANGETPQVAVIVRPDDRSQGAIIADRPGLPGPEHSPSESQPSSPSPTPSPSPVLEPGSEPNLAVLSIPGDTMTTIQMSVEESTPISRETGEPYRLSPEPTPLAEPILEVEVTLSKPVPESEFSSSPLQAPTPLASHTVEIHEPNGMVPSEDLEPEVESSPELAPPPACPSESPVPIAPTAQPEELLNGAPSPPAVDLSPVSEPEEQAKEVTASMAPPTIPSATPATAPSATSPAQEEEMEEEEEEEEGEAGEAGEAESEKGGEELLPPESTPIPANLSQNLEAAAATQVAVSVPKRRRKIKELNKKEAVGDLLDAFKEANPAVPEVENQPPAGSNPGPESEGSGVPPRPEEADETWDSKEDKIHNAENIQPGEQKYEYKSDQWKPLNLEEKKRYDREFLLGFQFIFASMQKPEGLPHISDVVLDKANKTPLRPLDPTRLQGINCGPDFTPSFANLGRTTLSTRGPPRGGPGGELPRGPAGLGPRRSQQGPRKEPRKIIATVLMTEDIKLNKAEKAWKPSSKRTAADKDRGEEDADGSKTQDLFRRVRSILNKLTPQMFQQLMKQVTQLAIDTEERLKGVIDLIFEKAISEPNFSVAYANMCRCLMALKVPTTEKPTVTVNFRKLLLNRCQKEFEKDKDDDEVFEKKQKEMDEAATAEERGRLKEELEEARDIARRRSLGNIKFIGELFKLKMLTEAIMHDCVVKLLKNHDEESLECLCRLLTTIGKDLDFEKAKPRMDQYFNQMEKIIKEKKTSSRIRFMLQDVLDLRGSNWVPRRGDQGPKTIDQIHKEAEMEEHREHIKVQQLMAKGSDKRRGGPPGPPISRGLPLVDDGGWNTVPISKGSRPIDTSRLTKITKPGSIDSNNQLFAPGGRLSWGKGSSGGSGAKPSDAASEAARPATSTLNRFSALQQAVPTESTDNRRVVQRSSLSRERGEKAGDRGDRLERSERGGDRGDRLDRARTPATKRSFSKEVEERSRERPSQPEGLRKAASLTEDRDRGRDAVKREAALPPVSPLKAALSEEELEKKSKAIIEEYLHLNDMKEAVQCVQELASPSLLFIFVRHGVESTLERSAIAREHMGQLLHQLLCAGHLSTAQYYQGLYEILELAEDMEIDIPHVWLYLAELVTPILQEGGVPMGELFREITKPLRPLGKAASLLLEILGLLCKSMGPKKVGTLWREAGLSWKEFLPEGQDIGAFVAEQKVEYTLGEESEAPGQRALPSEELNRQLEKLLKEGSSNQRVFDWIEANLSEQQIVSNTLVRALMTAVCYSAIIFETPLRVDVAVLKARAKLLQKYLCDEQKELQALYALQALVVTLEQPPNLLRMFFDALYDEDVVKEDAFYSWESSKDPAEQQGKGVALKSVTAFFKWLREAEEESDHN

SEQ ID NO: 6324 - protein, 370 aa, Homo sapiens
MLPRRLLAAWLAGTRGGGLLALLANQCRFVTGLRVRRAQQIAQLYGRLYSESSRRVLLGRLWRRLHGRPGHASALMAALAGVFVWDEERIQEEELQRSINEMKRLEEMSNMFQSSGVQHHPPEPKAQTEGNEDSEGKEQRWEMVMDKKHFKLWRRPITGTHLYQYRVFGTYTDVTPRQFFNVQLDTEYRKKWDALVIKLEVIERDVVSGSEVLHWVTHFPYPMYSRDYVYVRRYSVDQENNMMVLVSRAVEHPSVPESPEFVRVRSYESQMVIRPHKSFDENGFDYLLTYSDNPQTVFPRYCVSWMVSSGMPDFLEKLHMATLKAKNMEIKVKDYISAKPLEMSSEAKATSQSSERKNEGSCGPARIEYA

SEQ ID NO: 6325 - protein, 207 aa, Homo sapiens
MALLFARSLRLCRWGAKRLGVASTEAQRGVSFKLEEKTAHSSLALFRDDTGVKYGLVGLEPTKVALNVERFREWAVVLADTAVTSGRHYWEVTVKRSQQFRIGVADVDMSRDSCIGVDDRSWVFTYAQRKWYTMLANEKAPVEGIGQPEKVGLLLEYEAQKLSLVDVSQVSVVHTLQTDFRGPVVPAFALWDGELLTHSGLEVPEGL

SEQ ID NO: 6326 - protein, 255 aa, Homo sapiens
MHQKIAREMNLSETAFIRKLHPTDNFAQSSCFGLRWFTPASEVPLCGHATLASAAVLFHKIKNMNSTLTFVTLSGELRARRAEDGIVLDLPLYPAHPQDFHEVEDLIKTAIGNTLVQDICYSPDTQKLLVRLSDVYNRSFLENLKVNTENLLQVENTGKVKGLILTLKGEPGGQTQAFDFYSRYFAPWVGVAEDPVTGSAHAVLSSYWSQHLGKKEMHAFQCSHRGGELGISLRPDGRVDIRGGAAVVLEGTLTA

SEQ ID NO: 6327 - protein, 347 aa, Homo sapiens
MSFVLSRMAACGGTCKNKVTVSKPVWDFLSKETPARLARLREEHRVSILIDGETSDIYVLQLSPQGPPPAPPNGLYLARKALKGLLKEAEKELKKAQRQGELMGCLALGGGGEHPEMHRAGPPPLRAAPLLPPGARGLPPPPPPLPPPLPPRLREEAEEQESTCPICLGEIQNAKTLEKCRHSFCEGCITRALQVKKACPMCGRFYGQLVGNQPQNGRMLVSKDATLLLPSYEKYGTIVIQYVFPPGVQGAEHPNPGVRYPGTTRVAYLPDCPEGNKVLTLFRKAFDQRLTFTIGTSMTTGRPNVITWNDIHHKTSCTGGPQLFGYPDPTYLTRVQEELRAKGITDD

SEQ ID NO: 6328 - protein, 802 aa, Homo sapiens
MAAEALAAEAVASRLERQEEDIRWLWSEVERLRDEQLNAPYSCQAEGPCLTREVAQLRAENCDLRHRLCSLRLCLAEERSRQATLESAELEAAQEAGAQPPPSQSQDKDMKKKKMKESEADSEVKHQPIFIKERLKLFEILKKDHQLLLAIYGKKGDTSNIITVRVADGQTVQGEVWKTTPYQVAAEISQELAESTVIAKVNGELWDLDRPLEGDSSLELLTFDNEEAQAVYWHSSAHILGEAMELYYGGHLCYGPPIENGFYYDMFIEDRAVSSTELSALENICKAIIKEKQPFERLEVSKEILLEMFKYNKFKCRILNEKVNTATTTVYRCGPLIDLCKGPHVRHTGKIKTIKIFKNSSTYWEGNPEMETLQRIYGISFPDNKMMRDWEKFQEEAKNRDHRKIGKEQELFFFHDLSPGSCFFLPRGAFIYNTLTDFIREEYHKRDFTEVLSPNMYNSKLWEASGHWQHYSENMFTFEIEKDTFALKPMNCPGHCLMFAHRPRSWREMPIRFADFGVLHRNELSGTLSGLTRVRRFQQDDAHIFCTVEQIEEEIKGCLQFLQSVYSTFGFSFQLNLSTRPENFLGEIEMWNEAEKQLQNSLMDFGEPWKMNPGDGAFYGPKIDIKIKDAIGRYHQCATIQLDFQLPIRFNLTYVSKDGDDKKRPVIIHRAILGSVERMIAILSENYGGKWPFWLSPRQVMVIPVGPTCEKYALQVSSEFFEEGFMADVDLDHSCTLNKKIRNAQLAQYNFILVVGEKEKIDNAVNVRTRDNKIHGEILVTSAIDKLKNLRKTRTLNAEEAF

SEQ ID NO: 6329 - protein, 288 aa, Homo sapiens
MASNVTNKTDPRSMNSRVFIGNLNTLVVKKSDVEAIFSKYGKIVGCSVHKGFAFVQYVNERNARAAVAGEDGRMIAGQVLDINLAAEPKVNRGKAGVKRSAAEMYGSSFDLDYDFQRDYYDRMYSYPARVPPPPPIARAVVPSKRQRVSGNTSRRGKSGFNSKSGQRGSSKSGKLKGDDLQAIKKELTQIKQKVDSLLENLEKIEKEQSKQAVEMKNDKSEEEQSSSSVKKDETNVKMESEGGADDSAEEGDLLDDDDNEDRGDDQVKTTGKERKRWWRGAQGHMECL

SEQ ID NO: 6330 - protein, 1125 aa, Homo sapiens
MKGARWRRVPWVSLSCLCLCLLPHVVPGVSLFPYGAGAGDLEFVRRTVDFTSPLFKPATGFPLGSSLRDSLYFTDNGQIIFPESDYQIFSYPNPLPTGFTGRDPVALVAPFWDDADFSTGRGTTFYQEYETFYGEHSLLVQQAESWIRKMTNNGGYKARWALKVTWVNAHAYPAQWTLGSNTYQAILSTDGSRSYALFLYQSGGMQWDVAQRSGNPVLMGFSSGDGYFENSPLMSQPVWERYRPDRFLNSNSGLQGLQFYRLHREERPNYRLECLQWLKSQPRWPSWGWNQVSCPCSWQQGRRDLRFQPVSIGRWGLGSRQLCSFTSWRGGVCCSYGPWGEFREGWHVQRPWQLAQELEPQSWCCRWNDKPYLCALYQQRRPHVGCATYRPPQPAWMFGDPHITTLDGVSYTFNGLGDFLLVGAQDGNSSFLLQGRTAQTGSAQATNFIAFAAQYRSSSLGPVTVQWLLEPHDAIRVLLDNQTVTFQPDHEDGGGQETFNATGVLLSRNGSEVSASFDGWATVSVIALSNILHASASLPPEYQNRTEGLLGVWNNNPEDDFRMPNGSTIPPGSPEEMLFHFGMTWQINGTGLLGKRNDQLPSNFTPVFYSQLQKNSSWAEHLISNCDGDSSCIYDTLALRNASIGLHTREVSKNYEQANATLNQYPPSINGGRVIEAYKGQTTLIQYTSNAEDANFTLRDSCTDLELFENGTLLWTPKSLEPFTLEILARSAKIGLASALQPRTVVCHCNAESQCLYNQTSRVGNSSLEVAGCKCDGGTFGRYCEGSEDACEEPCFPSVHCVPGKGCEACPPNLTGDGRHCAALGSSFLCQNQSCPVNYCYNQGHCYISQTLGCQPMCTCPPAFTDSRCFLAGNNFSPTVNLELPLRVIQLLLSEEENASMAEVNASVAYRLGTLDMRAFLRNSQVERIDSAAPASGSPIQHWMVISEFQYRPRGPVIDFLNNQLLAAVVEAFLYHVPRRSEEPRNDVVFQPISGEDVRDVTALNVSTLKAYFRCDGYKGYDLVYSPQSGFTCVSPCSRGYCDHGGQCQHLPSGPRCSCVSFSIYTAWGEHCEHLSMKLDAFFGIFFGALGGLLLLGVGTFVVLRFWGCSGARFSYFLNSAEALP

SEQ ID NO: 6331 - protein, 673 aa, Homo sapiens
MDLTKMGMIQLQNPSHPTGLLCKANQMRLAGTLCDVVIMVDSQEFHAHRTVLACTSKMFEILFHRNSQHYTLDFLSPKTFQQILEYAYTATLQAKAEDLDDLLYAAEILEIEYLEEQCLKMLETIQASDDNDTEATMADGGAEEEEDRKARYLKNIFISKHSSEESGYASVAGQSLPGPMVDQSPSVSTSFGLSAMSPTKAAVDSLMTIGQSLLQGTLQPPAGPEEPTLAGGGRHPGVAEVKTEMMQVDEVPSQDSPGAAESSISGGMGDKVEERGKEGPGTPTRSSVITSARELHYGREESAEQVPPPAEAGQAPTGRPEHPAPPPEKHLGIYSVLPNHKADAVLSMPSSVTSGLHVQPALAVSMDFSTYGGLLPQGFIQRELFSKLGELAVGMKSESRTIGEQCSVCGVELPDNEAVEQHRKLHSGMKTYGCELCGKRFLDSLRLRMHLLAHSAGAKAFVCDQCGAQFSKEDALETHRQTHTGTDMAVFCLLCGKRFQAQSALQQHMEVHAGVRSYICSECNRTFPSHTALKRHLRSHTGDHPYECEFCGSCFRDESTLKSHKRIHTGEKPYECNGCGKKFSLKHQLETHYRVHTGEKPFECKLCHQRSRDYSAMIKHLRTHNGASPYQCTICTEYCPSLSSMQKHMKGHKPEEIPPDWRIEKTYLYLCYV

SEQ ID NO: 6332 - protein, 492 aa, Homo sapiens
MGGRRGPNRTSYCRNPLCEPGSSGGSSGSHTSSASVTSVRSRTRSSSGTGLSSPPLATQTVVPLQHCKIPELPVQASILFELQLFFCQLIALFVHYINIYKTVWWYPPSHPPSHTSLNFHLIDFNLLMVTTIVLGRRFIGSIVKEASQRGKVSLFRSILLFLTRFTVLTATGWSLCRSLIHLFRTYSFLNLLFLCYPFGMYIPFLQLNCDLRKTSLFNHMASMGPREAVSGLAKSRDYLLTLRETWKQHTRQLYGPDAMPTHACCLSPSLIRSEVEFLKMDFNWRMKEVLVSSMLSAYYVAFVPVWFVKNTHYYDKRWSCELFLLVSISTSVILMQHLLPASYCDLLHKAAAHLGCWQKVDPALCSNVLQHPWTEECMWPQGVLVKHSKNVYKAVGHYNVAIPSDVSHFRFHFFFSKPLRILNILLLLEGAVIVYQLYSLMSSEKWHQTISLALILFSNYYAFFKLLRDRLVLGKAYSYSASPQRDLDHRFS

SEQ ID NO: 6333 - protein, 540 aa, Homo sapiens
MRVAAATAAAGAGPAMAVWTRATKAGLVELLLRERWVRVVAELSGESLSLTGDAAAAELEPALGPAAAAFNGLPNGGGAGDSLPGSPSRGLGPPSPPAPPRGPAGEAGASPPVRRVRVVKQEAGGLGISIKGGRENRMPILISKIFPGLAADQSRALRLGDAILSVNGTDLRQATHDQAVQALKRAGKEVLLEVKFIREVTPYIKKPSLVSDLPWEGAAPQSPSFSGSEDSGSPKHQNSTKDRKIIPLKMCFAARNLSMPDLENRLIELHSPDSRNTLILRCKDTATAHSWFVAIHTNIMALLPQVLAELNAMLGATSTAGGSKEVKHIAWLAEQAKLDGGRQQWRPVLMAVTEKDLLLYDCMPWTRDAWASPCHSYPLVATRLVHSGSGCRSPSLGSDLTFATRTGSRQGIEMHLFRVETHRDLSSWTRILVQGCHAAAELIKEVSLGCMLNGQEVRLTIHYENGFTISRENGGSSSILYRYPFERLKMSADDGIRNLYLDFGGPEGELTMDLHSCPKPIVFVLHTFLSAKVTRMGLLV

SEQ ID NO: 6334 - protein, 2355 aa, Homo sapiens
MLRGPGPGLLLLAVQCLGTAVPSTGASKSKRQAQQMVQPQSPVAVSQSKPGCYDNGKHYQINQQWERTYLGNALVCTCYGGSRGFNCESKPEAEETCFDKYTGNTYRVGDTYERPKDSMIWDCTCIGAGRGRISCTIANRCHEGGQSYKIGDTWRRPHETGGYMLECVCLGNGKGEWTCKPIAEKCFDHAAGTSYVVGETWEKPYQGWMMVDCTCLGEGSGRITCTSRNRCNDQDTRTSYRIGDTWSKKDNRGNLLQCICTGNGRGEWKCERHTSVQTTSSGSGPFTDVRAAVYQPQPHPQPPPYGHCVTDSGVVYSVGMQWLKTQGNKQMLCTCLGNGVSCQETAVTQTYGGNSNGEPCVLPFTYNGRTFYSCTTEGRQDGHLWCSTTSNYEQDQKYSFCTDHTVLVQTRGGNSNGALCHFPFLYNNHNYTDCTSEGRRDNMKWCGTTQNYDADQKFGFCPMAAHEEICTTNEGVMYRIGDQWDKQHDMGHMMRCTCVGNGRGEWTCIAYSQLRDQCIVDDITYNVNDTFHKRHEEGHMLNCTCFGQGRGRWKCDPVDQCQDSETGTFYQIGDSWEKYVHGVRYQCYCYGRGIGEWHCQPLQTYPSSSGPVEVFITETPSQPNSHPIQWNAPQPSHISKYILRWRPKNSVGRWKEATIPGHLNSYTIKGLKPGVVYEGQLISIQQYGHQEVTRFDFTTTSTSTPVTSNTVTGETTPFSPLVATSESVTEITASSFVVSWVSASDTVSGFRVEYELSEEGDEPQYLDLPSTATSVNIPDLLPGRKYIVNVYQISEDGEQSLILSTSQTTAPDAPPDTTVDQVDDTSIVVRWSRPQAPITGYRIVYSPSVEGSSTELNLPETANSVTLSDLQPGVQYNITIYAVEENQESTPVVIQQETTGTPRSDTVPSPRDLQFVEVTDVKVTIMWTPPESAVTGYRVDVIPVNLPGEHGQRLPISRNTFAEVTGLSPGVTYYFKVFAVSHGRESKPLTAQQTTKLDAPTNLQFVNETDSTVLVRWTPPRAQITGYRLTVGLTRRGQPRQYNVGPSVSKYPLRNLQPASEYTVSLVAIKGNQESPKATGVFTTLQPGSSIPPYNTEVTETTIVITWTPAPRIGFKLGVRPSQGGEAPREVTSDSGSIVVSGLTPGVEYVYTIQVLRDGQERDAPIVNKVVTPLSPPTNLHLEANPDTGVLTVSWERSTTPDITGYRITTTPTNGQQGNSLEEVVHADQSSCTFDNLSPGLEYNVSVYTVKDDKESVPISDTIIPAVPPPTDLRFTNIGPDTMRVTWAPPPSIDLTNFLVRYSPVKNEEDVAELSISPSDNAVVLTNLLPGTEYVVSVSSVYEQHESTPLRGRQKTGLDSPTGIDFSDITANSFTVHWIAPRATITGYRIRHHPEHFSGRPREDRVPHSRNSITLTNLTPGTEYVVSIVALNGREESPLLIGQQSTVSDVPRDLEVVAATPTSLLISWDAPAVTVRYYRITYGETGGNSPVQEFTVPGSKSTATISGLKPGVDYTITVYAVTGRGDSPASSKPISINYRTEIDKPSQMQVTDVQDNSISVKWLPSSSPVTGYRVTTTPKNGPGPTKTKTAGPDQTEMTIEGLQPTVEYVVSVYAQNPSGESQPLVQTAVTNIDRPKGLAFTDVDVDSIKIAWESPQGQVSRYRVTYSSPEDGIHELFPAPDGEEDTAELQGLRPGSEYTVSVVALHDDMESQPLIGTQSTAIPAPTDLKFTQVTPTSLSAQWTPPNVQLTGYRVRVTPKEKTGPMKEINLAPDSSSVVVSGLMVATKYEVSVYALKDTLTSRPAQGVVTTLENVSPPRRARVTDATETTITISWRTKTETITGFQVDAVPANGQTPIQRTIKPDVRSYTITGLQPGTDYKIYLYTLNDNARSSPVVIDASTAIDAPSNLRFLATTPNSLLVSWQPPRARITGYIIKYEKPGSPPREVVPRPRPGVTEATITGLEPGTEYTIYVIALKNNQKSEPLIGRKKTDELPQLVTLPHPNLHGPEILDVPSTVQKTPFVTHPGYDTGNGIQLPGTSGQQPSVGQQMIFEEHGFRRTTPPTTATPIRHRPRPYPPNVGQEALSQTTISWAPFQDTSEYIISCHPVGTDEEPLQFRVPGTSTSATLTGLTRGATYNVIVEALKDQQRHKVREEVVTVGNSVNEGLNQPTDDSCFDPYTVSHYAVGDEWERMSESGFKLLCQCLGFGSGHFRCDSSRWCHDNGVNYKIGEKWDRQGENGQMMSCTCLGNGKGEFKCDPHEATCYDDGKTYHVGEQWQKEYLGAICSCTCFGGQRGWRCDNCRRPGGEPSPEGTTGQSYNQYSQRYHQRTNTNVNCPIECFMPLDVQADREDSRE

SEQ ID NO: 6335 - protein, 1418 aa, Homo sapiens
MIRLGAPQTLVLLTLLVAAVLRCQGQDVRQPGPKGQKGEPGDIKDIVGPKGPPGPQGPAGEQGPRGDRGDKGEKGAPGPRGRDGEPGTPGNPGPPGPPGPPGPPGLGGNFAAQMAGGFDEKAGGAQLGVMQGPMGPMGPRGPPGPAGAPGPQGFQGNPGEPGEPGVSGPMGPRGPPGPPGKPGDDGEAGKPGKAGERGPPGPQGARGFPGTPGLPGVKGHRGYPGLDGAKGEAGAPGVKGESGSPGENGSPGPMGPRGLPGERGRTGPAGAAGARGNDGQPGPAGPPGPVGPAGGPGFPGAPGAKGEAGPTGARGPEGAQGPRGEPGTPGSPGPAGASGNPGTDGIPGAKGSAGAPGIAGAPGFPGPRGPPGPQGATGPLGPKGQTGEPGIAGFKGEQGPKGEPGPAGPQGAPGPAGEEGKRGARGEPGGVGPIGPPGERGAPGNRGFPGQDGLAGPKGAPGERGPSGLAGPKGANGDPGRPGEPGLPGARGLTGRPGDAGPQGKVGPSGAPGEDGRPGPPGPQGARGQPGVMGFPGPKGANGEPGKAGEKGLPGAPGLRGLPGKDGETGAAGPPGPAGPAGERGEQGAPGPSGFQGLPGPPGPPGEGGKPGDQGVPGEAGAPGLVGPRGERGFPGERGSPGAQGLQGPRGLPGTPGTDGPKGASGPAGPPGAQGPPGLQGMPGERGAAGIAGPKGDRGDVGEKGPEGAPGKDGGRGLTGPIGPPGPAGANGEKGEVGPPGPAGSAGARGAPGERGETGPPGPAGFAGPPGADGQPGAKGEQGEAGQKGDAGAPGPQGPSGAPGPQGPTGVTGPKGARGAQGPPGATGFPGAAGRVGPPGSNGNPGPPGPPGPSGKDGPKGARGDSGPPGRAGEPGLQGPAGPPGEKGEPGDDGPSGAEGPPGPQGLAGQRGIVGLPGQRGERGFPGLPGPSGEPGKQGAPGASGDRGPPGPVGPPGLTGPAGEPGREGSPGADGPPGRDGAAGVKGDRGETGAVGAPGAPGPPGSPGPAGPTGKQGDRGEAGAQGPMGPSGPAGARGIQGPQGPRGDKGEAGEPGERGLKGHRGFTGLQGLPGPPGPSGDQGASGPAGPSGPRGPPGPVGPSGKDGANGIPGPIGPPGPRGRSGETGPAGPPGNPGPPGPPGPPGPGIDMSAFAGLGPREKGPDPLQYMRADQAAGGLRQHDAEVDATLKSLNNQIESIRSPEGSRKNPARTCRDLKLCHPEWKSGDYWIDPNQGCTLDAMKVFCNMETGETCVYPNPANVPKKNWWSSKSKEKKHIWFGETINGGFHFSYGDDNLAPNTANVQMTFLRLLSTEGSQNITYHCKNSIAYLDEAAGNLKKALLIQGSNDVEIRAEGNSRFTYTALKDGCTKHTGKWGKTVIEYRSQKTSRLPIIDIAPMDIGGPEQEFGVDIGPVCFL

SEQ ID NO: 6336 - protein, 582 aa, Homo sapiens
MAARSWQDELAQQAEEGSARLREMLSVGLGFLRTELGLDLGLEPKRYPGWVILVGTGALGLLLLFLLGYGWAAACAGARKKRRSPPRKREEAAAVPAAAPDDLALLKNLRSEEQKKKNRKKLSEKPKPNGRTVEVAEGEAVRTPQSVTAKQPPEIDKKNEKSKKNKKKSKSDAKAVQNSSRHDGKEVDEGAWETKISHREKRQQRKRDKVLTDSGSLDSTIPGIENTITVTTEQLTTASFPVGSKKNKGDSHLNVQVSNFKSGKGDSTLQVSSGLNENLTVNGGGWNEKSVKLSSQISAGEEKWNSVSPASAGKRKTEPSAWSQDTGDANTNGKDWGRSWSDRSIFSGIGSTAEPVSQSTTSDYQWDVSRNQPYIDDEWSGLNGLSSADPNSDWNAPAEEWGNWVDEERASLLKSQEPIPDDQKVSDDDKEKGEGALPTGKSKKKKKKKKKQGEDNSTAQDTEELEKEIREDLPVNTSKTRPKQEKAFSLKTISTSDPAEVLVKNSQPIKTLPPATSTEPSVILSKSDSDKSSSQVPPILQETDKSKSNTKQNSVPPSQTKSETSWESPKQIKKKKKARRET

SEQ ID NO: 6337 - protein, 191 aa, Homo sapiens
MDPKQTTLLCLVLCLGQRIQAQEGDFPMPFISAKSSPVIPLDGSVKIQCQAIREAYLTQLMIIKNSTYREIGRRLKFWNETDPEFVIDHMDANKAGRYQCQYRIGHYRFRYSDTLELVVTDSIHQDYTTQNLIRMAVAGLVLVALLAILVENWHSHTALNKEASADVAEPSWSQQMCQPGLTFARTPSVCK

SEQ ID NO: 6338 - protein, 356 aa, Homo sapiens
MPILKQLVSSSVHSKRRSRADLTAEMISAPLGDFRHTMHVGRAGDAFGDTSFLNSKAGEPDGESLDEQPSSSSSKRSLLSRKFRGSKRSQSVTRGEREQRDMLGSLRDSALFVKNAMSLPQLNEKEAAEKGTSKLPKSLSSSPVKKANDGEGGDEEAGTEEAVPRRNGAAGPHSPDPLLDEQAFGDLTDLPVVPKATYGLKHAESIMSFHIDLGPSMLGDVLSIMDKEEWDPEEGEGGYHGDEGAAGTITQAPPYAVAAPPLARQEGKAGPDLPSLPSHALEDEGWAAAAPSPGSARSMGSHTTRDSSSLSSCTSGILEERSPAFRGPDRARAAVSRQPDKEFSFMDEEEEDEIRV

SEQ ID NO: 6339 - protein, 351 aa, Homo sapiens
MEGAALLKIFVVCIWVQQNHPGWTVAGQFQEKKRFTEEVIEYFQKKVSPVHLKILLTSDEAWKRFVRVAELPREEADALYEALKNLTPYVAIEDKDMQQKEQQFREWFLKEFPQIRWKIQESIERLRVIANEIEKVHRGCVIANVVSGSTGILSVIGVMLAPFTAGLSLSITAAGVGLGIASATAGIASSIVENTYTRSAELTASRLTATSTDQLEALRDILRDITPNVLSFALDFDEATKMIANDVHTLRRSKATVGRPLIAWRYVPINVVETLRTRGAPTRIVRKVARNLGKATSGVLVVLDVVNLVQDSLDLHKGAKSESAESLRQWAQELEENLNELTHIHQSLKAG

SEQ ID NO: 6340 - protein, 285 aa, Homo sapiens
MSKKPPNRPGITFEIGARLEALDYLQKWYPSRIEKIDYEEGKMLVHFERWSHRYDEWIYWDSNRLRPLERPALRKEGLKDEEDFFDFKAGEEVLARWTDCRYYPAKIEAINKEGTFTVQFYDGVIRCLKRMHIKAMPEDAKGQDWIALVKAAAAAAAKNKTGSKPRTSANSNKDKDKDERKWFKVPSKKEETSTCIATPDVEKKEDLPTSSETFGLHVENVPKMVFPQPESTLSNKRKNNQGNSFQAKRARLNKITGLLASKAVGVDGAEKKEDYNETAPMLEQV

SEQ ID NO: 6341 - protein, 249 aa, Homo sapiens
MEIKHLLFLVAAACLLPMLSMKKKSARDQFNKLVTDLPNVQEEIVNIHNALRRRVVPPASNMLKMSWSEEAAQNARIFSKYCDMTESNPLERRLPNTFCGENMHMTSYPVSWSSVIGVWYSESTSFKHGEWTTTDDDITTDHYTQIVWATSYLIGCAIASCRQQGSPRYLYVCHYCHEGNDPETKNEPYKTGVPCEACPSNCEDKLCTNPCIYYDEYFDCDIQVHYLGCNHSTTILFCKATCLCDTEIK

SEQ ID NO: 6342 - protein, 711 aa, Homo sapiens
MESGAVLLESKSSPFNLLHEMHELRLLGHLCDVTVSVEYQGVRKDFMAHKAVLAATSKFFKEVFLNEKSVDGTRTNVYLNEVQVADFASFLEFVYTAKVQVEEDRVQRMLEVAEKLKCLDLSETCFQLKKQMLESVLLELQNFSESQEVEVSSGSQVSAAPAPRASVATDGPHPSGLTDSLDYPGERASNGMSSDLPPKKSKDKLDKKKEVVKPPYPKIRRASGRLAGRKVFVEIPKKKYTRRLREQQKTAEGDVGDYRCPQDQSPDRVGTEMEQVSKNEGCQAGAELEELSKKAGPEEEEEEEEEDEEGEKKKSNFKCSICEKAFLYEKSFLKHSKHRHGVATEVVYRCDTCGQTFANRCNLKSHQRHVHSSERHFPCELCGKKFKRKKDVKRHVLQVHEGGGERHRCGQCGKGLSSKTALRLHERTHTGDRPYGCTECGARFSQPSALKTHMRIHTGEKPFVCDECGARFTQNHMLIYHKRCHTGERPFMCETCGKSFASKEYLKHHNRIHTGSKPFKCEVCFRTFAQRNSLYQHIKVHTGERPYCCDQCGKQFTQLNALQRHRRIHTGERPFMCNACGRTFTDKSTLRRHTSIHDKNTPWKSFLVIVDGSPKNDDGHKTEQPDEEYVSSKLSDKLLSFAENGHFHNLAAVQDTVPTMQENSSADTACKADDSVVSQDTLLATTISELSELTPQTDSMPTQLHSLSNME

SEQ ID NO: 6343 - protein, 79 aa, Homo sapiens
MPVAVGPYGQSQPSCFDRVKMGFVMGCAVGMAAGALFGTFSCLRIGMRGRELMGGIGKTMMQSGGTFGTFMAIGMGIRC

SEQ ID NO: 6344 - protein, 1582 aa, Homo sapiens
MGSKRRRATSPSSSVSGDFDDGHHSVSTPGPSRKRRRLSNLPTVDPIAVCHELYNTIRDYKDEQGRLLCELFIRAPKRRNQPDYYEVVSQPIDLMKIQQKLKMEEYDDVNLLTADFQLLFNNAKSYYKPDSPEYKAACKLWDLYLRTRNEFVQKGEADDEDDDEDGQDNQGTVTEGSSPAYLKEILEQLLEAIVVATNPSGRLISELFQKLPSKVQYPDYYAIIKEPIDLKTIAQRIQNGSYKSIHAMAKDIDLLAKNAKTYNEPGSQVFKDANSIKKIFYMKKAEIEHHEMAKSSLRMRTPSNLAAARLTGPSHSKGSLGEERNPTSKYYRNKRAVQGGRLSAITMALQYGSESEEDAALAAARYEEGESEAESITSFMDVSNPFYQLYDTVRSCRNNQGQLIAEPFYHLPSKKKYPDYYQQIKMPISLQQIRTKLKNQEYETLDHLECDLNLMFENAKRYNVPNSAIYKRVLKLQQVMQAKKKELARRDDIEDGDSMISSATSDTGSAKRKSKKNIRKQRMKILFNVVLEAREPGSGRRLCDLFMVKPSKKDYPDYYKIILEPMDLKIIEHNIRNDKYAGEEGMIEDMKLMFRNARHYNEEGSQVYNDAHILEKLLKEKRKELGPLPDDDDMASPKLKLSRKSGISPKKSKYMTPMQQKLNEVYEAVKNYTDKRGRRLSAIFLRLPSRSELPDYYLTIKKPMDMEKIRSHMMANKYQDIDSMVEDFVMMFNNACTYNEPESLIYKDALVLHKVLLETRRDLEGDEDSHVPNVTLLIQELIHNLFVSVMSHQDDEGRCYSDSLAEIPAVDPNFPNKPPLTFDIIRKNVENNRYRRLDLFQEHMFEVLERARRMNRTDSEIYEDAVELQQFFIKIRDELCKNGEILLSPALSYTTKHLHNDVEKERKEKLPKEIEEDKLKREEEKREAEKSEDSSGAAGLSGLHRTYSQDCSFKNSMYHVGDYVYVEPAEANLQPHIVCIERLWEDSAGEKWLYGCWFYRPNETFHLATRKFLEKEVFKSDYYNKVPVSKILGKCVVMFVKEYFKLCPENFRDEDVFVCESRYSAKTKSFKKIKLWTMPISSVRFVPRDVPLPVVRVASVFANADKGDDEKNTDNSEDSRAEDNFNLEKEKEDVPVEMSNGEPGCHYFEQLHYNDMWLKVGDCVFIKSHGLVRPRVGRIEKVWVRDGAAYFYGPIFIHPEETEHEPTKMFYKKEVFLSNLEETCPMTCILGKCAVLSFKDFLSCRPTEIPENDILLCESRYNESDKQMKKFKGLKRFSLSAKVVDDEIYYFRKPIVPQKEPSPLLEKKIQLLEAKFAELEGGDDDIEEMGEEDSEVIEPPSLPQLQTPLASELDLMPYTPPQSTPKSAKGSAKKEGSKRKINMSGYILFSSEMRAVIKAQHPDYSFGELSRLVGTEWRNLETAKKAEYEGVMNQGVAPMVGTPAPGGSPYGQQVGVLGPPGQQAPPPYPGPHPAGPPVIQQPTTPMFVAPPPKTQRLLHSEAYLKYIEGLSAESNSISKWDQTLAARRRDVHLSKEQESRLPSHWLKSKGAHTTMADALWRLRDLMLRDTLNIRQAYNLENV

SEQ ID NO: 6345 - protein, 242 aa, Homo sapiens
MAAATRGCRPWGSLLGLLGLVSAAAAAWDLASLRCTLGAFCECDFRPDLPGLECDLAQHLAGQHLAKALVVKALKAFVRDPAPTKPLVLSLHGWTGTGKSYVSSLLAHYLFQGGLRSPRVHHFSPVLHFPHPSHIERYKKDLKSWVQGNLTACGRSLFLFDEMDKMPPGLMEVLRPFLGSSWVVYGTNYRKAIFIFIRWLLKLGHHGRAPPRRSGALPPAPAAPRPALRAQRAGPAGPGAKG

SEQ ID NO: 6346 - protein, 290 aa, Homo sapiens
MMPQEQYTHHRSTMPGSVGPQVYKVGIYGWRKRCLYFFVLLLMILILVNLAMTIWILKVMNFTIDGMGNLRITEKGLKLEGDSEFLQPLYAKEIQSRPGNALYFKSARNVTVNILNDQTKVLTQLITGPKAVEAYGKKFEVKTVSGKLLFSADNNEVVVGAERLRVLGAEGTVFPKSIETPNVRADPFKELRLESPTRSLVMEAPKGVEINAEAGNMEATCRTELRLESKDGEIKLDAAKIRLPRLPHGSYTPTGTRQKVFEICVCANGRLFLSQAGAGSTCQINTSVCL

SEQ ID NO: 6347 - protein, 165 aa, Homo sapiens
MAGTALKRLMAEYKQLTLNPPEGIVAGPMNEENFFEWEALIMGPEDTCFEFGVFPAILSFPLDYPLSPPKMRFTCEMFHPNIYPDGRVCISILHAPGDDPMGYESSAERWSPVQSVEKILLSVVSMLAEPNDESGANVDASKMWRDDREQFYKIAKQIVQKSLGL

SEQ ID NO: 6348 - protein, 270 aa, Homo sapiens
MMLRLLSSLLLVAVASGYGPPSSRPSSRVVNGEDAVPYSWPWQVSLQYEKSGSFYHTCGGSLIAPDWVVTAGHCISSSRTYQVVLGEYDRAVKEGPEQVIPINSGDLFVHPLWNRSCVACGNDIALIKLSRSAQLGDAVQLASLPPAGDILPNETPCYITGWGRLYTNGPLPDKLQEALLPVVDYEHCSRWNWWGSSVKKTMVCAGGDIRSGCNGDSGGPLNCPTEDGGWQVHGVTSFVSAFGCNTRRKPTVFTRVSAFIDWIEETIASH

SEQ ID NO: 6349 - protein, 1723 aa, Homo sapiens
MREKEQEREEQLMEDKKRKKEDKKKKEATQKVTEQKTKVPEVTKPSLSQPTAASPIGSSPSPPVNGGNNAKRVAVPNGQPPSAARYMPREVPPRFRCQQDHKVLLKRGQPPPPSCMLLGGGAGPPPCTAPGANPNNAQVTGALLQSESGTAPDSTLGGAAASNYANSTWGSGASSNNGTSPNPIHIWDKVIVDGSDMEEWPCIASKDTESSSENTTDNNSASNPGSEKSTLPGSTTSNKGKGSQCQSASSGNECNLGVWKSDPKAKSVQSSNSTTENNNGLGNWRNVSGQDRIGPGSGFSNFNPNSNPSAWPALVQEGTSRKGALETDNSNSSAQVSTVGQTSREQQSKMENAGVNFVVSGREQAQIHNTDGPKNGNTNSLNLSSPNPMENKGMPFGMGLGNTSRSTDAPSQSTGDRKTGSVGSWGAARGPSGTDTVSGQSNSGNNGNNGKEREDSWKGASVQKSTGSKNDSWDNNNRSTGGSWNFGPQDSNDNKWGEGNKMTSGVSQGEWKQPTGSDELKIGEWSGPNQPNSSTGAWDNQKGHPLPENQGNAQAPCWGRSSSSTGSEVGGQSTGSNHKAGSSDSHNSGRRSYRPTHPDCQAVLQTLLSRTDLDPRVLSNTGWGQTQIKQDTVWDIEEVPRPEGKSDKGTEGWESAATQTKNSGGWGDAPSQSNQMKSGWGELSASTEWKDPKNTGGWNDYKNNNSSNWGGGRPDEKTPSSWNENPSKDQGWGGGRQPNQGWSSGKNGWGEEVDQTKNSNWESSASKPVSGWGEGGQNEIGTWGNGGNASLASKGGWEDCKRSPAWNETGRQPNSWNKQHQQQQPPQQPPPPQPEASGSWGGPPPPPPGNVRPSNSSWSSGPQPATPKDEEPSGWEEPSPQSISRKMDIDDGTSAWGDPNSYNYKNVNLWDKNSQGGPAPREPNLPTPMTSKSASDSKSMQDGWGESDGPVTGARHPSWEEEEDGGVWNTTGSQGSASSHNSASWGQGGKKQMKCSLKGGNNDSWMNPLAKQFSNMGLLSQTEDNPSSKMDLSVGSLSDKKFDVDKRAMNLGDFNDIMRKDRSGFRPPNSKDMGTTDSGPYFEKGGSHGLFGNSTAQSRGLHTPVQPLNSSPSLRAQVPPQFISPQVSASMLKQFPNSGLSPGLFNVGPQLSPQQIAMLSQLPQIPQFQLACQLLLQQQQQQQLLQNQRKISQAVRQQQEQQLARMVSALQQQQQQQQRQPGMKHSPSHPVGPKPHLDNMVPNALNVGLPDLQTKGPIPGYGSGFSSGGMDYGMVGGKEAGTESRFKQWTSMMEGLPSVATQEANMHKNGAIVAPGKTRGGSPYNQFDIIPGDTLGGHTGPAGDSWLPAKSPPTNKIGSKSSNASWPPEFQPGVPWKGIQNIDPESDPYVTPGSVLGGTATSPIVDTDHQLLRDNTTGSNSSLNTSLPSPGAWPYSASDNSFTNVHSTSAKFPDYKSTWSPDPIGHNPTHLSNKMWKNHISSRNTTPLPRPPPGLTNPKPSSPWSSTAPRSVRGWGTQDSRLASASTWSDGGSVRPSYWLVLHNLTPQIDGSTLRTICMQHGPLLTFHLNLTQGTALIRYSTKQEAAKAQTALHMCVLGNTTILAEFATDDEVSRFLAQAQPPTPAATPSAPAAGWQSLETGQNQSDPVGPALNLFGGSTGLGQWSSSAGGSSGADLAGASLWGPPNYSSSLWGVPTVEDPHRMGSPAPLLPGDLLGGGSDSI

SEQ ID NO: 6350 - protein, 726 aa, Homo sapiens
MEDRLHMDNGLVPQKIVSVHLQDSTLKEVKDQVSNKQAQILEPKPEPSLEIKPEQDGMEHVGRDDPKALGEEPKQRRGSASGSEPAGDSDRGGGPVEHYHLHLSSCHECLELENSTIESVKFASAENIPDLPYDYSSSLESVADETSPEREGRRVNLTGKAPNILLYVGSDSQEALGRFHEVRSVLADCVDIDSYILYHLLEDSALRDPWTDNCLLLVIATRESIPEDLYQKFMAYLSQGGKVLGLSSSFTFGGFQVTSKGALHKTVQNLVFSKADQSEVKLSVLSSGCRYQEGPVRLSPGRLQGHLENEDKDRMIVHVPFGTRGGEAVLCQVHLELPPSSNIVQTPEDFNLLKSSNFRRYEVLREILTTLGLSCDMKQVPALTPLYLLSAAEEIRDPLMQWLGKHVDSEGEIKSGQLSLRFVSSYVSEVEITPSCIPVVTNMEAFSSEHFNLEIYRQNLQTKQLGKVILFAEVTPTTMRLLDGLMFQTPQEMGLIVIAARQTEGKGRGGNVWLSPVGCALSTLLISIPLRSQLGQRIPFVQHLMSVAVVEAVRSIPEYQDINLRVKWPNDIYYSDLMKIGGVLVNSTLMGETFYILIGCGFNVTNSNPTICINDLITEYNKQHKAELKPLRADYLIARVVTVLEKLIKEFQDKGPNSVLPLYYRYWVHSGQQVHLGSAEGPKVSIVGLDDSGFLQVHQEGGEVVTVHPDGNSFDMLRNLILPKRR

SEQ ID NO: 6351 - protein, 188 aa, Homo sapiens [sequence omitted]

SEQ ID NO: 6352 - protein, 243 aa, Homo sapiens
MAEISRIQYEMEYTEGISQRMRVPEKLKVAPPNADLEQGFQEGVPNASVIMQVPERIVVAGNNEDVSFSRPADLDLIQSTPFKPLALKTPPRVLTLSERPLDFLDLERPPTTPQNEEIRAVGRLKRERSMSENAVRQNGQLVRNDSLWHRSDSAPRNKISRFQAPISAPEYTYGISNIDTTIEGTSDDLTVVDAASLRRQIIKLNRRLQLLEEENKERAKREMVMYSITVAFWLLNSWLWFRR

SEQ ID NO: 6353 - protein, 1058 aa, Homo sapiens
MSSSPLSKKRRVSGPDPKPGSNCSPAQSVLSEVPSVPTNGMAKNGSEADIDEGLYSRQLYVLGHEAMKRLQTSSVLVSGLRGLGVEIAKNIILGGVKAVTLHDQGTAQWADLSSQFYLREEDIGKNRAEVSQPRLAELNSYVPVTAYTGPLVEDFLSGFQVVVLTNTPLEDQLRVGEFCHNRGIKLVVADTRGLFGQLFCDFGEEMILTDSNGEQPLSAMVSMVTKDNPGVVTCLDEARHGFESGDFVSFSEVQGMVELNGNQPMEIKVLGPYTFSICDTSNFSDYIRGGIVSQVKVPKKISFKSLVASLAEPDFVVTDFAKFSRPAQLHIGFQALHQFCAQHGRPPRPRNEEDAAELVALAQAVNARALPAVQQNNLDEDLIRKLAYVAAGDLAPINAFIGGLAAQEVMKACSGKFMPIMQWLYFDALECLPEDKEVLTEDKCLQRQNRYDGQVAVFGSDLQEKLGKQKYFLVGAGAIGCELLKNFAMIGLGCGEGGEIIVTDMDTIEKSNLNRQFLFRPWDVTKLKSDTAAAAVRQMNPHIRVTSHQNRVGPDTERIYDDDFFQNLDGVANALDNVDARMYMDRRCVYYRKPLLESGTLGTKGNVQVVIPFLTESYSSSQDPPEKSIPICTLKNFPNAIEHTLQWARDEFEGLFKQPAENVNQYLTDPKFVERTLRLAGTQPLEVLEAVQRSLVLQRPQTWADCVTWACHHWHTQYSNNIRQLLHNFPPDQLTSSGAPFWSGPKRCPHPLTFDVNNPLHLDYVMAAANLFAQTYGLTGSQDRAAVATFLQSVQVPEFTPKSGVKIHVSDQELQSANASVDDSRLEELKATLPSPDKLPGFKMYPIDFEKDDDSNFHMDFIVAASNLRAENYDIPSADRHKSKLIAGKIIPAIATTTAAVVGLVCLELYKVVQGHRQLDSYKNGFLNLALPFFGFSEPLAAPRHQYYNQEWTLWDRFEVQGLQPNGEEMTLKQFLDYFKTEHKLEITMLSQGVSMLYSFFMPAAKLKERLDQPMTEIVSRVSKRKLGRHVRALVLELCCNDESGEDVEVPYVRYTIR

SEQ ID NO: 6354 - protein, 708 aa, Homo sapiens
MATSTSTEAKSASWWNYFFLYDGSKVKEEGDPTRAGICYFYPSQTLLDQQELLCGQIAGVVRCVSDISDSPPTLVRLRKLKFAIKVDGDYLWVLGCAVELPDVSCKRFLDQLVGFFNFYNGPVSLAYENCSQEELSTEWDTFIEQILKNTSDLHKIFNSLWNLDQTKVEPLLLLKAARILQTCQRSPHILAGCILYKGLIVSTQLPPSLTAKVLLHRTAPQEQRLPTGEDAPQEHGAALPPNVQIIPVFVTKEEAISLHEFPVEQMTRSLASPAGLQDGSAQHHPKGGSTSALKENATGHVESMAWTTPDPTSPDEACPDGRKENGCLSGHDLESIRPAGLHNSARGEVLGLSSSLGKELVFLQEELDLSEIHIPEAQEVEMASGHFAFLHVPVPDGRAPYCKASLSASSSLEPTPPEDTAISSLRPPSAPEMLTQHGAQEQLEDHPGHSSQAPIPRADPLPRRTRRPLLLPRLDPGQRGNKLPTGEQGLDEDVDGVCESHAAPGLECSSGSANCQGAGPSADGISSRLTPAESCMGLVRMNLYTHCVKGLVLSLLAEEPLLGDSAAIEEVYHSSLASLNGLEVHLKETLPRDEAASTSSTYNFTHYDRIQSLLMANLPQVATPQDRRFLQAVSLMHSEFAQLPALYEMTVRNASTAVYACCNPIQETYFQQLAPAARSSGFPNPQDGAFSLSGKAKQKLLKHGVNLL

SEQ ID NO: 6355 - protein, 301 aa, Homo sapiens
MGAQLSTLGHMVLFPVWFLYSLLMKLFQRSTPAITLESPDIKYPLRLIDREIISHDTRRFRFALPSPQHILGLPVGQHIYLSARIDGNLVVRPYTPISSDDDKGFVDLVIKVYFKDTHPKFPAGGKMSQYLESMQIGDTIEFRGPSGLLVYQGKGKFAIRPDKKSNPIIRTVKSVGMIAGGTGITPMLQVIRAIMKDPDDHTVCHLLFANQTEKDILLRPELEELRNKHSARFKLWYTLDRAPEAWDYGQGFVNEEMIRDHLPPPEEEPLVLMCGPPPMIQYACLPNLDHVGHPTERCFVF

SEQ ID NO: 6356 - protein, 1005 aa, Homo sapiens
MTTEVGSVSEVKKDSSQLGTDATKEKPKEVAENQQNQSSDPEEEKGSQPPPAAESQSSLRRQKREKETSESRGISRFIPPWLKKQKSYTLVVAKDGGDKKEPTQAVVEEQVLDKEEPLPEEQRQAKGDAEEMAQKKQEIKVEVKEEKPSVSKEEKPSVSKVEMQPTELVSKEREEKVKETQEDKLEGGAAKRETKEVQTNELKAEKASQKVTKKTKTVQCKVTLLDGTEYSCDLEKHAKGQVLFDKVCEHLNLLEKDYFGLLFQESPEQKNWLDPAKEIKRQLRNLPWLFTFNVKFYPPDPSQLTEDITRYFLCLQLRQDIASGRLPCSFVTHALLGSYTLQAELGDYDPEEHGSIDLSEFQFAPTQTKELEEKVAELHKTHRGLSPAQADSQFLENAKRLSMYGVDLHHAKDSEGVDIKLGVCANGLLIYKDRLRINRFAWPKILKISYKRSNFYIKVRPAELEQFESTIGFKLPNHRAAKRLWKVCVEHHTFYRLVSPEQPPKAKFLTLGSKFRYSGRTQAQTRQASTLIDRPAPHFERTSSKRVSRSLDGAPIGVMDQSLMKDFPGAAGEISAYGPGLVSIAVVQDGDGRREVRSPTKAPHLQLIEGKKNSLRVEGDNIYVRHSNLMLEELDKAQEDILKHQASISELKRNFMESTPEPRPNEWEKRRITPLSLQTQGSSHETLNIVEEKKRAEVGKDERVITEEMNGKEISPGSGPGEIRKVEPVTQKDSTSLSSESSSSSSESEEEDVGEYRPHHRVTEGTIREEQEYEEEVEEEPRPAAKVVEREEAVPEASPVTQAGASVITVETVIQENVGAQKIPGEKSVHEGALKQDMGEEAEEEPQKVNGEVSHVDIDVLPQIICCSEPPVVKTEMVTISDASQRTEISTKEVPIVQTETKTITYESPQIDGGAGGDSGTLLTAQTITSESVSTTTTTHITKTVKGGISETRIEKRIVITGDGDIDHDQALAQAIREAREQHPDMSVTRVVVHKETELAEEGED

SEQ ID NO: 6357 - protein, 1447 aa, Homo sapiens
MFRAGEASKRPLPGPSPPRVRSVEVARGRAGYGFTLSGQAPCVLSCVMRGSPADFVGLRAGDQILAVNEINVKKASHEDVVKLIGKCSGVLHMVIAEGVGRFESCSSDEEGGLYEGKGWLKPKLDSKALGINRAERVVEEMQSGGIFNMIFENPSLCASNSEPLKLKQRSLSESAATRFDVGHESINNPNPNMLSKEEISKVIHDDSVFSIGLESHDDFALDASILNVAMIVGYLGSIELPSTSSNLESDSLQAIRGCMRRLRAEQKIHSLVTMKIMHDCVQLSTDKAGVVAEYPAEKLAFSAVCPDDRRFFGLVTMQTNDDGSLAQEEEGALRTSCHVFMVDPDLFNHKIHQGIARRFGFECTADPDTNGCLEFPASSLPVLQFISVLYRDMGELIEGMRARAFLDGDADAHQNNSTSSNSDSGIGNFHQEEKSNRVLVVDLGGSSSRHGPGGSAWDGVGGRGAQPWGAPWTGPFCPDPEGSPPFEAAHQTDRFWDLNKHLGPASPVEVPPASLRSSVPPSKRGTVGAGCGFNQRWLPVHVLREWQCGHTSDQDSYTDSTDGWSSINCGTLPPPMSKIPADRYRVEGSFAQPPLNAPKREWSRKAFGMQSIFGPHRNVRKTKEDKKGSKFGRGTGLTQPSQRTSARRSFGRSKRFSITRSLDDLESATVSDGELTGADLKDCVSNNSLSSNASLPSVQSCRRLRERRVASWAVSFERLLQDPVGVRYFSDFLRKEFSEENILFWQACEYFNHVPAHDKKELSYRAREIFSKFLCSKATTPVNIDSQAQLADDVLRAPHPDMFKEQQLQIFNLMKFDSYTRFLKSPLYQECILAEVEGRALPDSQQVPSSPASKHSLGSDHSSVSTPKKLSGKSKSGRSLNEELGDEDSEKKRKGAFFSWSRTRSTGRSQKKREHGDHADDALHANGGLCRRESQGSVSSAGSLDLSEACRTLAPEKDKATKHCCIHLPDGTSCVVAVKAGFSIKDILSGLCERHGINGAAADLFLVGGDKPLVLHQDSSILESRDLRLEKRTLFRLDLVPINRSVGLKAKPTKPVTEVLRPVVARYGLDLSGLLVRLSGEKEPLDLGAPISSLDGQRVVLEEKDPSRGKASADKQKGVPVKQNTAVNSSSRNHSATGEERTLGKSNSIKIKGENGKNARDPRLSKREESIAKIGKKKYQKINLDEAEEFFELISKAQSNRADDQRGLLRKEDLVLPEFLRLPPGSTELTLPTPAAVAKGFSKRSATGNGRESASQPGEQWEPVQESSDSPSTSPGSASSPPGPPGTTPPGQKSPSGPFCTPQSPVSLAQEGTAQIWKRQSQEVEAGGIQTVEDEHVAELTLMGEGDISSPNSTLLPPPSTPQEVPGPSRPGSGTHGSRDLPVNRIIDVDLVTGSAPGRDGGIAGAQAGPGRSQASGGPPTSDLPGLGPVPGEPAKPKTSAHHATFV

SEQ ID NO: 6358 - protein, 1278 aa, Homo sapiens
MRTGSAASSAAAAAAAAAASASPATGVCMKTPGGGRRGIRRDPGAEPGAAALRGPRQRPILSRLTNNSRIVGLLAQLEKINAEPSESDTARYVTSKILHLAQSQEKTRREMTAKGSTGMEILLSTLENTKDLQTTLNILSILVELVSAGGGRRVSFLVTKGGSQILLQLLMNASKESPPHEDLMVQIHSILAKIGPKDKKFGVKARINGALNITLNLVKQNLQNHRLVLPCLQLLRVYSANSVNSVSLGKNGVVELMFKIIGPFSKKNSSLIKVALDTLAALLKSKTNARRAVDRGYVQVLLTIYVDWHRHDNRHRNMLIRKGILQSLKSVTNIKLGRKAFIDANGMKILYNTSQECLAVRTLDPLVNTSSLIMRKCFPKNRLPLPTIKSSFHFQLPVIPVTGPVAQLYSLPPEVDDVVDESDDNDDIDVEAENETENEDDLDQNFKNDDIETDINKLKPQQEPGRTIEDLKMYEHLFPELVDDFQDYDLISKEPKPFVFEGKVRGPIVVPTAGEETSGNSGNLRKVVMKENISSKGDEGEKKSTFMDLAKEDIKDNDRTLQQQPGDQNRTISSVHGLNNDIVKALDRITLQNIPSQTAPGFTAEMKKDCSLPLTVLTCAKACPHMATCGNVLFEGRTVQLGKLCCTGVETEDDEDTESNSSVEQASVEVPDGPTLHDPDLYIEIVKNTKSVPEYSEVAYPDYFGHIPPPFKEPILERPYGVQRTKIAQDIERLIHQSDIIDRVVYDLDNPNYTIPEEGDILKFNSKFESGNLRKVIQIRKNEYDLILNSDINSNHYHQWFYFEVSGMRPGVAYRFNIINCEKSNSQFNYGMQPLMYSVQEALNARPWWIRMGTDICYYKNHFSRSSVAAGGQKGKSYYTITFTVNFPHKDDVCYFAYHYPYTYSTLQMHLQKLESAHNPQQIYFRKDVLCETLSGNSCPLVTITAMPESNYYEHICHFRNRPYVFLSARVHPGETNASWVMKGTLEYLMSNNPTAQSLRESYIFKIVPMLNPDGVINGNHRCSLSGEDLNRQWQSPSPDLHPTIYHAKGLLQYLAAVKRLPLVYCDYHGHSRKKNVFMYGCSIKETVWHTNDNATSCDVVEDTGYRTLPKILSHIAPAFCMSSCSFVVEKSKESTARVVVWREIGVQRSYTMESTLCGCDQGKYKGLQIGTRELEEMGAKFCVGLLRLKRLTSPLEYNLPSSLLDFENDLIESSCKVTSPTTYVLDEDEPRFLEEVDYSAESNDELDIELAENVGDYEPSAQEEVLSDSELSRTYLP

SEQ ID NO: 6359 - protein, 162 aa, Homo sapiens
MKETIMNQEKLAKLQAQVRIGGKGTARRKKKVVHRTATADDKKLQFSLKKLGVNNISGIEEVNMFTNQGTVIHFNNPKVQASLAANTFTITGHAETKQLTEMLPSILNQLGADSLTSLRRLAEALPKQSVDGKAPLATGEDDDDEVPDLVENFDEASKNEAN

SEQ ID NO: 6360 - protein, 1204 aa, Homo sapiens
MYVTMMMTDQIPLELPPLLNGEVAMMPHLVNGDAAQQVILVQVNPGETFTIRAEDGTLQCIQGPAEVPMMSPNGSIPPIHVPPGYISQVIEDSTGVRRVVVTPQSPECYPPSYPSAMSPTHHLPPYLTHHPHFIHNSHTAYYPPVTGPGDMPPQFFPQHHLPHTIYGEQEIIPFYGMSTYITREDQYSKPPHKKLKDRQIDRQNRLNSPPSSIYKSSCTTVYNGYGKGHSGGSGGGGSGSGPGIKKTERRARSSPKSNDSDLQEYELEVKRVQDILSGIEKPQVSNIQARAVVLSWAPPVGLSCGPHSGLSFPYSYEVALSDKGRDGKYKIIYSGEELECNLKDLRPATDYHVRVYAMYNSVKGSCSEPVSFTTHSCAPECPFPPKLAHRSKSSLTLQWKAPIDNGSKITNYLLEWDEGKRNSGFRQCFFGSQKHCKLTKLCPAMGYTFRLAARNDIGTSGYSQEVVCYTLGNIPQMPSAPRLVRAGITWVTLQWSKPEGCSPEEVITYTLEIQEDENDNLFHPKYTGEDLTCTVKNLKRSTQYKFRLTASNTEGKSCPSEVLVCTTSPDRPGPPTRPLVKGPVTSHGFSVKWDPPKDNGGSEILKYLLEITDGNSEANQWEVAYSGSATEYTFTHLKPGTLYKLRACCISTGGHSQCSESLPVRTLSIAPGQCRPPRVLGRPKHKEVHLEWDVPASESGCEVSEYSVEMTEPEDVASEVYHGPELECTVGNLLPGTVYRFRVRALNDGGYGPYSDVSEITTAAGPPGQCKAPCISCTPDGCVLVGWESPDSSGADISEYRLEWGEDEESLELIYHGTDTRFEIRDLLPAAQYCCRLQAFNQAGAGPYSELVLCQTPASAPDPVSTLCVLEEEPLDAYPDSPSACLVLNWEEPCNNGSEILAYTIDLGDTSITVGNTTMHVMKDLLPETTYRIRIQAINEIGAGPFSQFIKAKTRPLPPLPPRLECAAAGPQSLKLKWGDSNSKTHAAEDIVYTLQLEDRNKRFISIYRGPSHTYKVQRLTEFTCYSFRIQAASEAGEGPFSETYTFSTTKSVPPTIKAPRVTQLEGNSCEILWETVPSMKGDPVNYILQVLVGRESEYKQVYKGEEATFQISGLQTNTDYRFRVCACRRCLDTSQELSGAFSPSAAFVLQRSEVMLTGDMGSLDDPKMKSMMPTDEQFAAIIVLGFATLSILFAFILQYFLMK

SEQ ID NO: 6361 - protein, 536 aa, Homo sapiens
MNASLESLYSACSMQSDTVPLLQNGQHARSQPRASGPPRSIQPQVSPRQRVQRSQPVHILAVRRLQEEDQQFRTSSLPAIPNPFPELCGPGSPPVLTPGSLPPSQAAAKQDVKVFSEDGTSKVVEILADMTARDLCQLLVYKSHCVDDNSWTLVEHHPHLGLERCLEDHELVVQVESTMASESKFLFRKNYAKYEFFKNPMNFFPEQMVTWCQQSNGSQTQLLQNFLNSSSCPEIQGFLHVKELGKKSWKKLYVCLRRSGLYCSTKGTSKEPRHLQLLADLEDSNIFSLIAGRKQYNAPTDHGLCIKPNKVRNETKELRLLCAEDEQTRTCWMTAFRLLKYGMLLYQNYRIPQQRKALLSPFSTPVRSVSENSLVAMDFSGQTGRVIENPAEAQSAALEEGHAWRKRSTRMNILGSQSPLHPSTLSTVIHRTQHWFHGRISREESHRIIKQQGLVDGLFLLRDSQSNPKAFVLTLCHHQKIKNFQILPCEDDGQTFFSLDDGNTKFSDLIQLVDFYQLNKGVLPCKLKHHCIRVAL

SEQ ID NO: 6362 - protein, 301 aa, Homo sapiens
MEDMNEYSNIEEFAEGSKINASKNQQDDGKMFIGGLSWDTSKKDLTEYLSRFGEVVDCTIKTDPVTGRSRGFGFVLFKDAASVDKVLELKEHKLDGKLIDPKRAKALKGKEPPKKVFVGGLSPDTSEEQIKEYFGAFGEIENIELPMDTKTNERRGFCFITYTDEEPVKKLLESRYHQIGSGKCEIKVAQPKEVYRQQQQQQKGGRGAAAGGRGGTRGRGRGQGQNWNQGFNNYYDQGYGNYNSAYGGDQNYSGYGGYDYTGYNYGNYGYGQGYADYSGQQSTYGKASRGGGNHQNNYQPY

SEQ ID NO: 6363 - protein, 454 aa, Homo sapiens
MYNTVWNMEDLDLEYAKTDINCGTDLMFYIEMDPPALPPKPPKPTTVANNGMNNNMSLQDAEWYWGDISREEVNEKLRDTADGTFLVRDASTKMHGDYTLTLRKGGNNKLIKIFHRDGKYGFSDPLTFSSVVELINHYRNESLAQYNPKLDVKLLYPVSKYQQDQVVKEDNIEAVGKKLHEYNTQFQEKSREYDRLYEEYTRTSQEIQMKRTAIEAFNETIKIFEEQCQTQERYSKEYIEKFKREGNEKEIQRIMHNYDKLKSRISEIIDSRRRLEEDLKKQAAEYREIDKRMNSIKPDLIQLRKTRDQYLMWLTQKGVRQKKLNEWLGNENTEDQYSLVEDDEDLPHHDEKTWNVGSSNRNKAENLLRGKRDGTFLVRESSKQGCYACSVVVDGEVKHCVINKTATGYGFAEPYNLYSSLKELVLHYQHTSLVQHNDSLNVTLAYPVYAQQRR

SEQ ID NO: 6364 - protein, 297 aa, Homo sapiens
MFSRAGVAGLSAWTLQPQWIQVRNMATLKDITRRLKSIKNIQKITKSMKMVAAAKYARAERELKPARIYGLGSLALYEKADIKGPEDKKKHLLIGVSSDRGLCGAIHSSIAKQMKSEVATLTAAGKEVMLVGIGDKIRGILYRTHSDQFLVAFKEVGRKPPTFGDASVIALELLNSGYEFDEGSIIFNKFRSVISYKTEEKPIFSLNTVASADSMSIYDDIDADVLQNYQEYNLANIIYYSLKESTTSEQSARMTAMDNASKNASEMIDKLTLTFNRTRQAVITKELIEIISGAAAL

SEQ ID NO: 6365 - protein, 495 aa, Homo sapiens
MAESAPARHRRKRRSTPLTSSTLPSQATEKSSYFQTTEISLWTVVAAIQAVEKKMESQAARLQSLEGRTGTAEKKLADCEKMAVEFGNQLEGKWAVLGTLLQEYGLLQRRLENVENLLRNRNFWILRLPPGSKGEAPKVSRSLENDGVCFTEQEWENLEDWQKELYRNVMESNYETLVSLKVLGQTEGEAELGTEMLGDLEEEGPGGAHPAGGVMIKQELQYTQEGPADLPGEFSCIAEEQAFLSPEQTELWGGQGSSVLLETGPGDSTLEEPVGSRVPSSSRTVGCPKQKSHRQVQLDQECGQGLKLKKDTSRPYECSECEITFRYKQQLATHLRSHSGWGSCTPEEPEESLRPRPRLKPQTKKAKLHQCDVCLRSFSCKVSLVTHQRCHLQEGPSAGQHVQERFSPNSLVALPGHIPWRKSRSSLICGYCGKSFSHPSDLVRHQRIHTGERPYSCTECEKSFVQKQHLLQHQKIHQRERGGLALEPGRPNGLL

SEQ ID NO: 6366 - protein, 582 aa, Homo sapiens
MMKLRHKNKKPGEGSKGHKKISWPYPQPAKQNGKKATSKVPSAPHFVHPNDHANREAELKKKWVEEMREKQQAAREQERQKRRTIESYCQDVLRRQEEFEHKEEVLQELNMFPQLDDEATRKAYYKEFRKVVEYSDVILEVLDARDPLGCRCFQMEEAVLRAQGNKKLVLVLNKIDLVPKEVVEKWLDYLRNELPTVAFKASTQHQVKNLNRCSVPVDQASESLLKSKACFGAENLMRVLGNYCRLGEVRTHIRVGVVGLPNVGKSSLINSLKRSRACSVGAVPGITKFMQEVYLDKFIRLLDAPGIVPGPNSEVGTILRNCVHVQKLADPVTPVETILQRCNLEEISNYYGVSGFQTTEHFLTAVAHRLGKKKKGGLYSQEQAAKAVLADWVSGKISFYIPPPATHTLPTHLSAEIVKEMTEVFDIEDTEQANEDTMECLATGESDELLGDTDPLEMEIKLLHSPMTKIADAIENKTTVYKIGDLTGYCTNPNRHQMGWAKRNVDHRPKSNSMVDVCSVDRRSVLQRIMETDPLQQGQALASALKNKKKMQKRADKIASKLSDSMMSALDLSGNADDGVGD

SEQ ID NO: 6367 - protein, 275 aa, Homo sapiens
MWPLTALLLLVPSSGQAATLEKPILSLHPPWTTIFKGERVTLKCDGYHPLLLELQPISTLWYLGHLLLPSHKKSIEVQTPGVYRCQTRGAPVSDPIHLSVSNDWLILQVPYAPVFEGEPLVLRCRGWYDKVVYKLHYYHDGQAVRYFHSSANYTVLQARASDSGRYQCSGTMRIPVESAPMFSAKVAVTVQEARHAAAVRVLQVQPRGAPLRLGRRVHSPGARGRGARIVLVRGGYRHPQCPETQSVAAAPGAGFSPGPGLHHRPSSMGRSLGSW

SEQ ID NO: 6368 - protein, 445 aa, Homo sapiens
MALVDKHKVKRQRLDRICEGIRPQIMNGPLHPRPLVALLDGRDCTVEMPILKDLATVAFCDAQSTQEIHEKVLNEAVGAMMYHTITLTREDLEKFKALRVIVRIGSGYDNVDIKAAGELGIAVCNIPSAAVEETADSTICHILNLYRRNTWLYQALREGTRVQSVEQIREVASGAARIRGETLGLIGFGRTGQAVAVRAKAFGFSVIFYDPYLQDGIERSLGVQRVYTLQDLLYQSDCVSLHCNLNEHNHHLINDFTIKQMRQGAFLVNAARGGLVDEKALAQALKEGRIRGAALDVHESEPFSFAQGPLKDAPNLICTPHTAWYSEQASLEMREAAATEIRRAITGRIPESLRNCVNKEFFVTSAPWSVIDQQAIHPELNGATYRYPPGIVGVAPGGLPAAMEGIIPGGIPVTHNLPTVAHPSQAPSPNQPTKHGDNREHPNEQ

SEQ ID NO: 6369 - protein, 1566 aa, Homo sapiens
MTADKDKDKDKEKDRDRDRDREREKRDKARESENSRPRRSCTLEGGAKNYAESDHSEDEDNDNNSATAEESTKKNKKKPPKKKSRYERTDTGEITSYITEDDVVYRPGDCVYIESRRPNTPYFICSIQDFKLVHNSQACCRSPTPALCDPPACSLPVASQPPQHLSEAGRGPVGSKRDHLLMNVKWYYRQSEVPDSVYQHLVQDRHNENDSGRELVITDPVIKNRELFISDYVDTYHAAALRGKCNISHFSDIFAAREFKARVDSFFYILGYNPETRRLNSTQGEIRVGPSHQAKLPDLQPFPSPDGDTVTQHEELVWMPGVNDCDLLMYLRAARSMAAFAGMCDGGSTEDGCVAASRDDTTLNALNTLHESGYDAGKALQRLVKKPVPKLIEKCWTEDEVKRFVKGLRQYGKNFFRIRKELLPNKETGELITFYYYWKKTPEAASSRAHRRHRRQAVFRRIKTRTASTPVNTPSRPPSSEFLDLSSASEDDFDSEDSEQELKGYACRHCFTTTSKDWHHGGRENILLCTDCRIHFKKYGELPPIEKPVDPPPFMFKPVKEEDDGLSGKHSMRTRRSRGSMSTLRSGRKKQPASPDGRTSPINEDIRSSGRNSPSAASTSSNDSKAETVKKSAKKVKEEASSPLKSNKRQREKVASDTEEADRTSSKKTKTQEISRPNSPSEGEGESSDSRSVNDEGSSDPKDIDQDNRSTSPSIPSPQDNESDSDSSAQQQMLQAQPPALQAPTGVTPAPSSAPPGTPQLPTPGPTPSATAVPPQGSPTASQAPNQPQAPTAPVPHTHIQQAPALHPQRPPSPHPPPHPSPHPPLQPLTGSAGQPSAPSHAQPPLHGQGPPGPHSLQAGPLLQHPGPPQPFGLPPQASQGQAPLGTSPAAAYPHTSLQLPASQSALQSQQPPREQPLPPAPLAMPHIKPPPTTPIPQLPAPQAHKHPPHLSGPSPFSMNANLPPPPALKPLSSLSTHHPPSAHPPPLQLMPQSQPLPSSPAQPPGLTQSQNLPPPPASHPPTGLHQVAPQPPFAQHPFVPGGPPPITPPTCPSTSTPPAGPGTSAQPPCSGAAASGGSIAGGSSCPLPTVQIKEEALDDAEEPESPPPPPRSPSPEPTVVDTPSHASQSARFYKHLDRGYNSCARTDLYFMPLAGSKLAKKREEAIEKAKREAEQKAREEREREKEKEKEREREREREREAERAAKASSSAHEGRLSDPQLSGPGHMRPSFEPPPTTIAAVPPYIGPDTPALRTLSEYARPHVMSPTNRNHPFYMPLNPTDPLLAYHMPGLYNVDPTIRERELREREIREREIRERELRERMKPGFEVKPPELDPLHPAANPMEHFARHSALTIPPTAGPHPFASFHPGLNPLERERLALAGPQLRPEMSYPDRLAAERIHAERMASLTSDPLARLQMFNVTPHHHQHSHIHSHLHLHQQDPLHQGSAGPVHPLVDPLTAGPHLARFPYPPGTLPNPLLGQPPHEHEMLRHPVFGTPYPRDLPGAIPPPMSAAHQLQAMHAQSAELQRLAMEQQWLHGHPHMHGGHLPSQEDYYSRLKKEGDKQL

SEQ ID NO: 6370 - protein, 696 aa, Homo sapiens
MESEYVLCNWKDQLWPAKVLSRSETSSNSKRKKAFSLEVQILSLDEKIKLDSTETKILNKSQIEAIAASLGLQSEDSAPPTEETAYGRSLKVALGILNERTNLSQASTSDEEEITMLSQNVPQKQSDSPPHKKYRKDEGDLPGCLEERENSACLLASSESDDSLYDDKSQAPTMVDTIPSEVETKSLQNSSWCETFPSLSEDNDEKENKNKIDISAVMSVHSAVKEESACVKDEKFAPPLSPLSSDMLIMPKALKEESEDTCLETLAVPSECSAFSENIEDPGEGPSNPCLDTSQNQPSMESEMGAAACPGSCSRECEVSFSASNPVWDYSHLMSSERNFQRLDFEELEEEGQASDKSLLPSRINLSLLDDDEEDEELPRFILHYETHPFETGMIVWFKYQKYPFWPAVIKSIRRKERKASVLFVEANMNSEKKGIRVNFRRLKKFDCKEKQMLVDKAREDYSESIDWCISLICDYRVRIGCGSFTGSLLEYYAADISYPVRKETKQDTFRNKFPKLHNEDAREPMAVTSQTKKMSFQKILPDRMKAARDRANKNLVDFIVNAKGTENHLLAIVNGTKGSRWLKSFLNANRFTPCIETYFEDEDQLDEVVKYLQEVCNQIDQIMPTWIKDDKIKFILEVLLPEAIICSISAVDGLDYEAAEAKYLKGPCLGYRERELFDAKIIYEKRRKAPTNEAH

SEQ ID NO: 6371 - protein, 238 aa, Homo sapiens
MEYAMKSLSLLYPKSLSRHVSVRTSVVTQQLLSEPSPKAPRARPCRVSTADRSVRKGIMAYSLEDLLLKVRDTLMLADKPFFLVLEEDGTTVETEEYFQALAGDTVFMVLQKGQKWQPPSEQGTRHPLSLSHKPAKKIDVARVTFDLYKLNPQDFIGCLNVKATFYDTYSLSYDLHCCGAKRIMKEAFRWALFSMQATGHVLLGTSCYLQQLLDATEEGQPPKGKASSLIPTCLKILQ

SEQ ID NO: 6372 - protein, 873 aa, Homo sapiens
MGGALGPALLLTSLFGAWAGLGPGQGEQGMTVAVVFSSSGPPQAQFRARLTPQSFLDLPLEIQPLTVGVNTTNPSSLLTQICGLLGAAHVHGIVFEDNVDTEAVAQILDFISSQTHVPILSISGGSAVVLTPKEPGSAFLQLGVSLEQQLQVLFKVLEEYDWSAFAVITSLHPGHALFLEGVRAVADASHVSWRLLDVVTLELGPGGPRARTQRLLRQLDAPVFVAYCSREEAEVLFAEAAQAGLVGPGHVWLVPNLALGSTDAPPATFPVGLISVVTESWRLSLRQKVRDGVAILALGAHSYWRQHGTLPAPAGDCRVHPGPVSPAREAFYRHLLNVTWEGRDFSFSPGGYLVQPTMVVIALNRHRLWEMVGRWEHGVLYMKYPVWPRYSASLQPVVDSRHLTVATLEERPFVIVESPDPGTGGCVPNTVPCRRQSNHTFSSGDVAPYTKLCCKGFCIDILKKLARVVKFSYDLYLVTNGKHGKRVRGVWNGMIGEVYYKRADMAIGSLTINEERSEIVDFSVPFVETGISVMVARSNGTVSPSAFLEPYSPAVWVMMFVMCLTVVAITVFMFEYFSPVSYNQNLTRGKKSGGPAFTIGKSVWLLWALVFNNSVPIENPRGTTSKIMVLVWAFFAVIFLASYTANLAAFMIQEQYIDTVSGLSDKKFQRPQDQYPPFRFGTVPNGSTERNIRSNYRDMHTHMVKFNQRSVEDALTSLKMGKLDAFIYDAAVLNYMAGKDEGCKLVTIGSGKVFATTGYGIAMQKDSHWKRAIDLALLQFLGDGETQKLETVWLSGICQNEKNEVMSSKLDIDNMAGVFYMLLVAMGLALLVFAWEHLVYWKLRHSVPNSSQLDFLLAFSRVGAHPSPHRPKF

SEQ ID NO: 6373 - protein, 696 aa, Homo sapiens
MDADMDYERPNVETIKCVVVGDNAVGKTRLICARACNTTLTQYQLLATHVPTVWAIDQYRVCQEVLERSRDVVDEVSVSLRLWDTFGDHHKDRRFAYGRSDVVVLCFSIANPNSLNHVKSMWYPEIKHFCPRTPVILVGCQLDLRYADLEAVNRARRPLARPIKRGDILPPEKGREVAKELGLPYYETSVFDQFGIKDVFDNAIRAALISRRHLQFWKSHLKKVQKPLLQAPFLPPKAPPPVIKIPECPSMGTNEAACLLDNPLCADVLFILQDQEHIFAHRIYLATSSSKFYDLFLMECEESPNGSEGACEKEKQSRDFQGRILSVDPEEEREEGPPRIPQADQWKSSNKSLVEALGLEAEGAVPETQTLTGWSKGFIGMHREMQVNPISKRMGPMTVVRMDASVQPGPFRTLLQFLYTGQLDEKEKDLVGLAQIAEVLEMFDLRMMVENIMNKEAFMNQEITKAFHVRKANRIKECLSKGTFSDVTFKLDDGAISAHKPLLICSCEWMAAMFGGSFVESANSEVYLPNINKISMQAVLDYLYTKQLSPNLDLDPLELIALANRFCLPHLVALAEQHAVQELTKAATSGVGIDGEVLSYLELAQFHNAHQLAAWCLHHICTNYNSVCSKFRKEIKSKSADNQEYFERHRWPPVWYLKEEDHYQRVKREREKEDIALNKHRSRRKWCFWNSSPAVA

SEQ ID NO: 6374 - protein, 508 aa, Homo sapiens
MSRFVQDLSKAMSQDGASQFQEVIRQELELSVKKELEKILTTASSHEFEHTKKDLDGFRKLFHRFLQEKGPSVDWGKIQRPPEDSIQPYEKIKARGLPDNISSVLNKLVVVKLNGGLGTSMGCKGPKSLIGVRNENTFLDLTVQQIEHLNKTYNTDVPLVLMNSFNTDEDTKKILQKYNHCRVKIYTFNQSRYPRINKESLLPVAKDVSYSGENTEAWYPPGHGDIYASFYNSGLLDTFIGEGKEYIFVSNIDNLGATVDLYILNHLMNPPNGKRCEFVMEVTNKTRADVKGGTLTQYEGKLRLVEIAQVPKAHVDEFKSVSKFKIFNTNNLWISLAAVKRLQEQNAIDMEIIVNAKTLDGGLNVIQLETAVGAAIKSFENSLGINVPRSRFLPVKTTSDLLLVMSNLYSLNAGSLTMSEKREFPTVPLVKLGSSFTKVQDYLRRFESIPDMLELDHLTVSGDVTFGKNVSLKGTVIIIANHGDRIDIPPGAVLENKIVSGNLRILDH

SEQ ID NO: 6375 - protein, 183 aa, Homo sapiens
MMQICDTYNQKHSLFNAMNRFIGAVNNMDQTVMVPSLLRDVPLADPGLDNDVGVEVGGSGGCLEERTPPVPDSGSANGSFFAPSRDMYSHYVLLKSIRNDIEWGVLHQPPPPAGSEEGSAWKSKDILVDLGHLEGADAGEEDLEQQFHYHLRGLHTVLSKLTRKANILTNRYKQEIGFGNWGH

SEQ ID NO: 6376 - protein, 1075 aa, Homo sapiens
MLKPQPLQQPSQPQQPPPTQQAVARRPPGGTSPPNGGLPGPLATSAAPPGPPAAASPCLGPVAAAGSGLRRGAEGILAPQPPPPQQHQERPGAAAIGSARGQSTGKGPPQSPVFEGVYNNSRMLHFLTAVVGSTCDVKVKNGTTYEGIFKTLSSKFELAVDAVHRKASEPAGGPRREDIVDTMVFKPSDVMLVHFRNVDFNYATKDKFTDSAIAMNSKVNGEHKEKVLQRWEGGDSNSDDYDLESDMSNGWDPNEMFKFNEENYGVKTTYDSSLSSYTVPLEKDNSEEFRQRELRAAQLAREIESSPQYRLRIAMENDDGRTEEEKHSAVQRQGSGRESPSLASREGKYIPLPQRVREGPRGGVRCSSSRGGRPGLSSLPPRGPHHLDNSSPGPGSEARGINGGPSRMSPKAQRPLRGAKTLSSPSNRPSGETSVPPPPAVGRMYPPRSPKSAAPAPISASCPEPPIGSAVPTSSASIPVTSSVSDPGVGSISPASPKISLAPTDVKELSTKEPGRTLEPQELARIAGKVPGLQNEQKRFQLEELRKFGAQFKLQPSSSPENSLDPFPPRILKEEPKGKEKEVDGLLTSEPMGSPVSSKTESVSDKEDKPPLAPSGGTEGPEQPPPPCPSQTGSPPVGLIKGEDKDEGPVAEQVKKSTLNPNAKEFNPTKPLLSVNKSTSTPTSPGPRTHSTPSIPVLTAGQSGLYSPQYISYIPQIHMGPAVQAPQMYPYPVSNSVPGQQGKYRGAKGSLPPQRSDQHQPASAPPMMQAAAAAGPPLVAATPYSSYIPYNPQQFPGQPAMMQPMAHYPSQPVFAPMLQSNPRMLTSGSHPQAIVSSSTPQYPSAEQPTPQALYATVHQSYPHHATQLHAHQPQPATTPTGSQPQSQHAAPSPVQHQAGQAPHLGSGQPQQNLYHPGALTGTPPSLPPGPSAQSPQSSFPQPAAVYAIHHQQLPHGFTNMAHVTQAHVQTGITAAPPPHPGAPHPPQVMLLHPPQSHGGPPQGAVPQSGVPALSASTPSPYPYIGHPQGEQPGQAPGFPGGADDRIREFSLAGGIWHGRAEGLQVGQDARVLGGE

SEQ ID NO: 6377 - protein, 263 aa, Homo sapiens
MEESGYESVLCVKPDVHVYRIPPRATNRGYRAAEWQLDQPSWSGRLRITAKGQMAYIKLEDRTSGELFAQAPVDQFPGTAVESVTDSSRYFVIRIEDGNGRRAFIGIGFGDRGDAFDFNVALQDHFKWVKQQCEFAKQAQNPDQGPKLDLGFKEGQTIKLNIANMKKKEGAAGNPRVRPASTGGLSLLPPPPGGKTSTLIPPPGEQLAVGGSLVQPAVAPSSGGAPVPWPQPNPATADIWGDFTKSTGSTSSQTQPGTGWVQF

SEQ ID NO: 6378 - protein, 1330 aa, Homo sapiens
MGTASSLVSPAGGEVIEDTYGAGGGEACEIPVEVKPKARLLRNSFRRGAGAAAGAGPGSLPRGVGAGGLLGASFKSTGSSVPELEYAAAEYERLRKEYEIFRVSKNQELLSMGRREAKLDTENKRLRAELQALQKTYQKILREKESALEAKYQAMERAATFEHDRDKVKRQFKIFRETKENEIQDLLRAKRELESKLQRLQAQGIQVFDPGESDSDDNCTDVTAAGTQCEYWTGGALGSEPSIGSMIQLQQSFRGPEFAHSSIDVEGPFANVNRDDWDIAVASLLQVTPLFSHSLWSNTVRCYLIYTDETQPEMDLFLKDYSPKLKRMCETMGYFFHAVYFPIDVENQYLTVRKWEIEKSSLVILFIHLTLPSLLLEDCEEAFLKNPEGKPRLIFHRLEDGKVSSDSVQQLIDQVSNLNKTSKAKIIDHSGDPAEGVYKTYICVEKIIKQDILGFENTDLETKDLGSEDSIPEEDDFGDVLWDIHDEQEQMETFQQASNSAHELGFEKYYQRLNDLVAAPAPIPPLLVSGGPGSGKSLLLSKWIQLQQKNSPNTLILSHFVGRPMSTSSESSLIIKRLTLKLMQHSWSVSALTLDPAKLLEEFPRWLEKLSARHQGSIIIVIDSIDQVQQVEKHMKWLIDPLPVNVRVIVSVNVETCPPAWRLWPTLHLDPLSPKDAKSIIIAECHSVDIKLSKEQEKKLERHCRSATTCNALYVTLFGKMIARAGRAGNLDKILHQCFQCQDTLSLYRLVLHSIRESMANDVDKELMKQILCLVNVSHNGVSESELMELYPEMSWTFLTSLIHSLYKMCLLTYGCGLLRFQHLQAWETVRLEYLEGPTVTSSYRQKLINYFTLQLSQDRVTWRSADELPWLFQQQGSKQKLHDCLLNLFVSQNLYKRGHFAELLSYWQFVGKDKSAMATEYFDSLKQYEKNCEGEDNMSCLADLYETLGRFLKDLGLLSQAIVPLQRSLEIRETALDPDHPRVAQSLHQLASVYVQWKKFGNAEQLYKQALEISENAYGADHPYTARELEALATLYQKQNKYEQAEHFRKKSFKIHQKAIKKKGNLYGFALLRRRALQLEELTLGKDTPDNARTLNELGVLYYLQNNLETADQFLKRSLEMRERVLGPDHPDCAQSLNNLAALCNEKKQYDKAEELYERALDIRRRALAPDHPSLAYTVKHLAILYKKMGKLDKAVPLYELAVEIRQKSFGPKHPSVATALVNLAVLYSQMKKHVEALPLYERALKIYEDSLGRMHPRVGETLKNLAVLSYEGGDFEKAAELYKRAMEIKEAETSLLGGKAPSRHSSSGDTFSLKTAHSPNVFLQQGQR

SEQ ID NO: 6379 - protein, 688 aa, Homo sapiens
MARKLVMFRDVAIDFSQEEWECLDSAQRDLYRDVMLENYSNLVSLDLPSRCASKDLSPEKNTYETELSQWEMSDRLENCDLEESNSRDYLEAKGKMEKQQENQKEYFRQGMIIYDKMSIFNQHTYLSQHSRCHSTEKPYKCKECGKAFRRASHLTQHQSIHTGEKPYECKQCGKAFSRDSQLSLHQRLHTGEKPYACKECGKAFTQSSQLILHHRIHTGEKPYKCEECGKAFIRSSQLTRHQKVHTGEKPYECKECGKAFTQNSQLTLHQRLHTGEKLYECKECRKVFTQLSQLILHKRIHTGEKPYECKECGKAFICGSQLSQHQKIHNGEKPYECKECGRAFIRGSLLMQHQRIHTGEKPYKCEECGKAFIRGSQLTQHQRIHTNEKPYECKECGKMFSHGSQLTQHQRIHTGEKPYQCKECGKAFNRGSLLTRHQRIHTGEKPYECKECGKTFSRGSELTQHERIHTGEKPYECKECGKSFIRGSQLTQHQRIHTGEKPYECKECRMAFTQSSHLSQHQRLHTGEKPYVCNECGKAFARGLLLIQHQRIHTGEKPYQCKECGKAFIRGSQLTQHQRIHTGEKPYECKECGKAFSHGSQLTLHQRIHTGEKPYECRECRKAFTQSSHLSRHQRIHTGEKPYQCKECGKAFTRGSQLTQHQRIHISEKSFEYKECGIDFSHGSQVYM

SEQ ID NO: 6380 - protein, 193 aa, Homo sapiens
MIQAILVFNNHGKPRLVRFYQRFPEEIQQQIVRETFHLVLKRDDNICNFLEGGSLIGGSDYKLIYRHYATLYFVFCVDSSESELGILDLIQVFVETLDKCFENVCELDLIFHMDKVHYILQEVVMGGMVLETNMNEIVAQIEAQNRLEKSEGGLSAAPARAVSAVKNINLPEIPRNINIGDLNIKVPNLSQFV

SEQ ID NO: 6381 - protein, 1113 aa, Homo sapiens
MFSQVPRTPASGCYYLNSMTPEGQEMYLRFDQTTRRSPYRMSRILARHQLVTKIQQEIEAKEACDWLRAAGFPQYAQLYEDSQFPINIVAVKNDHDFLEKDLVEPLCRRLNTLNKCASMKLDVNFQRKKGDDSDEEDLCISNKWTFQRTSRRWSRVDDLYTLLPRGDRNGSPGGTGMRNTTSSESVLTDLSEPEVCSIHSESSGGSDSRSQPGQCCTDNPVMLDAPLVSSSLPQPPRDVLNHPFHPKNEKPTRARAKSFLKRMETLRGKGAHGRHKGSGRTGGLVISGPMLQQEPESFKAMQCIQIPNGDLQNSPPPACRKGLPCSGKSSGESSPSEHSSSGVSTPCLKERKCHEANKRGGMYLEDLDVLAGTALPDAGDQSRMHEFHSQENLVVHIPKDHKPGTFPKALSIESLSPTDSSNGVNWRTGSISLGREQVPGAREPRLMASCHRASRVSIYDNVPGSHLYASTGDLLDLEKDDLFPHLDDILQHVNGLQEVVDDWSKDVLPELQTHDTLVGEPGLSTFPSPNQITLDFEGNSVSEGRTTPSDVERDVTSLNESEPPGVRDRRDSGVGASLTRPNRRLRWNSFQLSHQPRPAPASPHISSQTASQLSLLQRFSLLRLTAIMEKHSMSNKHGWTWSVPKFMKRMKVPDYKDKAVFGVPLIVHVQRTGQPLPQSIQQALRYLRSNCLDQVGLFRKSGVKSRIHALRQMNENFPENVNYEDQSAYDVADMVKQFFRDLPEPLFTNKLSETFLHIYQYVSKEQRLQAVQAAILLLADENREVLQTLLCFLNDVVNLVEENQMTPMNLAVCLAPSLFHLNLLKKESSPRVIQKKYATGKPDQKDLNENLAAAQGLAHMIMECDRLFEVPHELVAQSRNSYVEAEIHVPTLEELGTQLEESGATFHTYLNHLIQGLQKEAKEKFKGWVTCSSTDNTDLAFKKVGDGNPLKLWKASVEVEAPPSVVLNRVLRERHLWDEDFVQWKVVETLDRQTEIYQYVLNSMAPHPSRDFVVLRTWKTDLPKGMCTLVSLSVEHEEAQLLGGVRAVVMDSQYLIEPCGSGKSRLTHICRIDLKGHSPEWYSKGFGHLCAAEVARIRNSFQPLIAEGPETKI

SEQ ID NO: 6382 - protein, 426 aa, Homo sapiens
MPPKKQAQAGGSKKAEQKKKEKIIEDKTFGLKNKKGAKQQKFIKAVTHQVKFGQQNPRQVAQSEAEKKLKKDDKKKELQELNELFKPVVAAQKISKGADPKSVVCAFFKQGQCTKGDKCKFSHDLTLERKCEKRSVYIDARDEELEKDTMDNWDEKKLEEVVNKKHGEAEKKKPKTQIVCKHFLEAIENNKYGWFWVCPGGGDICMYRHALPPGFVLKKDKKKEEKEDEISLEDLIERERSALGPNVTKITLESFLAWKKRKRQEKIDKLEQDMERRKADFKAGKALVISGREVFEFRPELVNDDDEEADDTRYTQGTGGDEVDDSVSVNDIDLSLYIPRDVDETGITVASLERFSTYTSDKDENKLSEASGGRAENGERSDLEEDNEREGTENGAIDAVPVDENLFTGEDLDELEEELNTLDLEE

SEQ ID NO: 6383 - protein, 918 aa, Homo sapiens
MLTLQTWLVQALFIFLTTESTGELLDPCGYISPESPVVQLHSNFTAVCVLKEKCMDYFHVNANYIVWKTNHFTIPKEQYTIINRTASSVTFTDIASLNIQLTCNILTFGQLEQNVYGITIISGLPPEKPKNLSCIVNEGKKMRCEWDGGRETHLETNFTLKSEWATHKFADCKAKRDTPTSCTVDYSTVYFVNIEVWVEAENALGKVTSDHINFDPVYKVKPNPPHNLSVINSEELSSILKLTWTNPSIKSVIILKYNIQYRTKDASTWSQIPPEDTASTRSSFTVQDLKPFTEYVFRIRCMKEDGKGYWSDWSEEASGITYEDRPSKAPSFWYKIDPSHTQGYRTVQLVWKTLPPFEANGKILDYEVTLTRWKSHLQNYTVNATKLTVNLTNDRYLATLTVRNLVGKSDAAVLTIPACDFQATHPVMDLKAFPKDNMLWVEWTTPRESVKKYILEWCVLSDKAPCITDWQQEDGTVHRTYLRGNLAESKCYLITVTPVYADGPGSPESIKAYLKQAPPSKGPTVRTKKVGKNEAVLEWDQLPVDVQNGFIRNYTIFYRTIIGNETAVNVDSSHTEYTLSSLTSDTLYMVRMAAYTDEGGKDGPEFTFTTPKFAQGEIEAIVVPVCLAFLLTTLLGVLFCFNKRDLIKKHIWPNVPDPSKSHIAQWSPHTPPRHNFNSKDQMYSDGNFTDVSVVEIEANDKKPFPEDLKSLDLFKKEKINTEGHSSGIGGSSCMSSSRPSISSSDENESSQNTSSTVQYSTVVHSGYRHQVPSVQVFSRSESTQPLLDSEERPEDLQLVDHVDGGDGILPRQQYFKQNCSQHESSPDISHFERSKQVSSVNEEDFVRLKQQISDHISQSCGSGQMKMFQEVSAADAFGPGTEGQVERFETVGMEAATDEGMPKSYLPQTVRQGGYMPQ

SEQ ID NO: 6384 - protein, 765 aa, Homo sapiens
MDPVATHSCHLLQQLHEQRIQGLLCDCMLVVKGVCFKAHKNVLAAFSQYFRSLFQNSSSQKNDVFHLDVKNVSGIGQILDFMYTSHLDLNQDNIQVMLDTAQCLQVQNVLSLCHTFLKSATVVQPPGMPCNSTLSLQSTLTPDATCVISENYPPHLLQECSADAQQNKTLDESHPHASPSVNRHHSAGEISKQAPDTSDGSCTELPFKQPNYYYKLRNFYSKQYHKHAAGPSQERVVEQPFAFSTSTDLTTVESQPCAVSHSECILESPEHLPSNFLAQPVNDSAPHPESDATCQQPVKQMRLKKAIHLKKLNFLKSQKYAEQVSEPKSDDGLTKRLESASKNTLEKASSQSAEEKESEEVVSCENFNCISETERPEDPAALEDQSQTLQSQRQYACELCGKPFKHPSNLELHKRSHTGEKPFECNICGKHFSQAGNLQTHLRRHSGEKPYICEICGKRFAASGDVQRHIIIHSGEKPHLCDICGRGFSNFSNLKEHKKTHTADKVFTCDECGKSFNMQRKLVKHRIRHTGERPYSCSACGKCFGGSGDLRRHVRTHTGEKPYTCEICNKCFTRSAVLRRHKKMHCKAGDESPDVLEELSQAIETSDLEKSQSSDSFSQDTSVTLMPVSVKLPVHPVENSVAEFDSHSGGSYCKLRSMIQPHGVSDQEKLSLDPGKLAKPQMQQTQPQAYAYSDVDTPAGGEPLQADGMAMIRSSLAALDNHGGDPLGSRASSTTYRNSEGQFFSSMTLWGLAMKTLQNENELDQ

SEQ ID NO: 6385 - protein, 278 aa, Homo sapiens
MQWLRVRESPGEATGHRVTMGTAALGPVWAALLLFLLMCEIPMVELTFDRAVASGCQRCCDSEDPLDPAHVSSASSSGRPHALPEIRPYINITILKGDKGDPGPMGLPGYMGREGPQGEPGPQGSKGDKGEMGSPGAPCQKRFFAFSVGRKTALHSGEDFQTLLFERVFVNLDGCFDMATGQFAAPLRGIYFFSLNVHSWNYKETYVHIMHNQKEAVILYAQPSERSIMQSQSVMLDLAYGDRVWVRLFKRQRENAIYSNDFDTYITFSGHLIKAEDD

SEQ ID NO: 6386 - protein, 167 aa, Homo sapiens
MAAGSRTSLLLAFALLCLPWLQEAGAVQTVPLSRLFDHAMLQAHRAHQLAIDTYQEFEETYIPKDQKYSFLHDSQTSFCFSDSIPTPSNMEETQQKSNLELLRISLLLIESWLEPVRFLRSMFANNLVYDTSDSDDYHLLKDLEEGIQTLMGVRVAPGVANPGTPLA

SEQ ID NO: 6387 - protein, 327 aa, Homo sapiens
MEVAVPVKQEAEGLALDSPWHRFRRFHLGDAPGPREALGLLRALCRDWLRPEVHTKEQMLELLVLEQFLSALPADTQAWVCSRQPQSGEEAVALLEELWGPAASPDGSSATRVPQDVTQGPGATGGKEDSGMIPLAGTAPGAEGPAPGDSQAVRPYKQEPSSPPLAPGLPAFLAAPGTTSCPECGKTSLKPAHLLRHRQSHSGEKPHACPECGKAFRRKEHLRRHRDTHPGSPGSPGPALRPLPAREKPHACCECGKTFYWREHLVRHRKTHSGARPFACWECGKGFGRREHVLRHQRIHGRAAASAQGAVAPGPDGGGPFPPWPLG

SEQ ID NO: 6388 - protein, 353 aa, Homo sapiens
MAATKRKRRGGFAVQAKKPKRNEIDAEPPAKRHATAEEVEEEERDRIPGPVCKGKWKNKERILIFSSRGINFRTRHLMQDLRMLMPHSKADTKMDRKDKLFVINEVCEMKNCNKCIYFEAKKKQDLYMWLSNSPHGPSAKFLVQNIHTLAELKMTGNCLKGSRPLLSFDPAFDELPHYALLKELLIQIFSTPRYHPKSQPFVDHVFTFTILDNRIWFRNFQIIEEDAALVEIGPRFVLNLIKIFQGSFGGPTLYENPHYQSPNMHRRVIRSITAAKYREKQQVKDVQKLRKKEPKTLLPHDPTADVFVTPAEEKPIEIQWVKPEPKVDLKARKKRIYKRQRKMKQRMDSGKTK

SEQ ID NO: 6389 - protein, 1024 aa, Homo sapiens
MASVPVYCLCRLPYDVTRFMIECDMCQDWFHGSCVGVEEEKAADIDLYHCPNCEVLHGPSIMKKRRGSSKGHDTHKGKPVKTGSPTFVRELRSRTFDSSDEVILKPTGNQLTVEFLEENSFSVPILVLKKDGLGMTLPSPSFTVRDVEHYVGSDKEIDVIDVTRQADCKMKLGDFVKYYYSGKREKVLNVISLEFSDTRLSNLVETPKIVRKLSWVENLWPEECVFERPNVQKYCLMSVRDSYTDFHIDFGGTSVWYHVLKGEKIFYLIRPTNANLTLFECWSSSSNQNEMFFGDQVDKCYKCSVKQGQTLFIPTGWIHAVLTPVDCLAFGGNFLHSLNIEMQLKAYEIEKRLSTADLFRFPNFETICWYVGKHILDIFRGLRENRRHPASYLVHGGKALNLAFRAWTRKEALPDHEDEIPETVRTVQLIKDLAREIRLVEDIFQQNVGKTSNIFGLQRIFPAGSIPLTRPAHSTSVSMSRLSLPSKNGSKKKGLKPKELFKKAERKGKESSALGPAGQLSYNLMDTYSHQALKTGSFQKAKFNITGACLNDSDDDSPDLDLDGNESPLALLMSNGSTKRVKSLSKSRRTKIAKKVDKARLMAEQVMEDEFDLDSDDELQIDERLGKEKATLIIRPKFPRKLPRAKPCSDPNRVREPGEVEFDIEEDYTTDEDMVEGVEGKLGNGSGAGGILDLLKASRQVGGPDYAALTEAPASPSTQEAIQGMLCMANLQSSSSSPATSSLQAWWTGGQDRSSGSSSSGLGTVSNSPASQRTPGKRPIKRPAYWRTESEEEEENASLDEQDSLGACFKDAEYIYPSLESDDDDPALKSRPKKKKNSDDAPWSPKARVTPTLPKQDRPVREGTRVASIETGLAAAAAKLAQQELQKAQKKKYIKKKPLLKEVEQPRPQDSNLSLTVPAPTVAATPQLVTSSSPLPPPEPKQEALSGSLADHEYTARPNAFGMAQANRSTTPMAPGVFLTQRRPSVGSQSNQAGQGKRPKKGLATAKQRLGRILKIHRNGKLLL

SEQ ID NO: 6390 - protein, 858 aa, Homo sapiens
MFTLAEVASLNDIQPTYRILKPWWDVFMDYLAVVMLMVAIFAGTMQLTKDQVVCLPVLPSPVNSKAHTPPGNAEVTTNIPKMEAATNQDQDGRTTNDISFGTSAVTPDIPLRATYPRTDFALPNQEAKKEKKDPTGRKTNLDFQQYVFINQMCYHLALPWYSKYFPYLALIHTIILMVSSNFWFKYPKTCSKVEHFVSILGKCFESPWTTKALSETACEDSEENKQRITGAQTLPKHVSTSSDEGSPSASTPMINKTGFKFSAEKPVIEVPSMTILDKKDGEQAKALFEKVRKFRAHVEDSDLIYKLYVVQTVIKTAKFIFILCYTANFVNAISFEHVCKPKVEHLIGYEVFECTHNMAYMLKKLLISYISIICVYGFICLYTLFWLFRIPLKEYSFEKVREESSFSDIPDVKNDFAFLLHMVDQYDQLYSKRFGVFLSEVSENKLREISLNHEWTFEKLRQHISRNAQDKQELHLFMLSGVPDAVFDLTDLDVLKLELIPEAKIPAKISQMTNLQELHLCHCPAKVEQTAFSFLRDHLRCLHVKFTDVAEIPAWVYLLKNLRELYLIGNLNSENNKMIGLESLRELRHLKILHVKSNLTKVPSNITDVAPHLTKLVIHNDGTKLLVLNSLKKMMNVAELELQNCELERIPHAIFSLSNLQELDLKSNNIRTIEEIISFQHLKRLTCLKLWHNKIVTIPPSITHVKNLESLYFSNNKLESLPVAVFSLQKLRCLDVSYNNISMIPIEIGLLQNLQHLHITGNKVDILPKQLFKCIKLRTLNLGQNCITSLPEKVGQLSQLTQLELKGNCLDRLPAQLGQCRMLKKSGLVVEDHLFDTLPLEVKEALNQDINIPFANGI

SEQ ID NO: 6391 - protein, 900 aa, Homo sapiens
MKSVCPVTSGFSSPSPSAAAAAQEVRSATDGNTSTTPPTSAKKRKLNSSSSSSSNSSNEREDFDSTSSSSSTPPLQPRDSASPSTSSFCLGVSVAASSHVPIQKKLRFEDTLEFVGFDAKMAEESSSSSSSSSPTAATSQQQQLKNKSILISSVASVHHANGLAKSSTTVSSFANSKPGSAKKLVIKNFKDKPKLPENYTDETWQKLKEAVEAIQNSTSIKYNLEELYQAVENLCSYKISANLYKQLRQICEDHIKAQIHQFREDSLDSVLFLKKIDRCWQNHCRQMIMIRSIFLFLDRTYVLQNSMLPSIWDMGLELFRAHIISDQKVQNKTIDGILLLIERERNGEAIDRSLLRSLLSMLSDLQIYQDSFEQRFLEETNRLYAAEGQKLMQEREVPEYLHHVNKRLEEEADRLITYLDQTTQKSLIATVEKQLLGEHLTAILQKGLNNLLDENRIQDLSLLYQLFSRVRGGVQVLLQQWIEYIKAFGSTIVINPEKDKTMVQELLDFKDKVDHIIDICFLKNEKFINAMKEAFETFINKRPNKPAELIAKYVDSKLRAGNKEATDEELEKMLDKIMIIFRFIYGKDVFEAFYKKDLAKRLLVGKSASVDAEKSMLSKLKHECGAAFTSKLEGMFKDMELSKDIMIQFKQYMQNQNVPGNIELTVNILTMGYWPTYVPMEVHLPPEMVKLQEIFKTFYLGKHSGRKLQWQSTLGHCVLKAEFKEGKKELQVSLFQTLVLLMFNEGEEFSLEEIKQATGIEDGELRRTLQSLACGKARVLAKNPKGKDIEDGDKFICNDDFKHKLFRIKINQIQMKETVEEQASTTERVFQDRQYQIDAAIVRIMKMRKTLSHNLLVSEVYNQLKFPVKPADLKKRIESLIDRDYMERDKENPNQYNYIA

SEQ ID NO: 6392 - protein, 586 aa, Homo sapiens
MPKPINVRVTTMDAELEFAIQPNTTGKQLFDQVVKTIGLREVWYFGLHYVDNKGFPTWLKLDKKVSAQEVRKENPLQFKFRAKFYPEDVAEELIQDITQKLFFLQVKEGILSDEIYCPPETAVLLGSYAVQAKFGDYNKEVHKSGYLSSERLIPQRVMDQHKLTRDQWEDRIQVWHAEHRGMLKDNAMLEYLKIAQDLEMYGINYFEIKNKKGTDLWLGVDALGLNIYEKDDKLTPKIGFPWSEIRNISFNDKKFVIKPIDKKAPDFVFYAPRLRINKRILQLCMGNHELYMRRRKPDTIEVQQMKAQAREEKHQKQLERQQLETEKKRRETVEREKEQMMREKEELMLRLQDYEEKTKKAERELSEQIQRALQLEEERKRAQEEAERLEADRMAALRAKEELERQAVDQIKSQEQLAAELAEYTAKIALLEEARRRKEDEVEEWQHRAKEAQDDLVKTKEELHLVMTAPPPPPPPVYEPVSYHVQESLQDEGAEPTGYSAELSSEGIRDDRNEEKRITEAEKNERVQRQLLTLSSELSQARDENKRTHNDIIHNENMRQGRDKYKTLRQIRQGNTKQRIDEFEAL

SEQ ID NO: 6393 - protein, 662 aa, Homo sapiens
MAAENEASQESALGAYSPVDYMSITSFPRLPEDEPAPAAPLRGRKDEDAFLGDPDTDPDSFLKSARLQRLPSSSSEMGSQDGSPLRETRKDPFSAAAAECSCRQDGLTVIVTACLTFATGVTVALVMQIYFGDPQIFQQGAVVTDAARCTSLGIEVLSKQGSSVDAAVAAALCLGIVAPHSSGLGGGGVMLVHDIRRNESHLIDFRESAPGALREETLQRSWETKPGLLVGVPGMVKGLHEAHQLYGRLPWSQVLAFAAAVAQDGFNVTHDLARALAEQLPPNMSERFRETFLPSGRPPLPGSLLHRPDLAEVLDVLGTSGPAAFYAGGNLTLEMVAEAQHAGGVITEEDFSNYSALVEKPVCGVYRGHLVLSPPPPHTGPALISALNILEGFNLTSLVSREQALHWVAETLKIALALASRLGDPVYDSTITESMDDMLSKVEAAYLRGHINDSQAAPAPLLPVYELDGAPTAAQVLIMGPDDFIVAMVSSLNQPFGSGLITPSGILLNSQMLDFSWPNRTANHSAPSLENSVQPGKRPLSFLLPTVVRPAEGLCGTYLALGANGAARGLSGLTQVLLNVLTLNRNLSDSLARGRLHPDLQSNLLQVDSEFTEEEIEFLEARGHHVEKVDVLSWVHGSRRTNNFIIAVKDPRSPDAAGATIL

SEQ ID NO: 6394 - protein, 273 aa, Homo sapiens
MTPGTQSPFFLLLLLTVLTVVTGSGHASSTPGGEKETSATQRSSVPSSTEKNALSTGVSFFFLSFHISNLQFNSSLEDPSTDYYQELQRDISEMFLQIYKQGGFLGLSNIKFRPGSVVVQLTLAFREGTINVHDVETQFNQYKTEAASRYNLTISDVSVSDVPFPFSAQSGAGVPGWGIALLVLVCVLVALAIVYLIALAVCQCRRKNYGQLDIFPARDTYHPMSEYPTYHTHGRYVPPSSTDRSPYEKVSAGNGGSSLSYTNPAVAATSANL

SEQ ID NO: 6395 - protein, 564 aa, Homo sapiens
MAELDLMAPGPLPRATAQPPAPLSPDSGSPSPDSGSASPVEEEDVGSSEKLGRETEEQDSDSAEQGDPAGEGKEVLCDFCLDDTRRVKAVKSCLTCMVNYCEEHLQPHQVNIKLQSHLLTEPVKDHNWRYCPAHHSPLSAFCCPDQQCICQDCCQEHSGHTIVSLDAARRDKEAELQCTQLDLERKLKLNENAISRLQANQKSVLVSVSEVKAVAEMQFGELLAAVRKAQANVMLFLEEKEQAALSQANGIKAHLEYRSAEMEKSKQELERMAAISNTVQFLEEYCKFKNTEDITFPSVYVGLKDKLSGIRKVITESTVHLIQLLENYKKKLQEFSKEEEYDIRTQVSAVVQRKYWTSKPEPSTREQFLQYAYDITFDPDTAHKYLRLQEENRKVTNTTPWEHPYPDLPSRFLHWRQVLSQQSLYLHRYYFEVEIFGAGTYVGLTCKGIDRKGEERNSCISGNNFSWSLQWNGKEFTAWYSDMETPLKAGPFRRLGVYIDFPGGILSFYGVEYDTMTLVHKFACKFSEPVYAAFWLSKKENAIRIVDLGEEPEKPAPSLVGTAP

SEQ ID NO: 6396 - protein, 218 aa, Homo sapiens
MNCRSEVLEVSVEGRQVEEAMLAVLHTVLLHRSTGKFHYKKEGTYSIGTVGTQDVDCDFIDFTYVRVSSEELDRALRKVVGEFKDALRNSGGDGLGQMSLEFYQKKKSRWPFSDECIPWEVWTVKVHVVALATEQERQICREKVGEKLCEKIINIVEVMNRHEYLPKMPTQSEVDNVFDTGLRDVQPYLYKISFQITDALGTSVTTTMRRLIKDTLAL

SEQ ID NO: 6397 - protein, 444 aa, Homo sapiens
MREIVHIQAGQCGNQIGAKFWEVISDEHGIDPTGTYHGDSDLQLDRISVYYNEATGGKYVPRAILVDLEPGTMDSVRSGPFGQIFRPDNFVFGQSGAGNNWAKGHYTEGAELVDSVLDVVRKEAESCDCLQGFQLTHSLGGGTGSGMGTLLISKIREEYPDRIMNTFSVVPSPKVSDTVVEPYNATLSVHQLVENTDETYCIDNEALYDICFRTLKLTTPTYGDLNHLVSATMSGVTTCLRFPGQLNADLRKLAVNMVPFPRLHFFMPGFAPLTSRGSQQYRALTVPELTQQVFDAKNMMAACDPRHGRYLTVAAVFRGRMSMKEVDEQMLNVQNKNSSYFVEWIPNNVKTAVCDIPPRGLKMAVTFIGNSTAIQELFKRISEQFTAMFRRKAFLHWYTGEGMDEMEFTEAESNMNDLVSEYQQYQDATAEEEEDFGEEAEEEA

SEQ ID NO: 6398 - protein, 217 aa, Homo sapiens [sequence omitted]

SEQ ID NO: 6399 - protein, 361 aa, Homo sapiens
MVHAEAFSRPLSRNEVVGLIFRLTIFGAVTYFTIKWMVDAIDPTRKQKVEAQKQAEKLMKQIGVKNVKLSEYEMSIAAHLVDPLNMHVTWSDIAGLDDVITDLKDTVILPIKKKHLFENSRLLQPPKGVLLYGPPGCGKTLIAKATAKEAGCRFINLQPSTLTDKWYGESQKLAAAVFSLAIKLQPSIIFIDEIDSFLRNRSSSDHEATAMMKAQFMSLWDGLDTDHSCQVIVMGATNRPQDLDSAIMRRMPTRFHINQPALKQREAILKLILKNENVDRHVDLLEVAQETDGFSGSDLKEMCRDAALLCVREYVNSTSEESHDEDEIRPVQQQDLHRAIEKMKKSKDAAFQNVLTHVCLD

SEQ ID NO: 6400 - protein, 248 aa, Homo sapiens
MAGITTIEAVKRKIQVLQQQADDAEERAERLQREVEGERRAREQAEAEVASLNRRIQLVEEELDRAQERLATALQKLEEAEKAADESERGMKVIENRALKDEEKMELQEIQLKEAKHIAEEADRKYEEVARKLVIIEGDLERTEERAELAESKCSELEEELKNVTNNLKSLEAQAEKYSQKEDKYEEEIKILTDKLKEAETRAEFAERSVAKLEKTIDDLEDKLKCTKEEHLCTQRMLDQTLLDLNEM

SEQ ID NO: 6401 - protein, 188 aa, Homo sapiens
MIIYRDLISHDEMFSDIYKIREIADGLCLEVEGKMVSRTEGNIDDSLIGGNASAEGPEGEGTESTVITGVDIVMNHHLQETSFTKEAYKKYIKDYMKSIKGKLEEQRPERVKPFMTGAAEQIKHILANFKNYQFFIGENMNPDGMVALLDYREDGVTPYMIFFKDGLEMEKCVSTRKWVKINNVKKTF

SEQ ID NO: 6402 - protein, 838 aa, Homo sapiens
MTGAEIEPSAQAKPEKKAGEEVIAGPERENDVPLVVRPKVRTQATTGARPKTETKSVPAARPKTEAQAMSGARPKTEVQVMGGARPKTEAQGITGARPKTDARAVGGARSKTDAKAIPGARPKDEAQAWAQSEFGTEAVSQAEGVSQTNAVAWPLATAESGSVTKSKGLSMDRELVNVDAETFPGTQGQKGIQPWFGPGEETNMGSWCYSRPRAREEASNESGFWSADETSTASSFWTGEETSVRSWPREESNTRSRHRAKHQTNPRSRPRSKQEAYVDSWSGSEDEASNPFSFWVGENTNNLFRPRVREEANIRSKLRTNREDCFESESEDEFYKQSWVLPGEEANSRFRHRDKEDPNTALKLRAQKDVDSDRVKQEPRFEEEVIIGSWFWAEKEASLEGGASAICESEPGTEEGAIGGSAYWAEEKSSLGAVAREEAKPESEEEAIFGSWFWDRDEACFDLNPCPVYKVSDRFRDAAEELNASSRPQTWDEVTVEFKPGLFHGVGFRSTSPFGIPEEASEMLEAKPKNLELSPEGEEQESLLQPDQPSPEFTFQYDPSYRSVREIREHLRARESAESESWSCSCIQCELKIGSEEFEEFLLLMDKIRDPFIHEISKIAMGMRSASQFTRDFIRDSGVVSLIETLLNYPSSRVRTSFLENMIHMAPPYPNLNMIETFICQVCEETLAHSVDSLEQLTGIRMLRHLTMTIDYHTLIANYMSGFLSLLTTANARTKFHVLKMLLNLSENPAVAKKLFSAKALSIFVGLFNIEETNDNIQIVIKMFQNISNIIKSGKMSLIDDDFSLEPLISAFREFEELAKQLQAQIDNQNDPEVGQQS

SEQ ID NO: 6403 - protein, 258 aa, Homo sapiens
MTPPKLRASLSPSLLLLLSGCLLAAARREKGAASNVAEPVPGPTGGSSGRFLSPEQHACSWQLLLPAPEAAAGSELALRCQSPDGARHQCAYRGHPERCAAYAARRAHFWKQVLGGLRKKRRPCHDPAPLQARLCAGKKGHGAELRLVPRASPPARPTVAGFAGESKPRARNRGRTRERASGPAAGTPPPQSAPPKENPSERKTNEGKRKAALVPNEERPMGTGPDPDGLDGNAELTETYCAEKWHSLCNFFVNFWNG

SEQ ID NO: 6404 - protein, 322 aa, Homo sapiens
MNPLTKVKLINELNEREVQLGVADKVSWHSEYKDSAWIFLGGLPYELTEGDIICVFSQYGEIVNINLVRDKKTGKSKGFCFLCYEDQRSTILAVDNFNGIKIKGRTIRVDHVSNYRAPKDSEEIDDVTRQLQEKGCGARTPSPSLSESSEDEKPTKKHKKDKKEKKKKKKEKEKADREVQAEQPSSSSPRRKTVKEKDDTGPKKHSSKNSERAQKSEPREGQKLPKSRTAYSGGAEDLERELKKEKPKHEHKSSSRREAREEKTRIRDRGRSSDAHSSWYNGRSEGRSYRSRSRSRDKSHRHKRARRSRERESSNPSDRWRH

SEQ ID NO: 6405 - protein, 493 aa, Homo sapiens
MNRTKGDEEEYWNSSKFKAFTFDDEDDELSQLKESKRAVNSLRDFVDDDDDDDLERVSWSGEPVGSISWSIRETAGNSGSTHEGREQLKSRNSFSSYAQLPKPTSTYSLSSFFRGRTRPGSFQSLSDALSDTPAKSYAPELGRPKGEYRDYSNDWSPSDTVRRLRKGKVCSLERFRSLQDKLQLLEEAVSMHDGNVITAVLIFLKRTLSKEILFRELEVRQVALRHLIHFLKEIGDQKLLLDLFRFLDRTEELALSHYREHLNIQDPDKRKEFLKTCVGLPFSAEDSAHIQDHYTLLERQIIIEANDRHLESAGQTEIFRKHPRKASILNMPLVTTLFYSCFYHYTEAEGTFSSPVNLKKTFKIPDKQYVLTALAARAKLRAWNDVDALFTTKNWLGYTKKRAPIGFHRVVEILHKNNAPVQILQEYVNLVEDVDTKLNLATKFKCHDVVIDTYRDLKDRQQLLAYRSKVDKGSAEEEKIDALLSSSQIRWKN

SEQ ID NO: 6406 - protein, 758 aa, Homo sapiens
MAPAMQPAEIQFAQRLASSEKGIRDRAVKKLRQYISVKTQRETGGFSQEELLKIWKGLFYCMWVQDEPLLQEELANTIAQLVHAVNNSAAQHLFIQTFWQTMNREWKGIDRLRLDKYYMLIRLVLRQSFEVLKRNGWEESRIKVFLDVLMKEVLCPESQSPNGVRFHFIDIYLDELSKVGGKELLADQNLKFIDPFCKIAAKTKDHTLVQTIARGVFEAIVDQSPFVPEETMEEQKTKVGDGDLSAEEIPENEVSLRRAVSKKKTALGKNHSRKDGLSDERGRDDCGTFEDTGPLLQFDYKAVADRLLEMTSRKNTPHFNRKRLSKLIKKFQDLSEGSSISQLSFAEDISADEDDQILSQGKHKKKGNKLLEKTNLEKEKGSRVFCVEEEDSESSLQKRRRKKKKKHHLQPENPGPGGAAPSLEQNRGREPEASGLKALKARVAEPGAEATSSTGEESGSEHPPAVPMHNKRKRPRKKSPRAHREMLESAVLPPEDMSQSGPSGSHPQGPRGSPTGGAQLLKRKRKLGVVPVNGSGLSTPAWPPLQQEGPPTGPAEGANSHTTLPQRRRLQKKKAGPGSLELCGLPSQKTASLKKRKKMRVMSNLVEHNGVLESEAGQPQALGSSGTCSSLKKQKLRAESDFVKFDTPFLPKPLFFRRAKSSTATHPPGPAVQLNKTPSSSKKVTFGLNRNMTAEFKKTDKSILVSPTGPSRVAFDPEQKPLHGVLKTPTSSPASSPLVAKKPLTTTPRRRPRAMDFF

SEQ ID NO: 6407 - protein, 243 aa, Homo sapiens
MALLPVLFLVTVLLPSLPAEGKDPAFTALLTTQLQVQREIVNKHNELRKAVSPPASNMLKMEWSREVTTNAQRWANKCTLQHSDPEDRKTSTRCGENLYMSSDPTSWSSAIQSWYDEILDFVYGVGPKSPNAVVGHYTQLVWYSTYQVGCGIAYCPNQDSLKYYYVCQYCPAGNNMNRKNTPYQQGTPCAGCPDDCDKGLCTNSCQYQDLLSNCDSLKNTAGCEHELLKEKCKATCLCENKIY

SEQ ID NO: 6408 - protein, 443 aa, Homo sapiens
MDFPCLWLGLLLPLVAALDFNYHRQEGMEAFLKTVAQNYSSVTHLHSIGKSVKGRNLWVLVVGRFPKEHRIGIPEFKYVANMHGDETVGRELLLHLIDYLVTSDGKDPEITNLINSTRIHIMPSMNPDGFEAVKKPDCYYSIGRENYNQYDLNRNFPDAFEYNNVSRQPETVAVMKWLKTETFVLSANLHGGALVASYPFDNGVQATGALYSRSLTPDDDVFQYLAHTYASRNPNMKKGDECKNKMNFPNGVTNGYSWYPLQGGMQDYNYIWAQCFEITLELSCCKYPREEKLPSFWNNNKASLIEYIKQVHLGVKGQVFDQNGNPLPNVIVEVQDRKHICPYRTNKYGEYYLLLLPGSYIINVTVPGHDPHITKVIIPEKSQNFSALKKDILLPFQGQLDSIPVSNPSCPMIPLYRNLPDHSAATKPSLFLFLVSLLHIFFK

SEQ ID NO: 6409 - protein, 306 aa, Homo sapiens
MSEVTRSLLQRWGASFRRGADFDSWGQLVEAIDEYQILARHLQKEAQAQHNNSEFTEEQKKTIGKIATCLELRSAALQSTQSQEEFKLEDLKKLEPILKNILTYNKEFPFDVQPVPLRRILAPGEEENLEFEEDEEEGGAGAGSPDSFPARVPGTLLPRLPSEPGMTLLTIRIEKIGLKDAGQCIDPYITVSVKDLNGIDLTPVQDTPVASRKEDTYVHFNVDIELQKHVEKLTKGAAIFFEFKHYKPKKRFTSTKCFAFMEMDEIKPGPIVIELYKKPTDFKRKKLQLLTKKPLYLHLHQTLHKE

SEQ ID NO: 6410 - protein, 271 aa, Homo sapiens
MRGNLALVGVLISLAFLSLLPSGHPQPAGDDACSVQILVPGLKGDAGEKGDKGAPGRPGRVGPTGEKGDMGDKGQKGSVGRHGKIGPIGSKGEKGDSGDIGPPGPNGEPGLPCECSQLRKAIGEMDNQVSQLTSELKFIKNAVAGVRETESKIYLLVKEEKRYADAQLSCQGRGGTLSMPKDEAANGLMAAYLAQAGLARVFIGINDLEKEGAFVYSDHSPMRTFNKWRSGEPNNAYDEEDCVEMVASGGWNDVACHTTMYFMCEFDKENM

SEQ ID NO: 6411 - protein, 539 aa, Homo sapiens
MEVPQPEPAPGSALSPAGVCGGAQRPGHLPGLLLGSHGLLGSPVRAAASSPVTTLTQTMHDLAGLGSETPKSQVGTLLFRSRSRLTHLSLSRRASESSLSSESSESSDAGLCMDSPSPMDPHMAEQTFEQAIQAASRIIRNEQFAIRRFQSMPDGFVFKMPWKPTHPSSTHALAEWASRREAFAQRPSSAPDLMCLSPDRKMEVEELSPLALGRFSLTPAEGDTEEDDGFVDILESDLKDDDAVPPGMESLISAPLVKTLEKEEEKDLVMYSKCQRLFRSPSMPCSVIRPILKRLERPQDRDTPVQNKRRRSVTPPEEQQEAEEPKARVLRSKSLCHDEIENLLDSDHRELIGDYSKAFLLQTVDGKHQDLKYISPETMVALLTGKFSNIVDKFVIVDCRYPYEYEGGHIKTAVNLPLERDAESFLLKSPIAPCSLDKRVILIFHCEFSSERGPRMCRFIRERDRAVNDYPSLYYPEMYILKGGYKEFFPQHPNFCEPQDYRPMNHEAFKDELKTFRLKTRSWAGERSRRELCSRLQDQ

SEQ ID NO: 6412 - protein, 178 aa, Homo sapiens
MSGGKYVDSEGHLYTVPIREQGNIYKPNNKAMADELSEKQVYDAHTKEIDLVNRDPKHLNDDVVKIDFEDVIAEPEGTHSFDGIWKASFTTFTVTKYWFYRLLSALFGIPMALIWGIYFAILSFLHIWAVVPCIKSFLIEIQCISRVYSIYVHTVCDPLFEAVGKIFSNVRINLQKEI

SEQ ID NO: 6413 - protein, 267 aa, Homo sapiens
MAQEKMELDLEPDTSYGGTLRRSSSAPLIHGLSDLSQVFQPYTLRTRRNSTTIMSRHSLLLSSSPNRIPSSRLHQIKREEGLDMVNRETAHEREMQTAMQISQSWDESLSLSDSDFDKPEKLYSPKRIDFTPVSPAPSPTRGFGKMFVSSSGLPPSPVPSPRRFSSRRSQSPVKCIRPSVLGPLKRKGEMETESQPKRLFQGTTNMLSPDAAQLSDLSSCSDILDGSSSSSGLSSDPLAKGSATAESPVACSNSCSSFILMDDLSPK

SEQ ID NO: 6414 - protein, 1064 aa, Homo sapiens
MVLGTVLLPPNSYGRDQDTSLCCLCTEASESALPDLTDHFASCVEDGFEGDKTGGSSPEALHRPYGCDVEPQALNEAIRWSSKENLLGATESDPNLFVALYDFVASGDNTLSITKGEKLRVLGYNQNGEWSEVRSKNGQGWVPSNYITPVNSLEKHSWYHGPVSRSAAEYLLSSLINGSFLVRESESSPGQLSISLRYEGRVYHYRINTTADGKVYVTAESRFSTLAELVHHHSTVADGLVTTLHYPAPKCNKPTVYGVSPIHDKWEMERTDITMKHKLGGGQYGEVYVGVWKKYSLTVAVKTLKEDTMEVEEFLKEAAVMKEIKHPNLVQLLGVCTLEPPFYIVTEYMPYGNLLDYLRECNREEVTAVVLLYMATQISSAMEYLEKKNFIHRDLAARNCLVGENHVVKVADFGLSRLMTGDTYTAHAGAKFPIKWTAPESLAYNTFSIKSDVWAFGVLLWEIATYGMSPYPGIDLSQVYDLLEKGYRMEQPEGCPPKVYELMRACWKWSPADRPSFAETHQAFETMFHDSSISEEVAEELGRAASSSSVVPYLPRLPILPSKTRTLKKQVENKENIEGAQDATENSASSLAPGFIRGAQASSGSPALPRKQRDKSPSSLLEDAKETCFTRDRKGGFFSSFMKKRNAPTPPKRSSSFREMENQPHKKYELTGLPEQDRMAMTLPRNCQRSKLQLERTVSTSSQPEENVDRANDMLPKKSEESAAPSRERPKAKLLPRGATALPLRTPSGDLAITEKDPPGVGVAGVAAAPKGKEKNGGARLGMAGVPEDGEQPGWPSPAKAAPVLPTTHNHKVPVLISPTLKHTPADVQLIGTDSQGNKFKLLSEHQVTSSGDKDRPRRVKPKCAPPPPPVMRLLQHPSICSDPTEEPTALTAGQSTSETQEGGKKAALGAVPISGKAGRPVMPPPQVPLPTSSISPAKMANGTAGTKVALRKTKQAAEKISADKISKEALLECADLLSSALTEPVPNSQLVDTGHQLLDYCSGYVDCIPQTRNKFAFREAVSKLELSLQELQVSSAAAGVPGTNPVLNNLLSCVQEISDVVQR

SEQ ID NO: 6415 - protein, 405 aa, Homo sapiens
MASDDFDIVIEAMLEAPYKKEEDEQQRKEVKKDYPSNTTSSTSNSGNETSGSSTIGETSNRSRDRDRYRRRNSRSRSPGRQCRHRSRSWDRRHGSESRSRDHRREDRVHYRSPPLATGEPVDNLSPEERDARTVFCMQLAARIRPRDLEDFFSAVGKVRDVRIISDRNSRRSKGIAYVEFCEIQSVPLAIGLTGQRLLGVPIIVQASQAEKNRLAAMANNLQKGNGGPMRLYVGSLHFNITEDMLRGIFEPFGKIDNIVLMKDSDTGRSKGYGFITFSDSECARRALEQLNGFELAGRPMRVGHVTERLDGGTDITFPDGDQELDLGSAGGRFQLMAKLAEGAGIQLPSTAAAAAAAAAQAAALQLNGAVPLGALNPAALTALSPALNLASQCFQLSSLFTPQTM

SEQ ID NO: 6416 - protein, 255 aa, Homo sapiens
MYEILKALDYCHSMGIMHRDVKPHNVMIDHEHRKLRLIDWGLAEFYHPGQEYNVRVASRYFKGPELLVDYQMYDYSLDMWSLGCMLASMIFRKEPFFHGHDNYDQLVRIAKVLGTEDLYDYIDKYNIELDPRFNDILGRHSRKRWERFVHSENQHLVSPEALDFLDKLLRYDHQSRLTAREAMEHPYFYTVVKDQARMGSSSMPGGSTPVSSANMMSGISSVPTPSPLGPLAGSPVIAAANPLGMPVPAAAGAQQ

SEQ ID NO: 6417 - protein, 99 aa, Homo sapiens
MKIPVLPAVVLLSLLVLHSAQGATLGGPEEESTIENYASRPEAFNTPFLNIDKLRSAFKADEFLNWHALFESIKRKLPFLNWDAFPKLKGLRSATPDAQ

SEQ ID NO: 6418 - protein, 122 aa, Homo sapiens
MATGSRTSLLLAFGLLCLPWLQEGSAFPTIPLSRLFDNAMLRAHRLHQLAFDTYQEFRLEDGSPRTGQIFKQTYSKFDTNSHNDDALLKNYGLLYCFRKDMDKVETFLRIVQCRSVEGSCGF

SEQ ID NO: 6419 - protein, 771 aa, Homo sapiens
MEEPGVTPQPYLGLLLEELRRVVAALPEGMRPDSNLYGFPWELVICAAVVGFFAVLFFLWRSFRSVRSRLYVGREKKLALMLSGLIEEKSKLLEKFSLVQKEYEGYEVESSLKDASFEKEATEAQSLEATCEKLNRSNSELEDEILCLEKELKEEKSKHSEQDELMADISKRIQSLEDESKSLKSQVAEAKMTFKIFQMNEERLKIAIKDALNENSQLQESQKQLLQEAEVWKEQVSELNKQKVTFEDSKVHAEQVLNDKESHIKTLTERLLKMKDWAAMLGEDITDDDNLELEMNSESENGAYLDNPPKGALKKLIHAAKLNASLKTLEGERNQIYIQLSEVDKTKEELTEHIKNLQTEQASLQSENTHFENENQKLQQKLKVMTELYQENEMKLHRKLTVEENYRLEKEEKLSKVDEKISHATEELETYRKRAKDLEEELERTIHSYQGQIISHEKKAHDNWLAARNAERNLNDLRKENAHNRQKLTETELKFELLEKDPYALDVPNTAFGREHSPYGPSPLGWPSSETRAFLSPPTLLEGPLRLSPLLPGGGGRGSRGPGNPLDHQITNERGESSCDRLTDPHRAPSDTGSLSPPWDQDRRMMFPPPGQSYPDSALPPQRQDRFCSNSGRLSGPAELRSFNMPSLDKMDGSMPSEMESSRNDTKDDLGNLNVPDSSLPAENEATGPGFVPPPLAPIRGPLFPVDARGPFLRRGPPFPPPPPGAMFGASRDYFPPGDFPGPPPAPFASARSPPGAGAPASGRGLGGPQK

SEQ ID NO: 6420 - protein, 3097 aa, Homo sapiens
MSGSSGGAAAPAASSGPAAAASAAGSGCGGGAGEGAEEAAKDLADIAAFFRSGFRKNDEMKAMDVLPILKEKVAYLSGGRDKRGGPILTFPARSNHDRIRQEDLRRLISYLACIPSEEVCKRGFTVIVDMRGSKWDSIKPLLKILQESFPCCIHVALIIKPDNFWQKQRTNFGSSKFEFETNMVSLEGLTKVVDPSQLTPEFDGCLEYNHEEWIEIRVAFEDYISNATHMLSRLEELQDILAKKELPQDLEGARNMIEEHSQLKKKVIKAPIEDLDLEGQKLLQRIQSSESFPKKNSGSGNADLQNLLPKVSTMLDRLHSTRQHLHQMWHVRKLKLDQCFQLRLFEQDAEKMFDWITHNKGLFLNSYTEIGTSHPHAMELQTQHNHFAMNCMNVYVNINRIMSVANRLVESGHYASQQIRQIASQLEQEWKAFAAALDERSTLLDMSSIFHQKAEKYMSNVDSWCKACGEVDLPSELQDLEDAIHHHQGIYEHITLAYSEVSQDGKSLLDKLQRPLTPGSSDSLTASANYSKAVHHVLDVIHEVLHHQRQLENIWQHRKVRLHQRLQLCVFQQDVQQVLDWIENHGEAFLSKHTGVGKSLHRARALQKRHEDFEEVAQNTYTNADKLLEAAEQLAQTGECDPEEIYQAAHQLEDRIQDFVRRVEQRKILLDMSVSFHTHVKELWTWLEELQKELLDDVYAESVEAVQDLIKRFGQQQQTTLQVTVNVIKEGEDLIQQLRDSAISSNKTPHNSSINHIETVLQQLDEAQSQMEELFQERKIKLELFLQLRIFERDAIDIISDLESWNDELSQQMNDFDTEDLTIAEQRLQHHADKALTMNNLTFDVIHQGQDLLQYVNEVQASGVELLCDRDVDMATRVQDLLEFLHEKQQELDLAAEQHRKHLEQCVQLRHLQAEVKQVLGWIRNGESMLNAGLITASSLQEAEQLQREHEQFQHAIEKTHQSALQVQQKAEAMLQANHYDMDMIRDCAEKVASHWQQLMLKMEDRLKLVNASVAFYKTSEQVCSVLESLEQEYKREEDWCGGADKLGPNSETDHVTPMISKHLEQKEAFLKACTLARRNADVFLKYLHRNSVNMPGMVTHIKAPEQQVKNILNELFQRENRVLHYWTMRKRRLDQCQQYVVFERSAKQALEWIHDNGEFYLSTHTSTGSSIQHTQELLKEHEEFQITAKQTKERVKLLIQLADGFCEKGHAHAAEIKKCVTAVDKRYRDFSLRMEKYRTSLEKALGISSDSNKSSKSLQLDIIPASIPGSEVKLRDAAHELNEEKRKSARRKEFIMAELIQTEKAYVRDLRECMDTYLWEMTSGVEEIPPGIVNKELIIFGNMQEIYEFHNNIFLKELEKYEQLPEDVGHCFVTWADKFQMYVTYCKNKPDSTQLILEHAGSYFDEIQQRHGLANSISSYLIKPVQRITKYQLLLKELLTCCEEGKGEIKDGLEVMLSVPKRANDAMHLSMLEGFDENIESQGELILQESFQVWDPKTLIRKGRERHLFLFEMSLVFSKEVKDSSGRSKYLYKSKLFTSELGVTEHVEGDPCKFALWVGRTPTSDNKIVLKASSIENKQDWIKHIREVIQERTIHLKGALKEPIHIPKTAPATRQKGRRDGEDLDSQGDGSSQPDTISIASRTSQNTLDSDKLSGGCELTVVIHDFTACNSNELTIRRGQTVEVLERPHDKPDWCLVRTTDRSPAAEGLVPCGSLCIAHSRSSMEMEGIFNHKDSLSVSSNDASPPASVASLQPHMIGAQSSPGPKRPGNTLRKWLTSPVRRLSSGKADGHVKKLAHKHKKSREVRKSADAGSQKDSDDSAATPQDETVEERGRNEGLSSGTLSKSSSSGMQSCGEEEGEEGADAVPLPPPMAIQQHSLLQPDSQDDKASSRLLVRPTSSETPSAAELVSAIEELVKSKMALEDRPSSLLVDQGDSSSPSFNPSDNSLLSSSSPIDEMEERKSSSLKRRHYVLQELVETERDYVRDLGYVVEGYMALMKEDGVPDDMKGKDKIVFGNIHQIYDWHRDFFLGELEKCLEDPEKLGSLFVKHERRLHMYIAYCQNKPKSEHIVSEYIDTFFEDLKQRLGHRLQLTDLLIKPVQRIMKYQLLLKDFLKYSKKASLDTSELERAVEVMCIVPRRCNDMMNVGRLQGFDGKIVAQGKLLLQDTFLVTDQDAGLLPRCRERRIFLFEQIVIFSEPLDKKKGFSMPGFLFKNSIKVSCLCLEENVENDPCKFALTSRTGDVVETFILHSSSPSVRQTWIHEINQILENQRNFLNALTSPIEYQRNHSGGGGGGGSGGSGGGGGSGGGGAPSGGSGHSGGPSSCGGAPSTSRSRPSRIPQPVRHHPPVLVSSAASSQAEADKMSGTSTPGPSLPPPGAAPEAGPSAPSRRPPGADAEGSEREAEPIPKMKVLESPRKGAANASGSSPDAPAKDARASLGTLPLGKPRAGAASPLNSPLSSAVPSLGKEPFPPSSPLQKGGSFWSSIPASPASRPGSFTFPGDSDSLQRQTPRHAAPGKDTDRMSTCSSASEQSVQSTQSNGSESSSSSNISTMLVTHDYTAVKEDEINVYQGEVVQILASNQQNMFLVFRAATDQCPAAEGWIPGFVLGHTSAVIVENPDGTLKKSTSWHTALRLRKKSEKKDKDGKREGKLENGYRKSREGLSNKVSVKLLNPNYIYDVPPEFVIPLSEVTCETGETVVLRCRVCGRPKASITWKGPEHNTLNNDGHYSISYSDLGEATLKIVGVTTEDDGIYTCIAVNDMGSASSSASLRVLGPGMDGIMVTWKDNFDSFYSEVAELGRGRFSVVKKCDQKGTKRAVATKFVNKKLMKRDQVTHELGILQSLQHPLLVGLLDTFETPTSYILVLEMADQGRLLDCVVRWGSLTEGKIRAHLGEVLEAVRYLHNCRIAHLDLKPENILVDESLAKPTIKLADFGDAVQLNTTYYIHQLLGNPEFAAPEIILGNPVSLTSDTWSVGVLTYVLLSGVSPFLDDSVEETCLNICRLDFSFPDDYFKGVSQKAKEFVCFLLQEDPAKRPSAALALQEQWLQAGNGRSTGVLDTSRLTSFIERRKHQNDVRPIRSIKNFLQSRLLPRV

SEQ ID NO: 6421 - protein, 446 aa, Homo sapiens
MEVPPATKFGETFAFENRLESQQGLFPGEDLGDPFLQERGLEQMAVIYKEIPLGEQDEENDDYEGNFSLCSSPVQHQSIPPGTRPQDDELFGQTFLQKSDLSMCQIIHSEEPSPCDCAETDRGDSGPNAPHRTPQPAKPYACRECGKAFSQSSHLLRHLVIHTGEKPYECCECGKAFSQSSHLLRHQIIHTGEKPYECRECGKAFRQSSALTQHQKIHTGKRPYECRECGKDFSRSSSLRKHERIHTGERPYQCKECGKSFNQSSGLSQHRKIHTLKKPHECDLCGKAFCHRSHLIRHQRIHTGKKPYKCDECGKAFSQSSNLIEHRKTHTGEKPYKCQKCGKAFSQSSSLIEHQRIHTGEKPYECCQCGKAFCHSSALIQHQRIHTGKKPYTCECGKAFRHRSALIEHYKTHTREKPYVCNLCGKSFRGSSHLIRHQKIHSGEKL

SEQ ID NO: 6422 - protein, 74 aa, Homo sapiens
MFDIKAWAEYVVEWAAKDPYGFLTTVILALTPLFLASAVLSWKLAKMIEAREKEQKKKQKRQENIAKAKRLKKD

SEQ ID NO: 6423 - protein, 335 aa, Homo sapiens
MGHPPLLPLLLLLHTCVPASWGLRCMQCKTNGDCRVEECALGQDLCRTTIVRLWEEGEELELVEKSCTHSEKTNRTLSYRTGLKITSLTEVVCGLDLCNQGNSGRAVTYSRSRYLECISCGSSDMSCERGRHQSLQCRSPEEQCLDVVTHWIQEGEEGRPKDDRHLRGCGYLPGCPGSNGFHNNDTFHFLKCCNTTKCNEGPILELENLPQNGRQCYSCKGNSTHGCSSEETFLIDCRGPMNQCLVATGTHEPKNQSYMVRGCATASMCQHAHLGDAFSMNHIDVSCCTKSGCNHPDLDVQYRSGAAPQPGPAHLSLTITLLMTARLWGGTLLWT

SEQ ID NO: 6424 - protein, 260 aa, Homo sapiens
MSDPITLNVGGKLYTTSLATLTSFPDSMLGAMFSGKMPTKRDSQGNCFIDRDGKVFRYILNFLRTSHLDLPEDFQEMGLLRREADFYQVQPLIEALQEKEVELSKAEKNAMLNITLNQRVQTVHFTVREAPQIYSLSSSSMEVFNANIFSTSCLFLKLLGSKLFYCSNGNLSSITSHLQDPNHLTLDWVANVEGLPEEEYTKQNLKRLWVVPANKQINSFQVFVEEVLKIALSDGFCIDSSHPHALDFMNNKIIRLIRYR

SEQ ID NO: 6425 - protein, 906 aa, Homo sapiens
MQHIFAFFCTGFLGAVVGANFPNNIQIGGLFPNQQSQEHAAFRFALSQLTEPPKLLPQIDIVNISDSFEMTYRFCSQFSKGVYAIFGFYERRTVNMLTSFCGALHVCFITPSFPVDTSNQFVLQLRPELQDALISIIDHYKWQKFVYIYDADRGLSVLQKVLDTAAEKNWQVTAVNILTTTEEGYRMLFQDLEKKKERLVVVDCESERLNAILGQIIKLEKNGIGYHYILANLGFMDIDLNKFKESGANVTGFQLVNYTDTIPAKIMQQWKNSDARDHTRVDWKRPKYTSALTYDGVKVMAEAFQSLRRQRIDISRRGNAGDCLANPAVPWGQGIDIQRALQQVRFEGLTGNVQFNEKGRRTNYTLHVIEMKHDGIRKIGYWNEDDKFVPAATDAQAGGDNSSVQNRTYIVTTILEDPYVMLKKNANQFEGNDRYEGYCVELAAEIAKHVGYSYRLEIVSDGKYGARDPDTKAWNGMVGELVYGRADVAVAPLTITLVREEVIDFSKPFMSLGISIMIKKPQKSKPGVFSFLDPLAYEIWMCIVFAYIGVSVVLFLVSRFSPYEWHSEEFEEGRDQTTSDQSNEFGIFNSLWFSLGAFMQQGCDISPRSLSGRIVGGVWWFFTLIIISSYTANLAAFLTVERMVSPIESAEDLAKQTEIAYGTLEAGSTKEFFRRSKIAVFEKMWTYMKSAEPSVFVRTTEEGMIRVRKSKGKYAYLLESTMNEYIEQRKPCDTMKVGGNLDSKGYGIATPKGSALRGPVNLAVLKLSEQGVLDKLKSKWWYDKGECGSKDSGSKDKTSALSLSNVAGVFYILIGGLGLAMLVALIEFCYKSRSESKRMKGFCLIPQQSINEAIRTSTLPRNSGAGASSGGSGENGRVVSHDFPKSMQSIPCMSHSSGMPLGATGL

SEQ ID NO: 6426 - protein, 670 aa, Homo sapiens
MHLLGPWLLLLVLEYLAFSDSSKWVFEHPETLYAWEGACVWIPCTYRALDGDLESFILFHNPEYNKNTSKFDGTRLYESTKDGKVPSEQKRVQFLGDKNKNCTLSIHPVHLNDSGQLGLRMESKTEKWMERIHLNVSERPFPPHIQLPPEIQESQEVTLTCLLNFSCYGYPIQLQWLLEGVPMRQAAVTSTSLTIKSVFTRSELKFSPQWSHHGKIVTCQLQDADGKFLSNDTVQLNVKHPPKKVTTVIQNPMPIREGDTVTLSCNYNSSNPSVTRYEWKPHGAWEEPSLGVLKIQNVGWDNTTIACAACNSWCSWASPVALNVQYAPRDVRVRKIKPLSEIHSGNSVSLQCDFSSSHPKEVQFFWEKNGRLLGKESQLNFDSISPEDAGSYSCWVNNSIGQTASKAWTLEVLYAPRRLRVSMSPGDQVMEGKSATLTCESDANPPVSHYTWFDWNNQSLPYHSQKLRLEPVKVQHSGAYWCQGTNSVGKGRSPLSTLTVYYSPETIGRRVAVGLGSCLAILILAICGLKLQRRWKRTQSQQGLQENSSGQSFFVRNKKVRRAPLSEGPHSLGCYNPMMEDGISYTTLRFPEMNIPRTGDAESSEMQRPPPDCDDTVTYSALHKRQVGDYENVIPDFPEDEGIHYSELIQFGVGERPQAQENVDYVILKH

SEQ ID NO: 6427 - protein, 383 aa, Homo sapiens
MSPEVALNRISPMLSPFISSVVRNGKVGLDATNCLRITDLKSGCTSLTPGPNCDRFKLHIPYAGETLKWDIIFNAQYPELPPDFIFGEDAEFLPDPSALQNLASWNPSNPECLLLVVKELVQQYHQFQCSRLRESSRLMFEYQTLLEEPQYGENMEIYAGKKNNWTGEFSARFLLKLPVDFSNIPTYLLKDVNEDPGEDVALLSVSFEDTEATQVYPKLYLSPRIEHALGGSSALHIPAFPGGGCLIDYVPQVCHLLTNKVQYVIQGYHKRREYIAAFLSHFGTGVVEYDAEGFTKLTLLLMWKDFCFLVHIDLPLFFPRDQPTLTFQSVYHFTNSGQLYSQAQKNYPYSPRWDGNEMAKRAKAYFKTFVPQFQEAAFANGKL

SEQ ID NO: 6428 - protein, 315 aa, Homo sapiens
MSPGEKLDPIPDSFILQPPVFHPVVPYVTTIFGGLHAGKMVMLQGVVPLDAHSRFQVDFQCGCSLCPRPDIAFHFNPRFHTTKPHVICNTLHGGRWQREARWPHLALRRGSSFLILFLFGNEEVKVSVNGQHFLHFRYRLPLSHVDTLGIFGDILVEAVGFLNINPFVEGSREYPAGHPFLLMSPRLEVPCSHALPQGLSPGQVIIVRGLVLQEPKHFTVSLRDQAAHAPVTLRASFADRTLAWISRWGQKKLISAPFLFYPQRFFEVLLLFQEGGLKLALNGQGLGATSMNQQALEQLRELRISGSVQLYCVHS

SEQ ID NO: 6429 - protein, 100 aa, Homo sapiens
MTRAPLLLLCVALVLLGHVNGATVRNEDKWKPLNNPRNRDLFFRRLQAYFKGRGLDLGTFPNPFPTNENPRPLSFQSELTASASADYEEQKNSFHNYLKG

SEQ ID NO: 6430 - protein, 832 aa, Homo sapiens
MAMRSGRHPSLLLLLVLLLWLLQVSIIDSVQQETDDLTKQTKEKIYQPLRRSKRRWVITTLELEEEDPGPFPKLIGELFNNMSYNMSLMYLISGPGVDEYPEIGLFSLEDHENGRIYVHRPVDREMTPSFTVYFDVVERSTGKIVDTSLIFNIRISDVNDHAPQFPEKEFNITVQENQSAGQPIFQMLAVDLDEENTPNSQVLYFLISQTPLLKESGFRVDRLSGEIRLSGCLDYETAPQFTLLIRARDCGEPSLSSTTTVHVDVQEGNNHRPAFTQENYKVQIPEGRASQGVLRLLVQDRDSPFTSAWRAKFNILHGNEEGHFDISTDPETNEGILNVIKPLDYETRPAQSLIIVVENEERLVFCERGKLQPPRKAAASATVSVQVTDANDPPAFHPQSFIVNKEEGARPGTLLGTFNAMDPDSQIRYELVHDPANWVSVDKNSGVVITVEPIDRESPHVNNSFYVIIIHAVDDGFPPQTATGTLMLFLSDINDNVPTLRPRSRYMEVCESAVHEPLHIEAEDPDLEPFSDPFTFELDNTWGNAEDTWKLGRNWGQSVELLTLRSLPRGNYLVPLFIGDKQGLSQKQTVHVRICPCASGLTCVELADAEVGLHVGALFPVCAAFVALAVALLFLLRCYFVLEPKRHGCSVSNDEGHQTLVMYNAESKGTSAQTWSDVEGQRPALLICTAAAGPTQGVKDLEEVPPSAASQSAQARCALGSWGYGKPFEPRSVKNIHSTPAYPDATMHRQLLAPVEGRMAETLNQKLHVANVLEDDPGYLPHVYSEEGECGGAPSLSSLASLEQELQPDLLDSLGSKATPFEEIYSESGVPS

SEQ ID NO: 6431 - protein, 255 aa, Homo sapiens
MILNKALLLGALALTTVMSPCGGEDIVADHVASCGVNLYQFYGPSGQYTHEFDGDEQFYVDLERKETAWRWPEFSKFGGFDPQGALRNMAVAKHNLNIMIKRYNSTAATNEVPEVTVFSKSPVTLGQPNTLICLVDNIFPPVVNITWLSNGQSVTEGVSETSFLSKSDHSFFKISYLTFLPSADEIYDCKVEHWGLDQPLLKHWEPEIPAPMSELTETVVCALGLSVGLMGIVVGTVFIIQGLRSVGASRHQGPL

SEQ ID NO: 6432 - protein, 329 aa, Homo sapiens
MATGQKLMRAVRVFEFGGPEVLKLRSDIAVPIPKDHQVLIKVHACGVNPVETYIRSGTYSRKPLLPYTPGSDVAGVIEAVGDNASAFKKGDRVFTSSTISGGYAEYALAADHTVYKLPEKLDFKQGAAIGIPYFTAYRALIHSACVKAGESVLVHGASGGVGLAACQIARAYGLKILGTAGTEEGQKIVLQNGAHEVFNHREVNYIDKIKKYVGEKGIDIIIEMLANVNLSKDLSLLSHGGRVIVVGSRGTIEINPRDTMAKESSIIGVTLFSSTKEEFQQYAAALQAGMEIGWLKPVIGSQYPLEKVAEAHENIIHGSGATGKMILLL

SEQ ID NO: 6433 - protein, 400 aa, Homo sapiens
MEVLRPQLIRIDGRNYRKNPVQEQTYQHEEDEEDFYQGSMECADEPCDAYEVEQTPQGFRSTLRAPSLLYNLIHLNTSNDCGFQKITLDCQNIYTWKSRHIVGKRGDTRKKIEMETKTSISIPKPGQDGEIVITGQHRNGVISARTRIDVLLDTFRRKQPFTHFLAFFLNEVEVQEGFLRFQEEVLAKCSMDHGVDSSIFQNPKKLHLTIGMLVLLSEEEIQQTCEMLQQCKEEFINDISGGKPLEVEMAGIEYMNDDPGMVDVLYAKVHMKDGSNRLQELVDRVLERFQASGLIVKEWNSVKLHATVMNTLFRKDPNAEGRYNLYTAEGKYIFKERESFDGRNILKSFALLPRLEYNDAISAHCNLCLPGSSDSPASASQVAGITGVSDAYSQSLPGKS

SEQ ID NO: 6434 - protein, 612 aa, Homo sapiens
MSDKSELKAELERKKQRLAQIREEKKRKEEERKKKETDQKKEAVAPVQEESDLEKKRREAEALLQSMGLTPESPIVPPPMSPSSKSVSTPSEAGSQDSGDGAVGSRRGPIKLGMAKITQVDFPPREIVTYTKETQTPVMAQPKEDEEEDDDVVAPKPPIEPEEEKTLKKDEENDSKAPPHELTEEEKQQILHSEEFLSFFDHSTRIVERALSEQINIFFDYSGRDLEDKEGEIQAGAKLSLNRQFFDERWSKHRVVSCLDWSSQYPELLVASYNNNEDAPHEPDGVALVWNMKYKKTTPEYVFHCQSAVMSATFAKFHPNLVVGGTYSGQIVLWDNRSNKRTPVQRTPLSAAAHTHPVYCVNVVGTQNAHNLISISTDGKICSWSLDMLSHPQDSMELVHKQSKAVAVTSMSFPVGDVNNFVVGSEEGSVYTACRHGSKAGISEMFEGHQGPITGIHCHAAVGAVDFSHLFVTSSFDWTVKLWTTKNNKPLYSFEDNADYVYDVMWSPTHPALFACVDGMGRLDLWNLNNDTEVPTASISVEGNPALNRVRWTHSGREIAVGDSEGQIVIYDVGEQIAVPRNDEWARFGRTLAEINANRADAEEEAATRIPA

SEQ ID NO: 6435 - protein, 340 aa, Homo sapiens
MCAQYCISFADVEKAHINIRDSIHLTPVLTSSILNQLTGRNLFFKCELFQKTGSFKIRGALNAVRSLVPDALERKPKAVVTHSSGNHGQALTYAAKLEGIPAYIVVPQTAPDCKKLAIQAYGASIVYCEPSDESRENVAKRVTEETEGIMVHPNQEPAVIAGQGTIALEVLNQVPLVDALVVPVGGGGMLAGIAITVKALKPSVKVYAAEPSNADDCYQSKLKGKLMPNLYPPETIADGVKSSIGLNTWPIIRDLVDDIFTVTEDEIKCATQLVWERMKLLIEPTAGVGVAAVLSQHFQTVSPEVKNICIVLSGGNVDLTSSITWVKQAERPASYQSVSV

SEQ ID NO: 6436 - protein, 591 aa, Homo sapiens
MGNLALGRKLWADTTCGQNATELYCFYSENTDLTCRQPKCDKCNAAYPHLAHLPSAMADSSFRFPRTWWQSAEDVHREKIQLDLEAEFYFTHLIVMFKSPRPAAMVLDRSQDFGKTWKPYKYFATNCSATFGLEDDVVKKGAICTSKYSSPFPCTGGEVIFKALSPPYDTENPYSAKVQEQLKITNLRVQLLKRQSCPCQRNDLNEEPQHFTHYAIYDFIVKGSCFCNGHADQCIPVHGFRPVKAPGTFHMVHGKCMCKHNTAGSHCQHCAPLYNDRPWEAADGKTGAPNECRTCKCNGHADTCHFDVNVWEASGNRSGGVCDDCQHNTEGQYCQRCKPGFYRDLRRPFSAPDACKPCSCHPVGSAVLPANSVTFCDPSNGDCPCKPGVAGRRCDRCMVGYWGFGDYGCRPCDCAGSCDPITGDCISSHTDIDWYHEVPDFRPVHNKSEPAWEWEDAQGFSALLHSGKCECKEQTLGNAKAFCGMKYSYVLKIKILSAHDKGTHVEVNVKIKKVLKSTKLKIFRGKRTLYPESWTDRGCTCPILNPGLEYLVAGHEDIRTGKLIVNMKSFVQHWKPSLGRKVMDILKRECK

SEQ ID NO: 6437 - protein, 406 aa, Homo sapiens
MLLLLLLLPLLWGTKGMEGDRQYGDGYLLQVQELVTVQEGLCVHVPCSFSYPQDGWTDSDPVHGYWFRAGDRPYQDAPVATNNPDREVQAETQGRFQLLGDIWSNDCSLSIRDARKRDKGSYFFRLERGSMKWSYKSQLNYKTKQLSVFVTDPPWNLTMTVFQGDATASTALGNGSSLSVLEGQSLRLVCAVNSNPPARLSWTRGSLTLCPSRSSNPGLLELPRVHVRDEGEFTCRAQNAQGSQHISLSLSLQNEGTGTSRPVSQVTLAAVGGAGATALAFLSFCIIFIIVRSCRKKSARPAAGVGDTGMEDAKAIRGSASQGPLTESWKDGNPLKKPPPAVAPSSGEEGELHYATLSFHKVKPQDPQGQEATDSEYSEIKIHKRETAETQACLRNHNPSSKEVRG

SEQ ID NO: 6438 - protein, 191 aa, Homo sapiens
MQSIKCVVVGDGAVGKTCLLICYTTNAFPKEYIPTVFDNYSAQSAVDGRTVNLNLWDTAGQEEYDRLRTLSYPQTNVFVICFSIASPPSYENVRHKWHPEVCHHCPDVPILLVGTKKDLRAQPDTLRRLKEQGQAPITPQQGQALAKQIHAVRYLECSALQQDGVKEVFAEAVRAVLNPTPIKRGRSCILL

SEQ ID NO: 6439 - protein, 309 aa, Homo sapiens
MRLGSPGLLFLLFSSLRADTQEKEVRAMVGSDVELSCACPEGSRFDLNDVYVYWQTSESKTVVTYHIPQNSSLENVDSRYRNRALMSPAGMLRGDFSLRLFNVTPQDEQKFHCLVLSQSLGFQEVLSVEVTLHVAANFSVPVVSAPHSPSQDELTFTCTSINGYPRPNVYWINKTDNSLLDQALQNDTVFLNMRGLYDVVSVLRIARTPSVNIGCCIENVLLQQNLTVGSQTGNDIGERDKITENPVSTGEKNAATWSILAVLCLLVVVAVAIGWVCRDRCLQHSYAGAWAVSPETELTESWNLLLLLS

SEQ ID NO: 6440 - protein, 561 aa, Homo sapiens
MSTSWSDRLQNAADMPANMDKHALKKYRREAYHRVFVNRSLAMEKIKCFGFDMDYTLAVYKSPEYESLGFELTVERLVSIGYPQELLSFAYDSTFPTRGLVFDTLYGNLLKVDAYGNLLVCAHGFNFIRGPETREQYPNKFIQRDDTERFYILNTLFNLPETYLLACLVDFFTNCPRYTSCETGFKDGDLFMSYRSMFQDVRDAVDWVHYKGSLKEKTVENLEKYVVKDGKLPLLLSRMKEVGKVFLATNSDYKYTDKIMTYLFDFPHGPKPGSSHRPWQSYFDLILVDARKPLFFGEGTVLRQVDTKTGKLKIGTYTGPLQHGIVYSGGSSDTICDLLGAKGKDILYIGDHIFGDILKSKKRQGWRTFLVIPELAQELHVWTDKSSLFEELQSLDIFLAELYKHLDSSSNERPDISSIQRRIKKVTHDMDMCYGMMGSLFRSGSRQTLFASQVMRYADLYAASFINLLYYPFSYLFRAAHVLMPHESTVEHTHVDINEMESPLATRNRTSVDFKDTDYKRHQLTRSISEIKPPNLFPLAPQEITHCHDEDDDEEEEEEEE

SEQ ID NO: 6441 - protein, 287 aa, Homo sapiens
MSSTLPALLCVGLCLSQRISAQQQTLPKPFIWAEPHFMVPKEKQVTICCQGNYGAVEYQLHFEGSLFAVDRPKPPERINKVQFYIPDMNSRMAGQYSCIYRVGELWSEPSNLLDLVVTEMYDTPTLSVHPGPEVISGEKVTFYCRLDTATSMFLLLKEGRSSHVQRGYGKVQAEFPLGPVTTAHRGTYRCFGSYNNHAWSFPSEPVKLLVTGDIENTSLAPEDPTFPDHALWDHTAQNLLRMGLAFLVLVALVWFLVEDWLSRKRTRERASRASTWEGRRRLNTQTL

SEQ ID NO: 6442 - protein, 277 aa, Homo sapiens
MSKSLKKLVEESREKNQPEVDMSDRGISNMLDVNGLFTLSHITQLVLSHNKLTMVPPNIAELKNLEVLNFFNNQIEELPTQISSLQKLKHLNLGMNRLNTLPRGFGSLPALEVLDLTYNNLSENSLPGNFFYLTTLRALYLSDNDFEILPPDIGKLTKLQILSLRDNDLISLPKEIGELTQLKELHIQGNRLTVLPPELGNLDLTGQKQVFKAENNPWVTPIADQFQLGVSHVFEYIRSETYKYLYGRHMQANPEPPKKNNDKSKKISRKPLAAKNR

SEQ ID NO: 6443 - protein, 673 aa, Homo sapiens
MAEAPASPAPLSPLEVELDPEFEPQSRPRSCTWPLQRPELQASPAKPSGETAADSMIPEEEDDEDDEDGGGRAGSAMAIGGGGGSGTLGSGLLLEDSARVLAPGGQDPGSGPATAAGGLSGGTQALLQPQQPLPPPQPGAAGGSGQPRKCSSRRNAWGNLSYADLITRAIESSPDKRLTLSQIYEWMVRCVPYFKDKGDSNSSAGWKNSIRHNLSLHSRFMRVQNEGTGKSSWWIINPDGGKSGKAPRRRAVSMDNSNKYTKSRGRAAKKKAALQTAPESADDSPSQLSKWPGSPTSRSSDELDAWTDFRSRTNSNASTVSGRLSPIMASTELDEVQDDDAPLSPMLYSSSASLSPSVSKPCTVELPRLTDMAGTMNLNDGLTENLMDDLLDNITLPPSQPSPTGGLMQRSSSFPYTTKGSGLGSPTSSFNSTVFGPSSLNSLRQSPMQTIQENKPATFSSMSHYGNQTLQDLLTSDSLSHSDVMMTQSDPLMSQASTAVSAQNSRRNVMLRNDPMMSFAAQPNQGSLVNQNLLHHQHQTQGALGGSRALSNSVSNMGLSESSSLGSAKHQQQSPVSQSMQTLSDSLSGSSLYSTSANLPVMGHEKFPSDLDLDMFNGSLECDMESIIRSELMDADGLDFNFDSLISTQNVVGLNVGNFTGAKQASSQSWVPG

SEQ ID NO: 6444 - protein, 507 aa, Homo sapiens
MCDIEEATNQLLDVNLHENQKSVQVTESDLGSESELLVTIGATVPTGFEQTAADEVREKLGSSCKISRDRGKIYFVISVESLAQVHCLRSVDNLFVVVQEFQDYQFKQTKEEVLKDFEDLAGKLPWSNPLKVWKINASFKKKKAKRKKINQNSSKEKINNGQEVKIDQRNVKKEFTSHALDSHILDYYENPAIKEDVSTLIGDDLASCKDETDESSKEETEPQVLKFRVTCNRAGEKHCFTSNEAARDFGGAVQDYFKWKADMTNFDVEVLLNIHDNEVIVGIALTEESLHRRNITHFGPTTLRSTLAYGMLRLCDPLPYDIIVDPMCGTGAIPIEGATEWSDCFHIAGDNNPLAVNRAANNIASLLTKSQIKEGKPSWGLPIDAVQWDICNLPLRTGSVDIIVTDLPFGKRMGSKKRNWNLYPACLREMSRVCTPTTGRAVLLTQDTKCFTKALSGMRHVWRKVDTVWVNVGGLRAAVYVLIRTPQAFVHPSEQDGERGTLWQCKE

SEQ ID NO: 6445 - protein, 381 aa, Homo sapiens
MDGVGVPASMYGDPHAPRPIPPVHHLNHGPPLHATQHYGAHAPHPNVMPASMGSAVNDALKRDKDAIYGHPLFPLLALVFEKCELATCTPREPGVAGGDVCSSDSFNEDIAVFAKQVRAEKPLFSSNPELDNLMIQAIQVLRFHLLELEKVHELCDNFCHRYISCLKGKMPIDLVIDERDGSSKSDHEELSGSSTNLADHNPSSWRDHDDATSTHSAGTPGPSSGGHASQSGDNSSEQGDGLDNSVASPGTGDDDDPDKDKKRQKKRGIFPKVATNIMRAWLFQHLTHPYPSEEQKKQLAQDTGLTILQVNNWFINARRRIVQPMIDQSNRAVSQGAAYSPEGQPMGSFVLDGQQHMGIRPAGPMSGMGMNMGMDGQWHYM

SEQ ID NO: 6446 - protein, 2019 aa, Homo sapiens
MGAMTQLLAGVFLAFLALATEGGVLKKVIRHKRQSGVNATLPEENQPVVFNHVYNIKLPVGSQCSVDLESASGEKDLAPPSEPSESFQEHTVDGENQIVFTHRINIPRRACGCAAAPDVKELLSRLEELENLVSSLREQCTAGAGCCLQPATGRLDTRPFCSGRGNFSTEGCGCVCEPGWKGPNCSEPECPGNCHLRGRCIDGQCICDDGFTGEDCSQLACPSDCNDQGKCVNGVCICFEGYAGADCSREICPVPCSEEHGTCVDGLCVCHDGFAGDDCNKPLCLNNCYNRGRCVENECVCDEGFTGEDCSELICPNDCFDRGRCINGTCYCEEGFTGEDCGKPTCPHACHTQGRCEEGQCVCDEGFAGVDCSEKRCPADCHNRGRCVDGRCECDDGFTGADCGELKCPNGCSGHGRCVNGQCVCDEGYTGEDCSQLRCPNDCHSRGRCVEGKCVCEQGFKGYDCSDMSCPNDCHQHGRCVNGMCVCDDGYTGEDCRDRQCPRDCSNRGLCVDGQCVCEDGFTGPDCAELSCPNDCHGQGRCVNGQCVCHEGFMGKDCKEQRCPSDCHGQGRCVDGQCICHEGFTGLDCGQHSCPSDCNNLGQCVSGRCICNEGYSGEDCSEVSPPKDLVVTEVTEETVNLAWDNEMRVTEYLVVYTPTHEGGLEMQFRVPGDQTSTIIQELEPGVEYFIRVFAILENKKSIPVSARVATYLPAPEGLKFKSIKETSVEVEWDPLDIAFETWEIIFRNMNKEDEGEITKSLRRPETSYRQTGLAPGQEYEISLHIVKNNTRGPGLKRVTTTRLDAPSQIEVKDVTDTTALITWFKPLAEIDGIELTYGIKDVPGDRTTIDLTEDENQYSIGNLKPDTEYEVSLISRRGDMSSNPAKETFTTGLDAPRNLRRVSQTDNSITLEWRNGKAAIDSYRIKYAPISGGDHAEVDVPKSQQATTKTTLTGLRPGTEYGIGVSAVKEDKESNPATINAATELDTPKDLQVSETAETSLTLLWKTPLAKFDRYRLNYSLPTGQWVGVQLPRNTTSYVLRGLEPGQEYNVLLTAEKGRHKSKPARVKASTEQAPELENLTVTEVGWDGLRLNWTAADQAYEHFIIQVQEANKVEAARNLTVPGSLRAVDIPGLKAATPYTVSIYGVIQGYRTPVLSAEASTGETPNLGEVVVAEVGWDALKLNWTAPEGAYEYFFIQVQEADTVEAAQNLTVPGGLRSTDLPGLKAATHYTITIRGVTQDFSTTPLSVEVLTEDLPQLGDLAVSEVGWDGLRLNWTAADNAYEHFVIQVQEVNKVEAAQNLTLPGSLRAVDIPGLEAATPYRVSIYGVIRGYRTPVLSAEASTAKEPEIGNLNVSDITPESFNLSWMATDGIFETFTIEIIDSNRLLETVEYNISGAERTAHISGLPPSTDFIVYLSGLAPSIRTKTISATATTEAEPEVDNLLVSDATPDGFRLSWTADEGVFDNFVLKIRDTKKQSEPLEITLLAPERTRDITGLREATEYEIELYGISKGRRSQTVSAIATTAMGSPKEVIFSDITENSATVSWRAPTAQVESFRITYVPITGGTPSMVTVDGTKTQTRLVKLIPGVEYLVSIIAMKGFEESEPVSGSFTTALDGPSGLVTANITDSEALARWQPAIATVDSYVISYTGEKVPEITRTVSGNTVEYALTDLEPATEYTLRIFAEKGPQKSSTITAKFTTDLDSPRDLTATEVQSETALLTWRPPRASVTGYLLVYESVDGTVKEVIVGPDTTSYSLADLSPSTHYTAKIQALNGPLRSNMIQTIFTTIGLLYPFPKDCSQAMLNGDTTSGLYTIYLNGDKAEALEVFCDMTSDGGGWIVFLRRKNGRENFYQNWKAYAAGFGDRREEFWLGLDNLNKITAQGQYELRVDLRDHGETAFAVYDKFSVGDAKTRYKLKVEGYSGTAGDSMAYHNGRSFSTFDKDTDSAITNCALSYKGAFWYRNCHRVNLMGRYGDNNHSQGVNWFHWKGHEHSIQFAEMKLRPSNFRNLEGRRKRA

SEQ ID NO: 6447 - protein, 213 aa, Homo sapiens [sequence omitted]

SEQ ID NO: 6448 - protein, 211 aa, Homo sapiens
MGPQHLRLVQLFCLLGAISTLPRMSCGAGCYKTQKGTARGVVGFKGCSSSSSYPAQISYLVSPPGVSIASYSRVCRSYLCNNLTNLEPFVKLKASTPKSITSASCSCPTCVGEHMKDCLPNFVTTNSCPLAASTCYSSTLKFQAGFLNTTFLLMGCAREHNQLLADFHHIGSIKVTEVLNILEKSQIVGAASSRQDPAWGVVLGLLFAFRD

SEQ ID NO: 6449 - protein, 496 aa, Homo sapiens
MFAKATRNFLREVDADGDLIAVSNLNDSDKLQLLSLVTKKKRFWCWQRPKYQFLSLTLGDVLIEDQFPSPVVVESDFVKYEGKFANHVSGTLETALGKVKLNLGGSSRVESQSSFGTLRKQEVDLQQLIRDSAERTINLRNPVLQQVLEGRNEVLCVLTQKITTMQKCVISEHMQVEEKCGGIVGIQTKTVQVSATEDGNVTKDSNVVLEIPAATTIAYGVIELYVKLDGQFEFCLLRGKQGGFENKKRIDSVYLDPLVFREFAFIDMPDAAHGISSQDGPLSVLKQATLLLERNFHPFAELPEPQQTALSDIFQAVLFDDELLMVLEPVCDDLVSGLSPTVAVLGELKPRQQQDLVAFLQLVGCSLQGGCPGPEDAGSKQLFMTAYFLVSALAEMPDSAAALLGTCCKLQIIPTLCHLLRALSDDGVSDLEDPTLTPLKDTERFGIVQRLFASADISLERLKSSVKAVILKDSKVFPLLLCITLNGLCALGREHS

SEQ ID NO: 6450 - protein, 123 aa, Homo sapiens
MAEKRHTRDSEAQRLPDSFKDSPSKGLGPCGWILVAFSFLFTVITFPISIWMCIKVIAAEGEMNASRALKEASMVITESPAALQLRYLQTLTTIAAEKNSTIVFPLPIDMLQGIIGAKHSHLG

SEQ ID NO: 6451 - protein, 429 aa, Homo sapiens
MATLSFVFLLLGAVSWPPASASGQEFWPGQSAADILSGAASRRRYLLYDVNPPEGFNLRRDVYIRIASLLKTLLKTEEWVLVLPPWGRLYHWQSPDIHQVRIPWSEFFDLPSLNKNIPVIEYEQFIAESGGPFIDQVYVLQSYAEGWKEGTWEEKVDERPCIDQLLYSQDKHEYYRGWFWGYEETRGLNVSCLSVQGSASIVAPLLLRNTSARSVMLDRAENLLHDHYGGKEYWDTRRSMVFARHLREVGDEFRSRHLNSTDDADRIPFQEDWMKMKVKLGSALGGPYLGVHLRRKDFIWGHRQDVPSLEGAVRKIRSLMKTHRLDKVFVATDAVRKEYEELKKLLPEMVRFEPTWEELELYKDGGVAIIDQWICAHARFFIGTSVSTFSFRIHEEREILGLDPKTTYNRFCGDQEKACEQPTHWKITY

SEQ ID NO: 6452 - protein, 163 aa, Homo sapiens
MGGLLLAAFLALVSVPRAQAVWLGRLDPEQLLGPWYVLAVASREKGFAMEKDMKNVVGVVVTLTPENNLRTLSSQHGLGGCDQSVMDLIKRNSGWVFENPSIGVLELWVLATNFRDYAIIFTQLEFGDEPFNTVELYSLTETASQEAMGLFTKWSRSLGFLSQ

SEQ ID NO: 6453 - protein, 367 aa, Homo sapiens
MAKPQVVVAPVLMSKLSVNAPEFYPSGYSSSYTESYEDGCEDYPTLSEYVQDFLNHLTEQPGSFETEIEQFAETLNGCVTTDDALQELVELIYQQATSIPNFSYMGARLCNYLSHHLTISPQSGNFRQLLLQRCRTEYEVKDQAAKGDEVTRKRFHAFVLFLGELYLNLEIKGTNGQVTRADILQVGLRELLNALFSNPMDDNLICAVKLLKLTGSVLEDAWKEKGKMDMEEIIQRIENVVLDANCSRDVKQMLLKLVELRSSNWGRVHATSTYREATPENDPNYFMNEPTFYTSDGVPFTAADPDYQEKYQELLEREDFFPDYEENGTDLSGAGDPYLDDIDDEMDPEIEEAYEKFCLESERKRKQ

SEQ ID NO: 6454 - protein, 272 aa, Homo sapiens
MKGKKGIVAASGSETEDEDSMDIPLDLSSSAGSGKRRRRGNLPKESVQILRDWLYEHRYNAYPSEQEKALLSQQTHLSTLQVCNWFINARRRLLPDMLRKDGKDPNQFTISRRGAKISETSSVESVMGIKNFMPALEETPFHSCTAGPNPTLGRPLSPKPSSPGSVLARPSVICHTTVTALKDVPFSLCQSVGVGQNTDIQQIAAKNFTDTSLMYPEDTCKSGPSTNTQSGLFNTPPPTPPDLNQDFSGFQLLVDVALKRAAEMELQAKLTA

SEQ ID NO: 6455 - protein, 342 aa, Homo sapiens
MSMSPTVIILACLGFFLDQSVWAHVGGQDKPFCSAWPSAVVPQGGHVTLRCHYRRGFNIFTLYKKDGVPVPELYNRIFWNSFLISPVTPAHAGTYRCRGFHPHSPTEWSAPSNPLVIMVTGLYEKPSLTARPGPTVRAGENVTLSCSSQSSFDIYHLSREGEAHELRLPAVPSINGTFQADFPLGPATHGETYRCFGSFHGSPYEWSDPSDPLPVSVTGNPSSSWPSPTEPSFKTDAAVMNQEPAGHRTVNREDSDEQDPQEVTYAQLDHCIFTQRKITGPSQRSKRPSTDTSVCIELPNAEPRALSPAHEHHSQALMGSSRETTALSQTQLASSNVPAAGI

SEQ ID NO: 6456 - protein, 821 aa, Homo sapiens
MDPECAQLLPALCAVLVDPRQPVADDTCLEKLLDWFKTVTEGESSVVLLQEHPCLVELLSHVLKVQDLSSGVLSFSLRLAGTFAAQENCFQYLQQGELLPGLFGEPGPLGRATWAVPTVRSGWIQGLRSLAQHPSALRFLADHGAVDTIFSLQGDSSLFVASAASQLLVHVLALSMRGGAEGQPCLPGGDWPACAQKIMDHVEESLCSAATPKVTQALNVLTTTFGRCQSPWTEALWVRLSPRVACLLERDPIPAAHSFVDLLLCVARSPVFSSSDGSLWETVARALSCLGPTHMGPLALGILKLEHCPQALRTQAFQVLLQPLACVLKATVQAPGPPGLLDGTADDATTVDTLLASKSSCAGLLCRTLAHLEELQPLPQRPSPWPQASLLGATVTVLRLCDGSAAPASSVGGHLCGTLAGCVRVQRAALDFLGTLSQGTGPQELVTQALAVLLECLESPGSSPTVLKKAFQATLRWLLSSPKTPGCSDLGPLIPQFLRELFPVLQKRLCHPCWEVRDSALEFLTQLSRHWGGQADFRCALLASEVPQLALQLLQDPESYVRASAVTAMGQLSSQGLHAPTSPEHAEARQSLFLELLHILSVDSEGFPRRAVMQVFTEWLRDGHADAAQDTEQFVATVLQAASRDLDWEVRAQGLELALVFLGQTLGPPRTHCPYAVALPEVAPAQPLTEALRALCHVGLFDFAFCALFDCDRPVAQKSCDLLLFLRDKIASYSSLREARGSPNTASAEATLPRWRAGEQAQPPGDQEPEAVLAMLRSLDLEGLRSTLAESSDHVEKSPQSLLQDMLATGGFLQGDEADCY

SEQ ID NO: 6457 - protein, 133 aa, Homo sapiens
MTRGNQRELARQKNMKKQSDSVKGKRRDDGLSAAARKQSAPSSLPPGTRRSCSRSRKRQTRRRRNPSSFVASCPTLLPFACVPGASPTTLAFPPVVLTGPSTDGIPFALSLQRVPFVLPSPQVASLPLGHSRG

SEQ ID NO: 6458 - protein, 771 aa, Homo sapiens
MHRSGRYGTQQQRAGSKTAGPPCQWSRMASEGTNIPSPVVRQIDKQFLICSICLERYKNPKVLPCLHTFCERCLQNYIPAHSLTLSCPVCRQTSILPEKGVAALQNNFFITNLMDVLQRTPGSNAEESSILETVTAVAAGKPLSCPNHDGNVMEFYCQSCETAMCRECTEGEHAEHPTVPLKDVVEQHKASLQVQLDAVNKRLPEIDSALQFISEIIHQLTNQKASIVDDIHSTFDELQKTLNVRKSVLLMELEVNYGLKHKVLQSQLDTLLQGQESIKSCSNFTAQALNHGTETEVLLVKKQMSEKLNELADQDFPLHPRENDQLDFIVETEGLKKSIHNLGTILTTNAVASETVATGEGLRQTIIGQPMSVTITTKDKDGELCKTGNAYLTAELSTPDGSVADGEILDNKNGTYEFLYTVQKEGDFTLSLRLYDQHIRGSPFKLKVIRSADVSPTTEGVKRRVKSPGSGHVKQKAVKRPASMYSTGKRKENPIEDDLIFRVGTKGRNKGEFTNLQGVAASTNGKILIADSNNQCVQIFSNDGQFKSRFGIRGRSPGQLQRPTGVAVHPSGDIIIADYDNKWVSIFSSDGKFKTKIGSGKLMGPKGVSVDRNGHIIVVDNKACCVFIFQPNGKIVTRFGSRGNGDRQFAGPHFAAVNSNNEIIITDFHNHSVKVFNQEGEFMLKFGSNGEGNGQFNAPTGVAVDSNGNIIVADWGNSRIQVFDGSGSFLSYINTSADPLYGPQGLALTSDGHVVVADSGNHCFKVYRYLQ

SEQ ID NO: 6459 - protein, 489 aa, Homo sapiens
MHPGVLAAFLFLSWTHCRALPLPSGGDEDDLSEEDLQFAERYLRSYYHPTNLAGILKENAASSMTERLREMQSFFGLEVTGKLDDNTLDVMKKPRCGVPDVGEYNVFPRTLKWSKMNLTYRIVNYTPDMTHSEVEKAFKKAFKVWSDVTPLNFTRLHDGIADIMISFGIKEHGDFYPFDGPSGLLAHAFPPGPNYGGDAHFDDDETWTSSSKGYNLFLVAAHEFGHSLGLDHSKDPGALMFPIYTYTGKSHFMLPDDDVQGIQSLYGPGDEDPNPKHPKTPDKCDPSLSLDAITSLRGETMIFKDRFFWRLHPQQVDAELFLTKSFWPELPNRIDAAYEHPSHDLIFIFRGRKFWALNGYDILEGYPKKISELGLPKEVKKISAAVHFEDTGKTLLFSGNQVWRYDDTNHIMDKDYPRLIEEDFPGIGDKVDAVYEKNESHSVTQAGVHCRNLSSLQPPPPGFKRFSCLSLWSSWDYRLYLFFQRTHTV

SEQ ID NO: 6460 - protein, 242 aa, Homo sapiens
MGSACIKVTKYFLFLFNLIFFILGAVILGFGVWILADKSSFISVLQTSSSSLRMGAYVFIGVGAVTMLMGFLGCIGAVNEVRCLLGLLKQEMGGIVTELIRDYNSSREDSLQDAWDYVQAQVKCCGWVSFYNWTDNAELMNRPEVTYPCSCEVKGEEDNSLSVRKGFCEAPGNRTQSGNHPEDWPVYQEGCMEKVQAWLQENLGIILGVGVGVAIIELLGMVLSICLCRHVHSEDYSKVPKY

SEQ ID NO: 6461 - protein, 203 aa, Homo sapiens
MTPGTQSPFFLLLLLTVLTVVTGSGHASSTPGGEKETSATQRSSVPSSTEKNAIPAPTTTKSCRETFLKCFCRFINKGVFWASPILSSVSDVPFPFSAQSGAGVPGWGIALLVLVCVLVALAIVYLIALAVCQCRRKNYGQLDIFPARDTYHPMSEYPTYHTHGRYVPPSSTDRSPYEKVSAGNGGSSLSYTNPAVAATSANL

SEQ ID NO: 6462 - protein, 321 aa, Homo sapiens
MKEDCLPSSHVPISDSKSIQKSELLGLLKTYNCYHEGKSFQLRHREEEGTLIIEGLLNIAWGLRRPIRLQMQDDREQVHLPSTSWMPRRPSCPLKEPSPQNGNITAQGPSIQPVHKAESSTDSSGPLEEAEEAPQLMRTKSDASCMSQRRPKCRAPGEAQRIRRHRFSINGHFYNHKTSVFTPAYGSVTNVRVNSTMTTLQVLTLLLNKFRVEDGPSEFALYIVHESGERTKLKDCEYPLISRILHGPCEKIARIFLMEADLGVEVPHEVAQYIKFEMPVLDSFVEKLKEEEEREIIKLTMKFQALRLTMLQRLEQLVEAK

SEQ ID NO: 6463 - protein, 84 aa, Homo sapiens
MKVKIKCWNGVATWLWVANDENCGICRMAFNGCCPDCKVPGDDCPLVWGQCSHCFHMHCILKWLHAQQVQQHCPMCRQEWKFKE

SEQ ID NO: 6464 - protein, 487 aa, Homo sapiens
MAPVVTGKFGERPPPKRLTREAMRNYLKERGDQTVLILHAKVAQKSYGNEKRFFCPPPCVYLMGSGWKKKKEQMERDGCSEQESQPCAFIGIGNSDQEMQQLNLEGKNYCTAKTLYISDSDKRKHFMLSVKMFYGNSDDIGVFLSKRIKVISKPSKKKQSLKNADLCIASGTKVALFNRLRSQTVSTRYLHVEGGNFHASSQQWGAFFIHLLDDDESEGEEFTVRDGYIHYGQTVKLVCSVTGMALPRLIIRKVDKQTALLDADDPVSQLHKCAFYLKDTERMYLCLSQERIIQFQATPCPKEPNKEMINDGASWTIISTDKAEYTFYEGMGPVLAPVTPVPVVESLQLNGGGDVAMLELTGQNFTPNLRVWFGDVEAETMYRCGESMLCVVPDISAFREGWRWVRQPVQVPVTLVRNDGIIYSTSLTFTYTPEPGPRPHCSAAGAILRANSSQVPPNESNTNSEGSYTNASTNSTSVTSSTATVVS

SEQ ID NO: 6465 - protein, 185 aa, Homo sapiens
MKLWDVVAVCLVLLHTASAFPLPAANMPEDYPDQFDDVMDFIQATIKRLKRSPDKQMAVLPRRERNRQAAAANPENSRGKGRRGQRGKNRGCVLTAIHLNVTDLGLGYETKEELIFRYCSGSCDAAETTYDKILKNLSRNRRLVSDKVGQACCRPIAFDDDLSFLDDNLVYHILRKHSAKRCGCI

SEQ ID NO: 6466 - protein, 213 aa, Homo sapiens
MLQLRDSVDSAGTSPTAVLAAGEEVGAGGGPGGGRPGAGTPLRQTLWPLSIHDPTRRARVKEYFVFRPGSIEQAVEEIRVVVRPVEDGEIQGVWLLTEREGFGIRIQWDKQSRPSFINRWNPWSTNVPYATFTEHPMAGADEKTASLCQLESFKALLIQAVKKAQKESPLPGQANGVLILERPLLIETYVGLMSFINNEAKLGYSMTRGKIGF

SEQ ID NO: 6467 - protein, 81 aa, Homo sapiens
MLRQIIGQAKKHPSLIPLFVFIGTGATGATLYLLRLALFNPDVCWDRNNPEPWNKLGPNDQYKFYSVNVDYSKLKKERPDF

SEQ ID NO: 6468 - protein, 450 aa, Homo sapiens
MGKSFANFMCKKDFHPASKSNIKKVWMAEQKISYDKKKQEELMQQYLKEQESYDNRLLMGDERVKNGLNFMYEAPPGAKKENKEKEETEGETEYKFEWQKGAPREKYAKDDMNIRDQPFGIQVRNVRCIKCHKWGHVNTDRECPLFGLSGINASSVPTDGSGPSMHPSELIAEMRNSGFALKRNVLGRNLTANDPSQEYVASEGEEDPEVEFLKSLTTKQKQKLLRKLDRLEKKKKKKDRKKKKFQKSRSKHKKHKSSSSSSSSSSSSSSTETSESSSESESNNKEKKIQRKKRKKNKCSGHNNSDSEEKDKSKKRKLHEELSSSHHNREKAKEKPRFLKHESSREDSKWSHSDSDKKSRTHKHSPEKRGSERKEGSSRSHGREERSRRSRSRSPGSYKQRETRKRAQRNPGEEQSRRNDSRSHGTDLYRGEKMYREHPGGTHTKVTQRE

SEQ ID NO: 6469 - protein, 961 aa, Homo sapiens
MLAPRGAAVLLLHLVLQRWLAAGAQATPQVFDLLPSSSQRLNPGALLPVLTDPALNDLYVISTFKLQTKSSATIFGLYSSTDNSKYFEFTVMGRLNKAILRYLKNDGKVHLVVFNNLQLADGRRHRILLRLSNLQRGAGSLELYLDCIQVDSVHNLPRAFAGPSQKPETIELRTFQRKPQDFLEELKLVVRGSLFQVASLQDCFLQQSEPLAATGTGDFNRQFLGQMTQLNQLLGEVKDLLRQQVKETSFLRNTIAECQACGPLKFQSPTPSTVVPPAPPAPPTRPPRRCDSNPCFRGVQCTDSRDGFQCGPCPEGYTGNGITCIDVDECKYHPCYPGVHCINLSPGFRCDACPVGFTGPMVQGVGISFAKSNKQVCTDIDECRNGACVPNSICVNTLGSYRCGPCKPGYTGDQIRGCKAERNCRNPELNPCSVNAQCIEERQGDVTCVCGVGWAGDGYICGKDVDIDSYPDEELPCSARNCKKDNCKYVPNSGQEDADRDGIGDACDEDADGDGILNEQDNCVLIHNVDQRNSDKDIFGDACDNCLSVLNNDQKDTDGDGRGDACDDDMDGDGIKNILDNCPKFPNRDQRDKDGDGVGDACDSCPDVSNPNQSDVDNDLVGDSCDTNQDSDGDGHQDSTDNCPTVINSAQLDTDKDGIGDECDDDDDNDGIPDLVPPGPDNCRLVPNPAQEDSNSDGVGDICESDFDQDQVIDRIDVCPENAEVTLTDFRAYQTVVLDPEGDAQIDPNWVVLNQGMEIVQTMNSDPGLAVGYTAFNGVDFEGTFHVNTQTDDDYAGFIFGYQDSSSFYVVMWKQTEQTYWQATPFRAVAEPGIQLKAVKSKTGPGEHLRNSLWHTGDTSDQVRLLWKDSRNVGWKDKVSYRWFLQHRPQVGYIRVRFYEGSELVADSGVTIDTTMRGGRLGVFCFSQENIIWSNLKYRCNDTIPEDFQEFQTQNFDRFDN

SEQ ID NO: 6470 - protein, 499 aa, Homo sapiens
MASTTTCTRFTDEYQLFEELGKGAFSVVRRCMKIPTGQEYAAKIINTKKLSARDHQKLEREARICRLLKHPNIVRLHDSISEEGFHYLVFDLVTGGELFEDIVAREYYSEADASHCIQQILESVNHCHLNGIVHRDLKPENLLLASKSKGAAVKLADFGLAIEVQGDQQAWFGFAGTPGYLSPEVLRKDPYGKPVDMWACGVILYILLVGYPPFWDEDQHRLYQQIKAGAYDFPSPEWDTVTPEAKDLINKMLTINPAKRITASEALKHPWICQRSTVASMMHRQETVDCLKKFNARRKLKGAILTTMLATRNFSAAKSLLKKPDGVKESTESSNTTIEDEDVKARKQEIIKVTEQLIEAINNGDFEAYTKICDPGLTAFEPEALGNLVEGMDFHRFYFENALSKSNKPIHTIILNPHVHLVGDDAACIAYIRLTQYMDGSGMPKTMQSEETRVWHRRDGKWQNVHFHRSGSPTVPIKPPCIPNGKENFSGGTSLWQNI

SEQ ID NO: 6471 - protein, 201 aa, Homo sapiens
MGNISSNISAFQSLHIVMLGLDSAGKTTVLYRLKFNEFVNTVPTIGFNTEKIKLSNGTAKGISCHFWDVGGQEKLRPLWKSYSRCTDGIIYVVDSVDVDRLEEAKTELHKVTKFAENQGTPLLVIANKQDLPKSLPVAEIEKQLALHELIPATTYHVQPACAIIGEGLTEGMDKLYEMILKRRKSLKQKKKRTGDLRSCEV

SEQ ID NO: 6472 - protein, 711 aa, Homo sapiens
MKLKLNVLTIILLPVHLLITIYSALIFIPWYFLTNAKKKNAMAKRIKAKPTSDKPGSPYRSVTHFDSLAVIDIPGADTLDKLFDHAVSKFGKKDSLGTREILSEENEMQPNGKVFKKLILGNYKWMNYLEVNRRVNNFGSGLTALGLKPKNTIAIFCETRAEWMIAAQTCFKYNFPLVTLYATLGKEAVVHGLNESEASYLITSVELLESKLKTALLDISCVKHIIYVDNKAINKAEYPEGFEIHSMQSVEELGSNPENLGIPPSRPTPSDMAIVMYTSGSTGRPKGVMMHHSNLIAGMTGQCERIPGLGPKDTYIGYLPLAHVLELTAEISCFTYGCRIGYSSPLTLSDQSSKIKKGSKGDCTVLKPTLMAAVPEIMDRIYKNVMSKVQEMNYIQKTLFKIGYDYKLEQIKKGYDAPLCNLLLFKKVKALLGGNVRMMLSGGAPLSPQTHRFMNVCFCCPIGQGYGLTESCGAGTVTEVTDYTTGRVGAPLICCEIKLKDWQEGGYTINDKPNPRGEIVIGGQNISMGYFKNEEKTAEDYSVDENGQRWFCTGDIGEFHPDGCLQIIDRKKDLVKLQAGEYVSLGKVEAALKNCPLIDNICAFAKSDQSYVISFVVPNQKRLTLLAQQKGVEGTWVDICNNPAMEAEILKEIREAANAMKLERFEIPIKVRLSPEPWTPETGLVTDAFKLKRKELRNHYLKDIERMYGGK

SEQ ID NO: 6473 - protein, 248 aa, Homo sapiens
MEGVEEKKKEVPAVPETLKKKRRNFAELKIKRLRKKFAQKMLRKARRKLIYEKAKHYHKEYRQMYRTEIRMARMARKAGNFYVPAEPKLAFVIRIRGINGVSPKVRKVLQLLRLRQIFNGTFVKLNKASINMLRIVEPYIAWGYPNLKSVNELIYKRGYGKINKKRIALTDNALIARSLGKYGIICMEDLIHEIYTVGKRFKEANNFLWPFKLSSPRGGMKKKTTHFVEGGDAGNREDQINRLIRRMN

SEQ ID NO: 6474 - protein, 550 aa, Homo sapiens
MPPPRTGRGLLWLGLVLSSVCVALGSETQANSTTDALNVLLIIVDDLRPSLGCYGDKLVRSPNIDQLASHSLLFQNAFAQQAVCAPSRVSFLTGRRPDTTRLYDFNSYWRVHAGNFSTIPQYFKENGYVTMSVGKVFHPGISSNHTDDSPYSWSFPPYHPSSEKYENTKTCRGPDGELHANLLCPVDVLDVPEGTLPDKQSTEQAIQLLEKMKTSASPFFLAVGYHKPHIPFRYPKEFQKLYPLENITLAPDPEVPDGLPPVAYNPWMDIRQREDVQALNISVPYGPIPVDFQRKIRQSYFASVSYLDTQVGRLLSALDDLQLANSTIIAFTSDHGWALGEHGEWAKYSNFDVATHVPLIFYVPGRTASLPEAGEKLFPYLDPFDSASQLMEPGRQSMDLVELVSLFPTLAGLAGLQVPPRCPVPSFHVELCREGKNLLKHFRFRDLEEDPYLPGNPRELIAYSQYPRPSDIPQWNSDKPSLKDIKIMGYSIRTIDYRYTVWVGFNPDEFLANFSDIHAGELYFVDSDPLQDHNMYNDSQGGDLFQLLMP

SEQ ID NO: 6475 - protein, 325 aa, Homo sapiens
MKAKDLIVTPATILKEKPDPNNLVFGTVFTDHMLTVEWSSEFGWEKPHIKPLQNLSLHPGSSALHYAVEVFDKEELLECIQQLVKLDQEWVPYSTSASLYIRPTFIGTEPSLGVKKPTKALLFVLLSPVGPYFSSGTFNPVSLWANPKYVRAWKGGTGDCKMGGNYGSSLFAQCEAVDNGCQQVLWLYGEDHQITEVGTMNLFLYWINEDGEEELATPPLDGIILPGVTRRCILDLAHQWGEFKVSERYLTMDDLTTALEGNRVREMFGSGTACVVCPVSDILYKGETIHIPTMENGPKLASRILSKLTDIQYGREESDWTIVLS

SEQ ID NO: 6476 - protein, 377 aa, Homo sapiens
MRLSVRRVLLAAGCALVLVLAVQLGQQVLECRAVLAGLRSPRGAMRPEQEELVMVGTNHVEYRYGKAMPLIFVGGVPRSGTTLMRAMLDAHPEVRCGEETRIIPRVLAMRQAWSKSGREKLRLDEAGVTDEVLDAAMQAFILEVIAKHGEPARVLCNKDPFTLKSSVYLSRLFPNSKFLLMVRDGRASVHSMITRKVTIAGFDLSSYRDCLTKWNKAIEVMYAQCMEVGKEKCLPVYYEQLVLHPRRSLKLILDFLGIAWSDAVLHHEDLIGKPGGVSLSKIERSTDQVIKPVNLEALSKWTGHIPGDVVRDMAQIAPMLAQLGYDPYANPPNYGNPDPFVINNTQRVLKGDYKTPANLKGYFQVNQNSTSSHLGSS

SEQ ID NO: 6477 - protein, 808 aa, Homo sapiens
MGAPACALALCVAVAIVAGASSESLGTEQRVVGRAAEVPGPEPGQQEQLVFGSGDAVELSCPPPGGGPMGPTVWVKDGTGLVPSERVLVGPQRLQVLNASHEDSGAYSCRQRLTQRVLCHFSVRVTDAPSSGDDEDGEDEAEDTGVDTGAPYWTRPERMDKKLLAVPAANTVRFRCPAAGNPTPSISWLKNGREFRGEHRIGGIKLRHQQWSLVMESVVPSDRGNYTCVVENKFGSIRQTYTLDVLERSPHRPILQAGLPANQTAVLGSDVEFHCKVYSDAQPHIQWLKHVEVNGSKVGPDGTPYVTVLKSWISESVEADVRLRLANVSERDGGEYLCRATNFIGVAEKAFWLSVHGPRAAEEELVEADEAGSVYAGILSYGVGFFLFILVVAAVTLCRLRSPPKKGLGSPTVHKISRFPLKRQVSLESNASMSSNTPLVRIARLSSGEGPTLANVSELELPADPKWELSRARLTLGKPLGEGCFGQVVMAEAIGIDKDRAAKPVTVAVKMLKDDATDKDLSDLVSEMEMMKMIGKHKNIINLLGACTQGGPLYVLVEYAAKGNLREFLRARRPPGLDYSFDTCKPPEEQLTFKDLVSCAYQVARGMEYLASQKCIHRDLAARNVLVTEDNVMKIADFGLARDVHNLDYYKKTTNGRLPVKWMAPEALFDRVYTHQSDVWSFGVLLWEIFTLGGSPYPGIPVEELFKLLKEGHRMDKPANCTHDLYMIMRECWHAAPSQRPTFKQLVEDLDRVLTVTSTDEYLDLSAPFEQYSPGGQDTPSSSSSGDDSVFAHDLLPPAPPSSGGSRT

SEQ ID NO: 6478 - protein, 160 aa, Homo sapiens
MAPALWRACNGLMAAFFALAALVQVNDPDAEVWVVVYTIPAVLTLLVGLNPEVTGNVIWKSISAIHILFCTVWAVGLASYLLHRTQQNILHEEEGRELSGLVIITAWIILCHSSSKNPVGGRIQLAIAIVITLFPFISWVYIYINKEMRSSWPTHCKTVI

SEQ ID NO: 6479 - protein, 339 aa, Homo sapiens
MEGEPPPVEERRRLQEELNEFVESGCRTLEEVTASLGWDLDSLDPGEEEAAEDEVVICPYDSNHHMPKSSLAKHMASCRLRKMGYTKEEEDEMYNPEFFYENVKIPSITLNKDSQFQIIKQARTAVGKDSDCYNQRIYSSLPVEVPLNHKRFVCDLTQADRLALYDFVVEETKKKRSDSQIIENDSDLFVDLAAKINQDNSRKSPKSYLEILAEVRDYKRRRQSYRAKNVHITKKSYTEVIRDVINVHMEELSNHWQEEQEKAEDDAEKNEERRSASVDSRQSGGSYLDAECSRHRRDRSRSPHKRKRNKDKDKNCESRRRKERDGERHHSHKRRKQKI

SEQ ID NO: 6480 - protein, 235 aa, Homo sapiens
MTARGTPSRFLASVLHNGLGRYVQQLQRLSFSVSRDGASSRGAREFVEREVIDFARRNPGVVIYVNSRPCCVPRVVAEYLNGAVREESIHCKSVEEISTLVQKLADQSGLDVIRIRKPFHTDNPSIQGQWHPFTNKPTTFRGLRPREVQDPAPAQDAAEFLGEGAGPCWYSIVALPQKHIAIAIHPPQPAGQCHQAIGHWPETVCSCTADPPARLARPNISSVIRSSLGKYPLPS

SEQ ID NO: 6481 - protein, 48 aa, Homo sapiens
MNKDAQMRAAINQKLIETGERERLKELLRAKLIECGWKDQLKAHCKGN

SEQ ID NO: 6482 - protein, 875 aa, Homo sapiens
MSGTKPDILWAPHHVDRFVVCDSELSLYHVESTVNSELKAGSLRLSEDSAATLLSINSDTPYMKCVAWYLNYDPECLLAVGQANGRVVLTSLGQDHNSKFKDLIGKEFVPKHARQCNTLAWNPLDSNWLAAGLDKHRADFSVLIWDICSKYTPDIVPMEKVKLSAGETETTLLVTKPLYELGQNDACLSLCWLPRDQKLLLAGMHRNLAIFDLRNTSQKMFVNTKAVQGVTVDPYFHDRVASFYEGQVAIWDLRKFEKPVLTLTEQPKPLTKVAWCPTRTGLLATLTRDSNIIRLYDMQHTPTPIGDETEPTIIERSVQPCDNYIASFAWHPTSQNRMIVVTPNRTMSDFTVFERISLAWSPITSLMWACGRHLYECTEEENDNSLEKDIATKMRLRALSRYGLDTEQVWRNHILAGNEDPQLKSLWYTLHFMKQYTEDMDQKSPGNKGSLVYAGIKSIVKSSLGMVESSRHNWSGLDKQSDIQNLNEERILALQLCGWIKKGTDVDVGPFLNSLVQEGEWERAAAVALFNLDIRRAIQILNEGASSEKGDLNLNVVAMALSGYTDEKNSLWREMCSTLRLQLNNPYLCVMFAFLTSETGSYDGVLYENKVAVRDRVAFACKFLSDTQLNRYIEKLTNEMKEAGNLEGILLTGLTKDGVDLMESYVDRTGDVQTASYCMLQGSPLDVLKDERVQYWIENYRNLLDAWRFWHKRAEFDIHRSKLDPSSKPLAQVFVSCNFCGKSISYSCSAVPHQGRGFSQYGVSGSPTKSKVTSCPGCRKPLPRCALCLINMGTPVSSCPGGTKSDEKVDLSKDKKLAQFNNWFTWCHNCRHGGHAGHMLSWFRDHAECPVSACTCKCMQLDTTGNLVPAETVQP

SEQ ID NO: 6483 - protein, 1839 aa, Homo sapiens
METGSDSDQLERVFLRLGHAETDEQLQNIISKFLPPVLLKLSSTQEGVRKKVMELLVHLNKRIKSRPKIQLPVETLLVQYQDPAAVSFVTNFTIIYVKMGYPRLPVEKQCELAPTLLTAMEGKPQPQQDSLMHLLIPTLFHMKYPVESSKSASPFNLAEKPKTVQLLLDFMLDVLLMPYGYVLNESQSRQNSSSAQGSSSNSGGGSGIPQPPPGMSFYAAKRVIGDNPWTPEQLEQCKLGIVKFIEAEQVPELEAVLHLVIASSDTRHSVATAADLELKSKQSLIDWNNPAIINKMYKVYLGDIPLKTKEGAVLKPELKRDPVSTRVKLKIVPHLLRSRQAAETFPANIQVVYDGLFGTNTNSKLRTLSLQFVHHICITCPEIKIKPLGPMLLNGLTKLINEYKEDPKLLSMAYSAVGKLSSRMPHLFTKDIALVQQLFEALCKEEPETRLAIQEALSMMVGAYSTLEGAQRTLMEALVASYLIKPEVQVRQVAVKFASTVFPSDHIPSRYLLLLAAGDPREEVHGEAQRVLRCLPGRNRKESTSEQMPSFPEMVYYIQEKASHRMKTPVKYMTGTTVLPFNPAAFGEIVLYLRMCLAHSAGVVPTSQSLADMQDHAPAIGRYIRTLMSSGQMAPSSSNKSGETNPVQIYIGLLQQLLAGVGGLPVMYCLLEAVSVYPEKLATKFVDKTEWIKSLMNNSKEEMRELAALFYSVVVSTVSGNELKSMIEQLIKTTKDNHSPEIQHGSLLALGFTVGRYLAKKKMRMSEQQDLERNADTLPDQEELIQSATETIGSFLDSTSPLLAIAACTALGEIGRNGPLPIPSEGSGFTKLHLVESLLSRIPSSKETNKMKERAIQTLGYFPVGDGDFPHQKLLLQGLMDSVEAKQIELQFTIGEAITSAAIGTSSVAARDAWQMTEEEYTPPAGAKVNDVVPWVLDVILNKHIISPNPHVRQAACIWLLSLVRKLSTHKEVKSHLKEIQSAFVSVLSENDELSQDVASKGLGLVYELGNEQDQQELVSTLVETLMTGKRVKHEVSGETVVFQGGALGKTPDGQGLSTYKELCSLASDLSQPDLVYKFMNLANHHAMWNSRKGAAFGFNVIATRAGEQLAPFLPQLVPRLYRYQFDPNLGIRQAMTSIWNALVTDKSMVDKYLKEILQDLVKNLTSNMWRVRESSCLALNDLLRGRPLDDIIDKLPEIWETLFRVQDDIKESVRKAAELALKTLSKVCVKMCDPAKGAAGQRTIAALLPCLLDKGMMSTVTEVRALSINTLVKISKSAGAMLKPHAPKLIPALLESLSVLEPQVLNYLSLRATEQEKAAMDSARLSAAKSSPMMETINMCLQYLDVSVLGELVPRLCELIRSGVGLGTKGGCASVIVSLTTQCPQDLTPYSGKLMSALLSGLTDRNSVIQKSCAFAMGHLVRTSRDSSTEKLLQKLNGWYMEKEEPIYKTSCALTIHAIGRYSPDVLKNHAKEVLPLAFLGMHEIADEEKSEKEECNLWTEVWQENVPGSFGGIRLYLQELITITQKALQSQSWKMKAQGAIAMASIAKQTSSLVPPYLGMILTALLQGLAGRTWAGKEELLKAIACVVTACSAELEKSVPNQPSTNEILQAVLKECSKENVKYKIVAISCAADILKATKEDRFQEFSNIVIPLIKKNSLESSGVRTTKNEEENEKEKELQLEYLLGAFESLGKAWPRNAETQRCYRQELCKLMCERLKLSTWKVQLGVLQSMNAFFQGLMLLEEEHADPEALAEILLETCKSITYSLENKTYSSVRTEALSVIELLLKKLEESKQWECLTSECRVLLIESLATMEPDSRPELQEKAALLKKTLENLE

SEQ ID NO: 6484 - protein, 649 aa, Homo sapiens
MISAAWSIFLIGTKIGLFLQVAPLSVMAKSCPSVCRCDAGFIYCNDRFLTSIPTGIPEDATTLYLQNNQINNAGIPSDLKNLLKVERIYLYHNSLDEFPTNLPKYVKELHLQENNIRTITYDSLSKIPYLEELHLDDNSVSAVSIEEGAFRDSNYLRLLFLSRNHLSTIPWGLPRTIEELRLDDNRISTISSPSLQGLTSLKRLVLDGNLLNNHGLGDKVFFNLVNLTELSLVRNSLTAAPVNLPGTNLRKLYLQDNHINRVPPNAFSYLRQLYRLDMSNNNLSNLPQGIFDDLDNITQLILRNNPWYCGCKMKWVRDWLQSLPVKVNVRGLMCQAPEKVRGMAIKDLNAELFDCKDSGIVSTIQITTAIPNTVYPAQGQWPAPVTKQPDIKNPKLTKDHQTTGSPSRKTITITVKSVTSDTIHISWKLALPMTALRLSWLKLGHSPAFGSITETIVTGERSEYLVTALEPDSPYKVCMVPMETSNLYLFDETPVCIETETAPLRMYNPTTTLNREQEKEPYKNPNLPLAAIIGGAVALVTIALLALVCWYVHRNGSLFSRNCAYSKGRRRKDDYAEAGTKKDNSILEIRETSFQMLPISNEPISKEEFVIHTIFPPNGMNLYKNNHSESSSNRSYRDSGIPDSDHSHS

SEQ ID NO: 6485 - protein, 89 aa, Homo sapiens
MNAKVVVVLVLVLTALCLSDGKPVSLSYRCPCRFFESHVARANVKHLKILNTPNCALQIVARLKNNNRQVCIDPKLKWIQEYLEKALNK

SEQ ID NO: 6486 - protein, 1736 aa, Homo sapiens
MERCSRCHRLLLLLPLVLGLSAAPGWAGAPPVDVLRALRFPSLPDGVRRAKGICPADVAYRVARPAQLSAPTRQLFPGGFPKDFSLLTVVRTRPGLQAPLLTLYSAQGVRQLGLELGRPVRFLYEDQTGRPQPPSQPVFRGLSLADGKWHRVAVAVKGQSVTLIVDCKKRVTRPLPRSARPVLDTHGVIIFGARILDEEVFEGDVQELAIVPGVQAAYESCEQKELECEGGQRERPQNQQPHRAQRSPQQQPSRLHRPQNQEPQSQPTESLYYDYEPPYYDVMTTGTTPDYQDPTPGEEEEILESSLLPPLEEEQTDLQVPPTADRFQAEEYGEGGTDPPEGPYDYTYGYGDDYREETELGPALSAETAHSGAAAHGPRGLKGEKGEPAVLEPGMLVEGPPGPEGPAGLIGPPGIQGNPGPVGDPGERGPPGRAGLPGSDGAPGPPGTSLMLPFRFGSGGGDKGPVVAAQEAQAQAILQQARLALRGPPGPMGYTGRPGPLGQPGSPGLKGESGDLGPQGPRGPQGLTGPPGKAGRRGRAGADGARGMPGDPGVKGDRGFDGLPGLPGEKGHRGDTGAQGLPGPPGEDGERGDDGEIGPRGLPGESGPRGLLGPKGPPGIPGPPGVRGMDGPQGPKGSLGPQGEPGPPGQQGTPGTQGLPGPQGAIGPHGEKGPQGKPGLPGMPGSDGPPGHPGKEGPPGTKGNQGPSGPQGPLGYPGPRGVKGVDGIRGLKGHKGEKGEDGFPGFKGDIGVKGDRGEVGVPGSRGEDGPEGPKGRTGPTGDPGPPGLMGEKGKLGVPGLPGYPGRQGPKGSLGFPGFPGASGEKGARGLSGKSGPRGERGPTGPRGQRGPRGATGKSGAKGTSGGDGPHGPPGERGLPGPQGPNGFPGPKGPPGPPGKDGLPGHPGQRGEVGFQGKTGPPGPPGVVGPQGAAGETGPMGERGHPGPPGPPGEQGLPGTAGKEGTKGDPGPPGAPGKDGPAGLRGFPGERGLPGTAGGPGLKGNEGPSGPPGPAGSPGERGAAGSGGPIGPPGRPGPQGPPGAAGEKGVPGEKGPIGPTGRDGVQGPVGLPGPAGPPGVAGEDGDKGEVGDPGQKGTKGNKGEHGPPGPPGPIGPVGQPGAAGADGEPGARGPQGHFGAKGDEGTRGFNGPPGPIGLQGLPGPSGEKGETGDVGPMGPPGPPGPRGPAGPNGADGPQGPPGGVGNLGPPGEKGEPGESGSPGIQGEPGVKGPRGERGEKGESGQPGEPGPPGPKGPTGDDGPKGNPGPVGFPGDPGPPGEGGPRGQDGAKGDRGEDGEPGQPGSPGPTGENGPPGPLGKRGPAGSPGSEGRQGGKGAKGDPGAIGAPGKTGPVGPAGPAGKPGPDGLRGLPGSVGQQGRPGATGQAGPPGPVGPPGLPGLRGDAGAKGEKGHPGLIGLIGPPGEQGEKGDRGLPGPQGSPGQKGEMGIPGASGPIGPGGPPGLPGPAGPKGAKGATGPGGPKGEKGVQGPPGHPGPPGEVIQPLPIQMPKKTRRSVDGSRLMQEDEAIPTGGAPGSPGGLEEIFGSLDSLREEIEQMRRPTGTQDSPARTCQDLKLCHPELPDGEYWVDPNQGCARDAFRVFCNFTAGGETCVTPRDDVTQFSYVDSEGSPVGVVQLTFLRLLSVSAHQDVSYPCSGAARDGPLRLRGANEDELSPETSPYVKEFRDGCQTQQGRTVLEVRTPVLEQLPVLDASFSDLGAPPRRGGVLLGPVCFMG

SEQ ID NO: 6487 - protein, 686 aa, Homo sapiens
MGSYLSVPAYFTSRDLFRCSECQDSLTNWYYEKDGKLYCPKDYWGKFGEFCHGCSLLMTGPFMVAGEFKYHPECFACMSCKVIIEDGDAYALVQHATLYCGKCHNEVVLAPMFERLSTESVQEQLPYSVTLISMPATTEGRRGFSVSVESACSNYATTVQVKEVNRMHISPNNRNAIHPGDRILEINGTPVRTLRVEEVEDAISQTSQTLQLLIEHDPVSQRLDQLRLEARLAPHMQNAGHPHALSTLDTKENLEGTLRRRSLRRSNSISKSPGPSSPKEPLLFSRDISRSESLRCSSSYSQQIFRPCDLIHGEVLGKGFFGQAIKVTHKATGKVMVMKELIRCDEETQKTFLTEVKVMRSLDHPNVLKFIGVLYKDKKLNLLTEYIEGGTLKDFLRSMDPFPWQQKVRFAKGIASGMAYLHSMCIIHRDLNSHNCLIKLDKTVVVADFGLSRLIVEERKRAPMEKATTKKRTLRKNDRKKRYTVVGNPYWMAPEMLNGKSYDETVDIFSFGIVLCEIIGQVYADPDCLPRTLDFGLNVKLFWEKFVPTDCPPAFFPLAAICCRLEPESRAPPGAAGEGPGCADDEGPVRRQGKVTIKYDPKELRKHLNLEEWILEQLTRLYDCQEEEISELEIDVDELLDMESDDAWASRVKELLVDCYKPTEAFISGLLDKIRAMQKLSTPQKK

SEQ ID NO: 6488 - protein, 251 aa, Homo sapiens
MESGKMAPPKNAPRDALVMAQILKDMGITEYEPRVINQMLEFAFRYVTTILDDAKIYSSHAKKPNVDADDVRLAIQCRADQSFTSPPPRDFLLDIARQKNQTPLPLIKPYAGPRLPPDRYCLTAPNYRLKSLIKKGPNQGRLVPRLSVGAVSSKPTTPTIATPQTVSVPNKVATPMSVTSQRFTVQIPPSQSTPVKPVPATTAVQNVLINPSMIGPKNILITTNMVSSQNTANEANPLKRKHEDDDDNDIM

SEQ ID NO: 6489 - protein, 395 aa, Homo sapiens
MPFITYLSGLLTAQMLSDDQLISGVEIRCEEKGRCPSTCHLCRRPGKEQLSPTPVLLEINRVVPLYTLIQDNGTKEAFKSALMSSYWCSGKGDVIDDWCRCDLSAFDANGLPNCSPLLQPVLRLSPTVEPSSTVVSLEWVDVQPAIGTKVSDYILQHKKVDEYTDTDLYTGEFLSFADDLLSGLGTSCVAAGRSHGEVPEVSIYSVIFKCLEPDGLYKFTLYAVDTRGRHSELSTVTLRTACPLVDDNKAEEIADKIYNLYNGYTSGKEQQMAYNTLMEVSASMLFRVQHHYNSHYEKFGDFVWRSEDELGPRKAHLILRRLERVSSHCSSLLRSAYIQSRVETVPYLFCRSEEVRPAGMVWYSILKDTKITCEEKMVSMARNTYYLTLSKVSPF

SEQ ID NO: 6490 - protein, 1504 aa, Homo sapiens
MATARTFGPEREAEPAKEARVVGSELVDTYTVYIIQVTDGSHEWTVKHRYSDFHDLHEKLVAERKIDKNLLPPKKIIGKNSRSLVEKREKDLEVYLQKLLAAFPGVTPRVLAHFLHFHFYEINGITAALAEELFEKGEQLLGAGEVFAIGPLQLYAVTEQLQQGKPTCASGDAKTDLGHILDFTCRLKYLKVSGTEGPFGTSNIQEQLLPFDLSIFKSLHQVEISHCDAKHIRGLVASKPTLATLSVRFSATSMKEVLVPEASEFDEWEPEGTTLEGPVTAVIPTWQALTTLDLSHNSVSEIDESVKLIPKIEFLDLSHNGLLVVDNLQHLYNLVHLDLSYNKLSSLEGLHTKLGNIKTLNLAGNLLESLSGLHKLYSLVNLDLRDNRIEQMEEVRSIGSLPCLEHVSLLNNPLSIIPDYRTKVLAQFGERASEVCLDDTVTTEKELDTVEVLKAIQKAKEVKSKLSNPEKKGGEDSRLSAAPCIRPSSSPPTVAPASASLPQPILSNQGIMFVQEEALASSLSSTDSLTPEHQPIAQGCSDSLESIPAGQAASDDLRDVPGAVGGASPEHAEPEVQVVPGSGQIIFLPFTCIGYTATNQDFIQRLSTLIRQAIERQLPAWIEAANQREEGQGEQGEEEDEEEEEEEDVAENRYFEMGPPDVEEEEGGGQGEEEEEEEEDEEAEEERLALEWALGADEDFLLEHIRILKVLWCFLIHVQGSIRQFAACLVLTDFGIAVFEIPHQESRGSSQHILSSLRFVFCFPHGDLTEFGFLMPELCLVLKVRHSENTLFIISDAANLHEFHADLRSCFAPQHMAMLCSPILYGSHTSLQEFLRQLLTFYKVAGGCQERSQGCFPVYLVYSDKRMVQTAAGDYSGNIEWASCTLCSAVRRSCCAPSEAVKSAAIPYWLLLTPQHLNVIKADFNPMPNRGTHNCRNRNSFKLSRVPLSTVLLDPTRSCTQPRGAFADGHVLELLVGYRFVTAIFVLPHEKFHFLRVYNQLRASLQDLKTVVIAKTPGTGGSPQGSFADGQPAERRASNDQRPQEVPAEALAPAPAEVPAPAPAAASASGPAKTPAPAEASTSALVPEETPVEAPAPPPAEAPAQYPSEHLIQATSEENQIPSHLPACPSLRHVASLRGSAIIELFHSSIAEVENEELRHLMWSSVVFYQTPGLEVTACVLLSTKAVYFVLHDGLRRYFSEPLQDFWHQKNTDYNNSPFHISQCFVLKLSDLQSVNVGLFDQHFRLTGSTPMQVVTCLTRDSYLTHCFLQHLMVVLSSLERTPSPEPVDKDFYSEFGNKTTGKMENYELIHSSRVKFTYPSEEEIGDLTFTVAQKMAEPEKAPALSILLYVQAFQVGMPPPGCCRGPLRPKTLLLTSSEIFLLDEDCVHYPLPEFAKEPPQRDRYRLDDGRRVRDLDRVLMGYQTYPQALTLVFDDVQGHDLMGSVTLDHFGEVPGGPARASQGREVQWQVFVPSAESREKLISLLARQWEALCGRELPVELTG

SEQ ID NO: 6491 - protein, 297 aa, Homo sapiens
MSLMVIIMACVGFFLLQGAWPQEGVHRKPSFLALPGHLVKSEETVILQCWSDVMFEHFLLHREGKFNNTLHLIGEHHDGVSKANFSIGPMMPVLAGTYRCYGSVPHSPYQLSAPSDPLDMVIIGLYEKPSLSAQPGPTVQAGENVTLSCSSIYPGKGRPMNVGSLQCAASTEHSRPTFLWALPPTEGPTDASALSVTLPTSGQTRVIHCLFPSQETLQIVGLHPLNQAPKPVTPDTYMFULGPQWSKSLSPSSSSFSFIAGAPTKKMLLUWTKSLQGTEQUTARILMNKTIRRCHTH

SEQ ID NO: 6492 - protein, 573 aa, Homo sapiens
MLRLPTVFRQMRPVSRVLAPHLTRAYAKDVKFGADARALMLQGVDLLADAVAVTMGPKGRTVIIEQSWGSPKVTKDGVTVAKSIDLKDKYKNIGAKLVQDVANNTNEEAGDGTTTATVLARSIAKEGFEKISKGANPVEIRRGVMLAVDAVIAELKKQSKPVTTPEEIAQVATISANGDKEIGNIISDAMKKVGRKGVITVKDGKTLNDELEIIEGMKFDRGYISPYFINTSKGQKCEFQDAYVLLSEKKISSIQSIVPALEIANAHRKPLVIIAEDVDGEALSTLVLNRLKVGLQVVAVKAPGFGDNRKNQLKDMAIATGGAVFGEEGLTLNLEDVQPHDLGKVGEVIVTKDDAMLLKGKGDKAQIEKRIQEIIEQLDVTTSEYEKEKLNERLAKLSDGVAVLKVGGTSDVEVNEKKDRVTDALNATRAAVEEGIVLGGGCALLRCIPALDSLTPANEDQKIGIEIIKRTLKIPAMTIAKNAGVEGSLIVEKIMQSSSEVGYDAMAGDFVNMVEKGIIDPTKVVRTALLDAAGVASLLTTAEVVVTEIPKEEKDPGMGAMGGMGGGMGGGMF

SEQ ID NO: 6493 - protein, 497 aa, Homo sapiens
MAMSSLGCLCALTVLIRYCNRDFDDEKILIQHQKAKHFKCHICHKKLYTGPGLAIHCMQVHKETIDAVPNAIPGRTDIELEIYGMEGIPEKDMDERRRLLEQKTQESQKKKQQDDSDEYDDDDSAASTSFQPQPVQPQQGYIPPMAQPGLPPVPGAPGMPPGIPPLMPGVPPLMPGMPPVMPGMPPGLHHQRKYTQSFCGENIMMPMGGMMPPGPGIPPLMPGMPPGMPPPVPRPGIPPMTQAQAVSAPGILNRPPAPTATVPAPQPPVTKPLFPSAGQMGTPVTSSSTASSNSESLSASSKALFPSTAQAQAAVQGPVGTDFKPLNSTPATTTEPPKPTFPAYTQSTASTTSTTNSTAAKPAASITSKPATLTTTSATSKLIHPDEDISLEERRAQLPKYQRNLPRPGQAPIGNPPVGPIGGMMPPQPGIPQQQGMRPPMPPHGQYGGHHQGMPGYLPGAMPPYGQGPPMVPPYQGGPPRPPMGMRPPVMSQGGRY

SEQ ID NO: 6494 - protein, 233 aa, Homo sapiens
MGSPRSALSCLLLHLLVLCLQAQEGPGRGPALGRELASLFRAGREPQGVSQQHVREQSLVTDQLSRRLIRTYQLYSRTSGKHVQVLANKRINAMAEDGDPFAKLIVETDTFGSRVRVRGAETGLYICMNKKGKLIAKSNGKGKDCVFTEIVLENNYTALQNAKYEGWYMAFTRKGRPRKGSKTRQHQREVHFMKRLPRGHHTTEQSLRFEFLNYPPFTRSLRGSQRTWAPEPR

SEQ ID NO: 6495 - protein, 449 aa, Homo sapiens
MADGEEPMAVDGGCGDTGDWEGRWNHVKKFLERSGPFTHPDFEPSTESLQFLLDTCKVLVIGAGGLGCELLKNLALSGFRQIHVIDMDTIDVSNLNRQFLFRPKDIGRPKAEVAAEFLNDRVPNCNVVPHFNKIQDFNDTFYRQFHIIVCGLDSIIARRWINGMLISLLNYEDGVLDPSSIVPLIDGGTEGFKGNARVILPGMTACIECTLELYPPQVNFPMCTIASMPRLPEHCIEYVRMLQWPKEQPFGEGVPLDGDDPEHIQWIFQKSLERASQYNIRGVTYRLTQGVVKRIIPAVASTNAVIAAVCATEVFKIATSAYIPLNNYLVFNDVDGLYTYTFEAERKENCPACSQLPQNIQFSPSAKLQEVLDYLTNSASLQMKSPAITATLEGKNRTLYLQSVTSIEERTRPNLSKTLKELGLVDGQELAVADVTTPQTVLFKLHFTS

SEQ ID NO: 6496 - protein, 115 aa, Homo sapiens
MEVKDANSALLSNYETLKYISKTPCRHQSPEIVREFLTALKSHKLTKAEKLQLLNHRPVTAVEIQLMVEESEERLTEEQIEALLHTVTSILPAEPEAEQKKNTNSNVAMDEEDPA

SEQ ID NO: 6497 - protein, 948 aa, Homo sapiens
MASVPVYCLCRLPYDVTRFMIECDMCQDWFHGSCVGVEEEKAADIDLYHCPNCEVLHGPSIMKKRRGSSKGHDTHKGKPVKTGSPTFVRELRSRTFDSSDEVILKPTGNQLTVEFLEENSFSVPILVLKKDGLGMTLPSPSFTVRDVEHYVGSDKEIDVIDVTRQADCKMKLGDFVKYYYSGKREKVLNVISLEFSDTRLSNLVETPKIVRKLSWVENLWPEECVFERPNVQKYCLMSVRDSYTDFHIDFGGTSVWYHVLKGEKIFYLIRPTNANLTLFECWSSSSNQNEMFFGDQVDKCYKCSVKQGQTLFIPTGWIHAVLTPVDCLAFGGNFLHSLNIEMQLKAYEIEKRLSTADLFRFPNFETICWYVGKHILDIFRGLRENRRHPASYLVHGGKALNLAFRAWTRKEALPDHEDEIPETVRTVQLIKDLAREIRLVEFNITGACLNDSDDDSPDLDLDGNESPLALLMSNGSTKRVKSLSKSRRTKIAKKVDKARLMAEQVMEDEFDLDSDDELQIDERLGKEKATLIIRPKFPRKLPRAKPCSDPNRVREPGEVEFDIEEDYTTDEDMVEGVEGKLGNGSGAGGILDLLKASRQVGGPDYAALTEAPASPSTQEAIQGMLCMANLQSSSSSPATSSLQAWWTGGQDRSSGSSSSGLGTVSNSPASQRTPGKRPIKRPAYWRTESEEEEENASLDEQDSLGACFKDAEYIYPSLESDDDDPALKSRPKKKKNSDDAPWSPKARVTPTLPKQDRPVREGTRVASIETGLAAAAAKLAQQELQKAQKKKYIKKKPLLKEVEQPRPQDSNLSLTVPAPTVAATPQLVTSSSPLPPPEPKQEALSGSLADHEYTARPNAFGMAQANRSTTPMAPGVFLTQRRPSVGSQSNQAGQGKRPKKGLATAKQRLGRILKIHRNGKLLLRQVIVQAECRQAIHEPKLKRRDAHP

SEQ ID NO: 6498 - protein, 2409 aa, Homo sapiens
MFINIKSILWMCSTLIVTHALHKVKVGKSPPVRGSLSGKVSLPCHFSTMPTLPPSYNTSEFLRIKWSKIEVDKNGKDLKETTVLVAQNGNIKIGQDYKGRVSVPTHPEAVGDASLTVVKLLASDAGLYRCDVMYGIEDTQDTVSLTVDGVVFHYRAATSRYTLNFEAAQKACLDVGAVIATPEQLFAAYEDGFEQCDAGWLADQTVRYPIRAPRVGCYGDKMGKAGVRTYGFRSPQETYDVYCYVDHLDGDVFHLTVPSKFTFEEAAKECENQDARLATVGELQAAWRNGFDQCDYGWLSDASVRHPVTVARAQCGGGLLGVRTLYRFENQTGFPPPDSRFDAYCFKRRMSDLSVIGHPIDSESKEDEPCSEETDPVHDLMAEILPEFPDIIEIDLYHSEENEEEEEECANATDVTTTPSVQYINGKHLVTTVPKDPEAAEARRGQFESVAPSQNFSDSSESDTHPFVIAKTELSTAVQPNESTETTESLEVTWKPETYPETSEHFSGGEPDVFPTVPFHEEFESGTAKKGAESVTERDTEVGHQAHEHTEPVSLFPEESSGEIAIDQESQKIAFARATEVTFGEEVEKSTSVTYTPTIVPSSASAYVSEEEAVTLIGNPWPDDLLSTKESWVEATPRQVVELSGSSSIPITEGSGEAEEDEDTMFTMVTDLSQRNTTDTLITLDTSRIITESFFEVPATTIYPVSEQPSAKVVPTKFVSETDTSEWISSTTVEEKKRKEEEGTTGTASTFEVYSSTQRSDQLILPFELESPNVATSSDSGTRKSFMSLTTPTQSEREMTDSTPVFTETNTLENLGAQTTEHSSIHQPGVQEGLTTLPRSPASVFMEQGSGEAAADPETTTVSSFSLNVEYAIQAEKEVAGTLSPHVETTFSTEPTGLVLSTVMDRVVAENITQTSREIVISERLGEPNYGAEIRGFSTGFPLEEDFSGDFREYSTVSHPIAKEETVMMEGSGDAAFRDTQTSPSTVPTSVHISHISDSEGPSSTMVSTSAFPWEEFTSSAEGSGEQLVTVSSSVVPVLPSAVQKFSGTASSIIDEGLGEVGTVNEIDRRSTILPTAEVEGTKAPVEKEEVKVSGTVSTNFPQTIEPAKLWSRQEVNPVRQEIESETTSEEQIQEEKSFESPQNSPATEQTIFDSQTFTETELKTTDYSVLTTKKTYSDDKEMKEEDTSLVNMSTPDPDANGLESYTTLPEATEKSHFFLATALVTESIPAEHVVTDSPIKKEESTKHFPKGMRPTIQESDTELLFSGLGSGEEVLPTLPTESVNFTEVEQINNTLYPHTSQVESTSSDKIEDFNRMENVAKEVGPLVSQTDIFEGSGSVTSTTLIEILSDTGAEGPTVAPLPFSTDIGHPQNQTVRWAEEIQTSRPQTITEQDSNKNSSTAEINETTTSSTDFLARAYGFEMAKEFVTSAPKPSDLYYEPSGEGSGEVDIVDSFHTSATTQATRQESSTTFVSDGSLEKHPEVPSAKAVTADGFPTVSVMLPLHSEQNKSSPDPTSTLSNTVSYERSTDGSFQDRFREFEDSTLKPNRKKPTENIIIDLDKEDKDLILTITESTILEILPELTSDKNTIIDIDHTKPVYEDILGMQTDIDTEVPSEPHDSNDESNDDSTQVQEIYEAAVNLSLTEETFEGSADVLASYTQATHDESMTYEDRSQLDHMGFHFTTGIPAPSTETELDVLLPTATSLPIPRKSATVIPEIEGIKAEAKALDDMFESSTLSDGQAIADQSEIIPTLGQFERTQEEYEDKKHAGPSFQPEFSSGAEEALVDHTPYLSIATTHLMDQSVTEVPDVMEGSNPPYYTDTTLAVSTFAKLSSQTPSSPLTIYSGSEASGHTEIPQPSALPGIDVGSSVMSPQDSFKEIHVNIEATFKPSSEEYLHITEPPSLSPDTKLEPSEDDGKPELLEEMEASPTELIAVEGTEILQDFQNKTDGQVSGEAIKMFPTIKTPEAGTVITTADEIELEGATQWPHSTSASATYGVEAGVVPWLSPQTSERPTLSSSPEINPETQAALIRGQDSTIAASEQQVAARILDSNDQATVNPVEFNTEVATPPFSLLETSNETDFLIGINEESVEGTAIYLPGPDRCKMNPCLNGGTCYPTETSYVCTCVPGYSGDQCELDFDECHSNPCRNGATCVDGFNTFRCLCLPSYVGALCEQDTETCDYGWHKFQGQCYKYFAHRRTWDAAERECRLQGAHLTSILSHEEQMFVNRVGHDYQWIGLNDKMFEHDFRWTDGSTLQYENWRPNQPDSFFSAGEDCVVIIWHENGQWNDVPCNYHLTYTCKKGTVACGQPPVVENAKTFGKMKPRYEINSLIRYHCKDGFIQRHLPTIRCLGNGRWAIPKITCMNPSAYQRTYSMKYFKNSSSAKDNSINTSKHDHRWSRRWQESRR

SEQ ID NO: 6499 - protein, 85 aa, Homo sapiens
MGPRQGRWWLLLWLPPLATLPVRGEAAAAALSVRRCKALKEKDLIRTSESDCYCYNQNSQVEWKYIWSTMQGDCVLLCGACQEDI

SEQ ID NO: 6500 - protein, 393 aa, Homo sapiens
MDENESNQSLMTSSQYPKEAVRKRQNSARNSGASDSSRFSRKSFKLDYRLEEDVTKSKKGKDGRFVNPWPTWKNPSIPNVLRWLIMEKDHSSVPSSKEELDKELPVLKPYFITNPEEAGVREAGLRVTWLGHATVMVEMDELIFLTDPIFSSRASPSQYMGPKRFRRSPCTISELPPIDAVLISHNHYDHLDYNSVIALNERFGNELRWFVPLGLLDWMQKCGCENVIELDWWEENCVPGHDKVTFVFTPSQHWCKRTLMDDNKVLWGSWSVLGPWNRFFFAGDTGYCPAFEEIGKRFGPFDLAAIPIGAYEPRWFMKYQHVDPEEAVRIHTDVQTKKSMAIHWGTFALANEHYLEPPVKLNEALERYGLNAEDFFVLKHGESRYLNNDDENF

SEQ ID NO: 6501 - protein, 230 aa, Homo sapiens
MGRPLLLPLLPLLLPPAFLQPSGSTGSGPSYLYGVTQPKHLSASMGGSVEIPFSFYYPWELATAPDVRISWRRGHFHRQSFYSTRPPSIHKDYVNRLFLNWTEGQKSGFLRISNLQKQDQSVYFCRVELDTRSSGRQQWQSIEGTKLSITQGQQRTKATTPAREPFQNTEEPYENIRNEGQNTDPKLNPKDDGIVYASLALSSSTSPRAPPSHRPLKSPQNETLYSVLKA

SEQ ID NO: 6502 - protein, 161 aa, Homo sapiens
MSVPGPYQAATGPSSAPSAPPSYEETVAVNSYYPTPPAPMPGPTTGLVTGPDGKGMNPPSYYTQPAPIPNNNPITVQTVYVQHPITFLDRPIQMCCPSCNKMIVSQLSYNAGALTWLSCGSLCLLGCIAGCCFIPFCVDALQDVDHYCPNCRALLGTYKRL

SEQ ID NO: 6503 - protein, 486 aa, Homo sapiens
MAWIKRKFGERPPPKRLTREAMRNYLKERGDQTVLILHAKVAQKSYGNEKRFFCPPPCVYLMGSGWKKKKEQMERDGCSEQESQPCAFIGIGNSDQEMQQLNLEGKNYCTAKTLYISDSDKRKHFMLSVKMFYGNSDDIGVFLSKRIKVISKPSKKKQSLKNADLCIASGTKVALFNRLRSQTVSTRYLHVEGGNFHASSQQWGAFFIHLLDDDESEGEEFTVRDGYIHYGQTVKLVCSVTGMALPRLIIRKVDKQTALLDADDPVSQLHKCAFYLKDTERMYLCLSQERIIQFQATPCPKEPNKEMINDGASWTIISTDKAEYTFYEGMGPVLAPVTPVPVVESLQLNGGGDVAMLELTGQNFTPNLRVWFGDVEAETMYRCGESMLCVVPDISAFREGWRWVRQPVQVPVTLVRNDGIIYSTSLTFTYTPEPGPRPHCSAAGAILRANSSQVPPNESNTNSEGSYTNASTNSTSVTSSTATVVS

SEQ ID NO: 6504 - protein, 270 aa, Homo sapiens
MSSTQFNKGPSYGLSAEVKNRLLSKYDPQKEAELRTWIEGLTGLSIGPDFQKGLKDGTILCTLMNKLQPGSVPKINRSMQNWHQLENLSNFIKAMVSYGMNPVDLFEANDLFESGNMTQVQVSLLALAGKMGTNKCASQSGMTAYGTRRHLYDPKNHILPPMDHSTISLQMGTNKCASQVGMTAPGTRRHIYDTKLGTDKCDNSSMSLQMGYTQGANQSGQVFGLGRQIYDPKYCPQGTVADGAPSGTGDCPDPGEVPEYPPYYQEEAGY

SEQ ID NO: 6505 - protein, 475 aa, Homo sapiens
MAEGSVMFSDVSIDFSQEEWDCLDPVQRDLYRDVMLENYGNLVSMGLYTPKPQVISLLEQGKEPWMVGRELTRGLCSDLESMCETKLLSLKKEVYEIELCQREIMGLTKHGLEYSSFGDVLEYRSHLAKQLGYPNGHFSQEIFTPEYMPTFIQQTFLTLHQIINNEDRPYECKKCGKAFSQNSQFIQHQRIHIGEKSYECKECGKFFSCGSHVTRHLKIHTGEKPFECKECGKAFSCSSYLSQHQRIHTGKKPYECKECGKAFSYCSNLIDHQRIHTGEKPYECKVCGKAFTKSSQLFQHARIHTGEKPYECKECGKAFTQSSKLVQHQRIHTGEKPYECKECGKAFSSGSALTNHQRIHTGEKPYDCKECGKAFTQSSQLRQHQRIHAGEKPFECLECGKAFTQNSQLFQHQRIHTDEKPYECNECGKAFNKCSNLTRHLRIHTGEKPYNCKECGKAFSSGSDLIRHQGIHTNK

SEQ ID NO: 6506 - protein, 195 aa, Homo sapiens
MAWEARREPGPRRAAVRETVMLLLCLGVPTGRPYNVDTESALLYQGPHNTLFGYSVVLHSHGANRWLLVGAPTANWLANASVINPGAIYRCRIGKNPGQTCEQLQLGSPNGEPCGKTCLEERDNQWLGVTLSRQPGENGSIVTCGHRWKNIFYIKNENKLPTGGCYGVPPDLRTELSKRIAPCYQGSISKYRART

SEQ ID NO: 6507 - protein, 129 aa, Homo sapiens
MSGGRRKEEPPQPQLANGALKVSVWSKVLRSDAAWEDKDEFLDVIYWFRQIIAVVLGVIWGVLPLRGFLGIAGFCLINAGVLYLYFSNYLQIDEEEYGGTWELTKEGFMTSFALFMVIWIIFYTAIHYD

SEQ ID NO: 6508 - protein, 238 aa, Homo sapiens
MIGPIIDKLEKVAVRGGDKKLKPEYDIMCKVKSWVIDQKKPVRFYHDWNDKEIEVLNKHLFLTSKPMVYLVNLSEKDYIRKKNKWLIKIKEWVDKYDPGALVIPFSGALELKLQELSAEERQKYLEANMTQSALPKIIKAGFAALQLEYFFTAGPDEVRAWTIRKGTKAPQAAGKIHTDFEKGFIMAEVMKYEDFKEEGSENAVKAAGKYRQQGRNYIVEDGDIIFFKFNTPQQPKKK

SEQ ID NO: 6509 - protein, 219 aa, Homo sapiens
MNNGGKAEKENTPSEANLQEEEVRTLFVSGLPLDIKPRELYLLFRPFKGYEGSLIKLTSKQPVGFVSFDSRSEAEAAKNALNGIRFDPEIPQTLRLEFAKANTKMAKNKLVGTPNPSTPLPNTVPQFIAREPYELTVPALYPSSPEVWAPYPLYPAELAPALPPPAFTYPASLHAQCFSPEAKPNTPVFCPLLQQIRFVSGNVFVTYQPTADQQRELPC

SEQ ID NO: 6510 - protein, 759 aa, Homo sapiens
MESSPFNRRQWTSLSLRVTAKELSLVNKNKSSAIVEIFSKYQKAAEETNMEKKRSNTENLSQHFRKGTLTVLKKKWENPGLGAESHTDSLRNSSTEIRHRADHPPAEVTSHAASGAKADQEEQIHPRSRLRSPPEALVQGRYPHIKDGEDLKDHSTESKKMENCLGESRHEVEKSEISENTDASGKIEKYNVPLNRLKMMFEKGEPTQTKILRAQSRSASGRKISENSYSLDDLEIGPGQLSSSTFDSEKNESRRNLELPRLSETSIKDRMAKYQAAVSKQSSSTNYTNELKASGGEIKIHKMEQKENVPPGPEVCITHQEGEKISANENSLAVRSTPAEDDSRDSQVKSEVQQPVHPKPLSPDSRASSLSESSPPKAMKKFQAPARETCVECQKTVYPMERLLANQQVFHISCFRCSYCNNKLSLGTYASLHGRIYCKPHFNQLFKSKGNYDEGFGHRPHKDLWASKNENEEILERPAQLANARETPHSPGVEDAPIAKVGVLAASMEAKASSQQEKEDKPAETKKLRIAWPPPTELGSSGSALEEGIKMSKPKWPPEDEISKPEVPEDVDLDLKKLRRSSSLKERSRPFTVAASFQSTSVKSPKTVSPPIRKGWSMSEQSEESVGGRVAERKQVENAKASKKNGNVGKTTWQNKESKGETGKRSKEGHSLEMENENLVENGADSDEDDNSFLKQQSPQEPKSLNWSSFVDNTFAEEFTTQNQKSQDVELWEGEVVKELSVEEQIKRNRYYDEDEDEE

SEQ ID NO: 6511 - protein, 128 aa, Homo sapiens
MGIQGGSVLFGLLLVLAVFCHSGHSLQCYNCPNPTADCKTAVNCSSDFDACLITKAGLQVYNKCWKFEHCNFNDVTTRLRENELTYYCCKKDLCNFNEQLENGGTSLSEKTVLLLVTPFLAAAWSLHP

SEQ ID NO: 6512 - protein, 489 aa, Homo sapiens
MSFRKVVRQSKFRHVFGQPVKNDQCYEDIRVSRVTWDSTFCAVNPKFLAVIVEASGGGAFLVLPLSKTGRIDKAYPTVCGHTGPVLDIDWCPHNDEVIASGSEDCTVMVWQIPENGLTSPLTEPVVVLEGHTKRVGIIAWHPTARNVLLSAGCDNVVLIWNVGTAEELYRLDSLHPDLIYNVSWNHNGSLFCSACKDKSVRIIDPRRGTLVAEREKAHEGARPMRAIFLADGKVFTTGFSRMSERQLALWDPENLEEPMALQELDSSNGALLPFYDPDTSVVYVCGKGDSSIRYFEITEEPPYIHFLNTFTSKEPQRGMGSMPKRGLEVSKCEIARFYKLHERKCEPIVMTVPRKSDLFQDDLYPDTAGPEAALEAEEWVSGRDADPILISLREAYVPSKQRDLKISRRNVLSDSRPAMAPGSSHLGAPASTTTAADATPSGSLARAGEAGKLEEVMQELRALRALVKEQGDRICRLEEQLGRMENGDA

SEQ ID NO: 6513 - protein, 76 aa, Homo sapiens
MPACRLGPLAAALLLSLLLFGFTLVSDKEGSCPQVNINFPQLGLCRDQCQVDSQCPGQMKCCRNGCGKVSCVTPNF

SEQ ID NO: 6514 - protein, 449 aa, Homo sapiens
MSDIRHSLLRRDALSAAKEVLYHLDIYFSSQLQSAPLPIVDKGPVELLEEFVFQVPKERSAQPKRLNSLQELQLLEIMCNYFQEQTKDSVRQIIFSSLFSPQGNKADDSRMSLLGKLVSMAVAVCRIPVLECAASWLQRTPVVYCVRLAKALVDDYCCLVPGSIQTLKQIFSASPRFCCQFITSVTALYDLSSDDLIPPMDLLEMIVTWIFEDPRLILITFLNTPIAANLPIGFLELTPLVGLIRWCVKAPLAYKRKKKPPLSNGHVSNKVTKDPGVGMDRDSHLLYSKLHLSVLQVLMTLQLHLTEKNLYGRLGLILFDHMVPLVEEINRLADELNPLNASQEIELSLDRLAQALQVAMASGALLCTRDDLRTLCSRLPHNNLLQLVISGPVQQSPHAALPPGFYPHIHTPPLGYGAVPAHPAAHPALPTHPGHTFISGVTFPFRPIR

SEQ ID NO: 6515 - protein, 619 aa, Homo sapiens
MSGLVLGQRDEPAGHRLSQEEILGSTRLVSQGLEALRSEHQAVLQSLSQTIECLQQGGHEEGLVHEKARQLRRSMENIELGLSEAQVMLALASHLSTVESEKQKLRAQVRRLCQENQWLRDELAGTQQRLQRSEQAVAQLEEEKKHLEFLGQLRQYDEDGHTSEEKEGDATKDSLDDLFPNEEEEDPSNGLSRGQGATAAQQGGYEIPARLRTLHNLVIQYAAQGRYEVAVPLCKQALEDLERTSGRGHPDVATMLNILALVYRDQNKYKEAAHLLNDALSIRESTLGPDHPAVAATLNNLAVLYGKRGKYKEAEPLCQRALEIREKVLGTNHPDVAKQLNNLALLCQNQGKYEAVERYYQRALAIYEGQLGPDNPNVARTKNNLASCYLKQGKYAEAETLYKEILTRAHVQEFGSVDDDHKPIWMHAEEREEMSKSRHHEGGTPYAEYGGWYKACKVSSPTVNTTLRNLGALYRRQGKLEAAETLEECALRSRRQGTDPISQTKVAELLGESDGRRTSQEGPGDSVKFEGGEDASVAVEWSGDGSGTLQRSGSLGKIRDVLRRSSELLVRKLQGTEPRPSSSNMKRAASLNYLNQPSAAPLQVSRGLSASTMDLSSSS

SEQ ID NO: 6516 - protein, 963 aa, Homo sapiens
MAAQRIRAANSNGLPRCKSEGTLIDLSEGFSETSFNDIKVPSPSALLVDNPTPFGNAKEVIAIKDYCPTNFTTLKFSKGDHLYVLDTSGGEWWYAHNTTEMGYIPSSYVQPLNYRNSTLSDSGMIDNLPDSPDEVAKELELLGGWTDDKKVPGRMYSNNPFWNGVQTNPFLNGNVPVMPSLDELNPKSTVDLLLFDAGTSSFTESSSATTNSTGNIFDELPVTNGLHAEPPVRRDNPFFRSKRSYSLSELSVLQAKSDAPTSSSFFTGLKSPAPEQFQSREDFRTAWLNHRKLARSCHDLDLLGQSPGWGQTQAVETNIVCKLDSSGGAVQLPDTSISIHVPEGHVAPGETQQISMKALLDPPLELNSDRSCSISPVLEVKLSNLEVKTSIILEMKVSAEIKNDLFSKSTVGLQCLRSDSKEGPYVSVPLNCSCGDTVQAQLHNLEPCMYVAVVAHGPSILYPSTVWDFINKKVTVGLYGPKHIHPSFKTVVTIFGHDCAPKTLLVSEVTRQAPNPAPVALQLWGKHQFVLSRPQDLKVCMFSNMTNYEVKASEQAKVVRGFQLKLGKVSRLIFPITSQNPNELSDFTLRVQVKDDQEAILTQFCVQTPQPPPKSAIKPSGQRRFLKKNEVGKIILSPFATTTKYPTFQDRPVSSLKFGKLLKTVVRQNKNHYLLEYKKGDGIALLSEERVRLRGQLWTKEWYIGYYQGRVGLVHTKNVLVVGRARPSLCSGPELSTSVLLEQILRPCKFLTYIYASVRTLLMENISSWRSFADALGYVNLPLTFFCRAELDSEPERVASVLEKLKEDCNNTENKERKSFQKELVMALLKMDCQGLVVRLIQDFVLLTTAVEVAQRWRELAEKLAKVSKQQMDAYESPHRDRNGVVDSEAMWKPAYDFLLTWSHQIGDSYRDVIQELHLGLDKMKNPITKRWKHLTGTLILVNSLDVLRAAAFSPADQDDFVI

SEQ ID NO: 6517 - protein, 253 aa, Homo sapiens
MDNRFATAFVIACVLSLISTIYMAASIGTDFWYEYRSPVQENSSDLNKSIWDEFISDEADEKTYNDALFRYNGTVGLWRRCITIPKNMHWYSPPERTESFDVVTKCVSFTLTEQFMEKFVDPGNHNSGIDLLRTYLWRCQFLLPFVSLGLMCFGALIGLCACICRSLYPTIATGILHLLAGLCTLGSVSCYVAGIELLHQKLELPDNVSGEFGWSFCLACVSAPLQFMASALFIWAAHTNRKEYTLMKAYRVA

SEQ ID NO: 6518 - protein, 414 aa, Homo sapiens
MPEFLEDPSVLTKDKLKSELVANNVTLPAGEQRKDVYVQLYLQHLTARNRPPLPAGTNSKGPPDFSSDEEREPTPVLGSGAAAAGRSRAAVGRKATKKTDKPRQEDKDDLDVTELTNEDLLDQLVKYGVNPGPIVGTTRKLYEKKLLKLREQGTESRSSTPLPTISSSAENTRQNGSNDSDRYSDNEEDSKIELKLEKREPLKGRAKTPVTLKQRRVEHNQVETSEHFRIDGPVISESTPIAETIMASSNESLVVNRVTGNFKHASPILPITEFSDIPRRAPKKPLTRAEVGEKTEERRVERDILKEMFPYEASTPTGISASCRRPIKGAAGRPLELSDFRMEESFSSKYVPKYVPLADVKSEKTKKGRSIPVWIKILLFVVVAVFLFLVYQAMETNQVNPFSNFLHVDPRKSN

SEQ ID NO: 6519 - protein, 455 aa, Homo sapiens
MSSLGASFVQIKFDDLQFFENCGGGSFGSVYRAKWISQDKEVAVKKLLKIEKEAEILSVLSHRNIIQFYGVILEPPNYGIVTEYASLGSLYDYINSNRSEEMDMDHIMTWATDVAKGMHYLHMEAPVKVIHRDLKSRNVVIAADGVLKICDFGASRFHNHTTHMSLVGTFPWMAPEVIQSLPVSETCDTYSYGVVLWEMLTREVPFKGLEGLQVAWLVVEKNERLTIPSSCPRSFAELLHQCWEADAKKRPSFKQIISILESMSNDTSLPDKCNSFLHNKAEWRCEIEATLERLKKLERDLSFKEQELKERERRLKMWEQKLTEQSNTPLLLPLAARMSEESYFESKTEESNSAEMSCQITATSNGEGHGMNPSLQAMMLMGFGDIFSMNKAGAVMHSGMQINMQAKQNSSKTTSKRRGKKVNMALGFSDFDLSEGDDDDDDDGEEEDNDMDNSE

SEQ ID NO: 6520 - protein, 929 aa, Homo sapiens
MCESYSRSLLRVSVAQICQALGWDSVQLSACHLLTDVLQRYLQQLGRGCHRYSELYGRTDPILDDVGEAFQLMGVSLHELEDYIHNIEPVTFPHQIPSFPVSKNNVLQFPQPGSKDAEERKEYIPDYLPPIVSSQEEEEEEQVPTDGGTSAEAMQVPLEEDDELEEEEIINDENFLGKRPLDSPEAEELPAMKRPRLLSTKGDTLDVVLLEAREPLSSINTQKIPPMLSPVHVQDSTDLAPPSPEPPMLAPVAKSQMPTAKPLETKSFTPKTKTKTSSPGQKTKSPKTAQSPAMVGSPIRSPKTVSKEKKSPGRSKSPKSPKSPKVTTHIPQTPVRPETPNRTPSATLSEKISKETIQVKQIQTPPDAGKLNSENQPKKAVVADKTIEASIDAVIARACAEREPDPFEFSSGSESEGDIFTSPKRISGPECTTPKASTSANNFTKSGSTPLPLSGGTSSSDNSWTMDASIDEVVRKAKLGTPSNMPPNFPYISSPSVSPPTPEPLHKVYEEKTKLPSSVEVKKKLKKELKTKMKKKEKQRDREREKDKNKDKSKEKDKVKEKEKDKETGRETKYPWKEFLKEEEADPYKFKIKEFEDVDPKVKLKDGLVRKEKEKHKDKKKDREKGKKDKDKREKEKVKDKGREDKMKAPAPPLVLPPKELALPLFSPATASRVPAMLPSLLPVLPEKLFEEKEKVKEKEKKKDKKEKKKKKEKEKEKKEKEREKEKREREKREKEKEKHKHEKIKVEPVALAPSPVIPRLTLRVGAGQDKIVISKVVPAPEAKPAPSQNRPKTPPPAPAPAPGPMLVSPAPVPLPLLAQAAAGPALLPSPGPAASGASAKAPVRSVVTETVSTYVIRDEWGNQIWICPGCNKPDDGSPMIGCDDCDDWYHWPCVGIMTAPPEEMQWFCPKCANKKKDKKHKKRKHRAH

SEQ ID NO: 6521 - protein, 183 aa, Homo sapiens
MREYKVVVLGSGGVGKSALTVQFVTGTFIEKYDPTIEDFYRKEIEVDSSPSVLEILDTAGTEQFASMRDLYIKNGQGFILVYSLVNQQSFQDIKPMRDQIVRVKRYEKVPLILVGNKVDLEPEREVMSSEGRALAQEWGCPFMETSAKSKSMVDELFAEIVRQMNYSSLPEKQDQCCTTCVVQ

SEQ ID NO: 6522 - protein, 189 aa, Homo sapiens
MASKRALVILAKGAEEMETVIPVDVMRRAGIKVTVAGLAGKDPVQCSRDVVICPDASLEDAKKEGPYDVVVLPGGNLGAQNLSESAAVKEILKEQENRKGLIAAICAGPTALLAHEIGFGSKVTTHPLAKDKMMNGGHYTYSENRVEKDGLILTSRGPGTSFEFALAIVEALNGKEVAAQVKAPLVLKD

SEQ ID NO: 6523 - protein, 383 aa, Homo sapiens
MTATEALLRVLLLLLAFGHSTYGAECFPACNPQNGFCEDDNVCRCQPGWQGPLCDQCVTSPGCLHGLCGEPGQCICTDGWDGELCDRDVRACSSAPCANNRTCVSLDDGLYECSCAPGYSGKDCQKKDGPCVINGSPCQHGGTCVDDEGRASHASCLCPPGFSGNFCEIVANSCTPNPCENDGVCTDIGGDFRCRCPAGFIDKTCSRPVTNCASSPCQNGGTCLQHTQVSYECLCKPEFTGLTCVKKRALSPQQVTRLPSGYGLAYRLTPGVHELPVQQPEHRILKVSMKELNKKTPLLTEGQAICFTILGVLTSLVVLGTVGIVFLNKCETWVSNLRYNHMLRKKKNLLLQYNSGEDLAVNIIFPEKIDMTTFSKEAGDEEI

SEQ ID NO: 6524 - protein, 1344 aa, Homo sapiens
MDQREPLPPAPAENEMKYDTNNNEEEEGEQFDFDSGDEIPEADRQAPSAPETGGAGASEAPAPTGGEDGAGAETTPVAEPTKLVLPMKVNPYSVIDITPFQEDQPPTPVPSAEEENVGLHVPCGYLVPVPCGYAVPSNLPLLLPAYSSPVIICATSLDEEETPEVTEDRQPNSLSSEEPPTSEDQVGREDSALARWAADPANTAWMENPEEAIYDDVPRENSDSEPDEMIYDDVENGDEGGNSSLEYGWSSSEFESYEEQSDSECKNGIPRSFLRSNHKKQLSHDLTRLKEHYEKKMRDLMASTVGVVEIQQLRQKHELKMQKLVKAAKDGTKDGLERTRAAVKRGRSFIRTKSLIAQDHRSSLEEEQNLFIDVDCKHPEAILTPMPEGLSQQQVVRRYILGSVVDSEKNYVDALKRILEQYEKPLSEMEPKVLSERKLKTVFYRVKEILQCHSLFQIALASRVSEWDSVEMIGDVFVASFSKSMVLDAYSEYVNNFSTAVAVLKKTCATKPAFLEFLKQEQEASPDRTTLYSLMMKPIQRFPQFILLLQDMLKNTSKGHPDRLPLQMALTELETLAEKLNERKRDADQRCEVKQIAKAINERYLNKLLSSGSRYLIRSDDMIETVYNDRGEIVKTKERRVFMLNDVLMCATVSSRPSHDSRVMSSQRYLLKWSVPLGHVDAIEYGSSAGTGEHSRHLAVHPPESLAVVANAKPNKVYMGPGQLYQDLQNLLHDLNVIGQITQLIGNLKGNYQNLNQSVAHDWTSGLQRLILKKEDEIRAADCCRIQLQLPGKQDKSGRPTFFTAVFNTFTPAIKESWVNSLQMAKLALEEENHMGWFCVEDDGNHIKKEKHPLLVGHMPVMVAKQQEFKIECAAYNPEPYLNNESQPDSFSTAHGFLWIGSCTHQMGQIAIVSFQNSTPKVIECFNVESRILCMLYVPVEEKRREPGAPPDPETPAVRASDVPTICVGTEEGSISIYKSSQGSKKVRLQHFFTPEKSTVMSLACTSQSLYAGLVNGAVASYARAPDGSWDSEPQKVIKLGVLPVRSLLMMEDTLWAASGGQVFIISVETHAVEGQLEAHQEEGMVISHMAVSGVGIWIAFTSGSTLRLFHTETLKHLQDINIATPVHNMLPGHQRLSVTSLLVCHGLLMVGTSLGVLVALPVPRLQGIPKVTGRGMVSYHAHNSPVKFIVLATALHEKDKDKSRDSLAPGPEPQDEDQKDALPSGGAGSSLSQGDPDAAIWLGDSLGSMTQKSDLSSSSGSLSLSHGSSSLEHRSEDSTIYDLLKDPVSLRSKARRAKKAKASSALVVCGGQGHRRVHRKARQPHQEELAPTVMVWQIPLLNI

SEQ ID NO: 6525 - protein, 141 aa, Homo sapiens
MFACSKFVSTPSLVKSTSQLLSRPLSAVVLKRPEILTDESLSSLAVSCPLTSLVSSRSFQTSAISRDIDTAAKFIGAGAATVGVAGSGAGIGTVFGSLIIGYARNPSLKQQLFSYAILGFALSEAMGLFCLMVAFLILFAM

SEQ ID NO: 6526 - protein, 481 aa, Homo sapiens
MKGRGMLVLLLHAVVLGLPSAWAVGACARACPAACACSTVERGCSVRCDRAGLLRVPAELPCEAVSIDLDRNGLRFLGERAFGTLPSLRRLSLRHNNLSFITPGAFKGLPRLAELRLAHNGDLRYLHARTFAALSRLRRLDLAACRLFSVPERLLAELPALRELAAFDNLFRRVPGALRGLANLTHAHLERGRIEAVASSSLQGLRRLRSLSLQANRVRAVHAGAFGDCGVLEHLLLNDNLLAELPADAFRGLRRLRTLNLGGNALDRVARAWFADLAELELLYLDRNSIAFVEEGAFQNLSGLLALHLNGNRLTVLAWVAFQPGFFLGRLFLFRNPWCCDCRLEWLRDWMEGSGRVTDVPCASPGSVAGLDLSQVTFGRSSDGLCVDPEELNLTTSSPGPSPEPAATTVSRFSSLLSKLLAPRVPVEEAANTTGGLANASLSDSLSSRGVGGAGRQPWFLLASCLLPSVAQHVVFGLQMD

SEQ ID NO: 6527 - protein, 709 aa, Homo sapiens
MPSATSHSGSGSKSSGPPPPSGSSGSEAAAGAGAAAPASQHPATGTGAVQTEAMKQILGVIDKKLRNLEKKKGKLDDYQERMNKGERLNQDQLDAVSKYQEVTNNLEFAKELQRSFMALSQDIQKTIKKTARREQLMREEAEQKRLKTVLELQYVLDKLGDDEVRTDLKQGLNGVPILSEEELSLLDEFYKLVDPERDMSLRLNEQYEHASIHLWDLLEGKEKPVCGTTYKVLKEIVERVFQSNYFDSTHNHQNGLCEEEEAASAPAVEDQVPEAEPEPAEEYTEQSEVESTEYVNRQFMAETQFTSGEKEQVDEWTVETVEVVNSLQQQPQAASPSVPEPHSLTPVAQADPLVRRQRVQDLMAQMQGPYNFIQDSMLDFENQTLDPAIVSAQPMNPTQNMDMPQLVCPPVHSESRLAQPNQVPVQPEATQVPLVSSTSEGYTASQPLYQPSHATEQRPQKEPIDQIQATISLNTDQTTASSSLPAASQPQVFQAGTSKPLHSSGINVNAAPFQSMQTVFNMNAPVPPVNEPETLKQQNQYQASYNQSFSSQPHQVEQTELQQEQLQTVVGTYHGSPDQSHQVTGNHQQPPQQNTGFPRSNQPYYNSRGVSRGGSRGARGLMNGYRGPANGFRGGYDGYRPSFSNTPNSGYTQSQFSAPRDYSGYQRDGYQQNFKRGSGQSGPRGAPRGRGGPPRPNRGMPQMNTQQVN

SEQ ID NO: 6528 - protein, 546 aa, Homo sapiens
MAEVVSPVPGAGRREPGEVGRARGPPVADPGVALSPQGEIIEGCRLPVLRRNQDNEDEWPLAEILSVKDISGRKLFYVHYIDFNKRLDEWVTHERLDLKKIQFPKKEAKTPTKNGLPGSRPGSPEREVPASAQASGKTLPIPVQITLRFNLPKEREAIPGGEPDQPLSSSSCLQPNHRSTKRKVEVVSPATPVPSETAPASVFPQNGAARRAVAAQPGRKRKSNCLGTDEDSQDSSDGIPSAPRMTGSLVSDRSHDDIVTRMKNIECIELGRHRLKPWYFSPYPQELTTLPVLYLCEFCLKYGRSLKCLQRHLTKCDLRHPPGNEIYRKGTISFFEIDGRKNKSYSQNLCLLAKCFLDHKTLYYDTDPFLFYVMTEYDCKGFHIVGYFSKEKESTEDYNVACILTLPPYQRRGYGKLLIEFSYELSKVEGKTGTPEKPLSDLGLLSYRSYWSQTILEILMGLKSESGERPQITINEISEITSIKKEDVISTLQYLNLINYYKGQYILTLSEDIVDGHERAMLKRLLRIDSKCLHFTPKDWSKRGKW

SEQ ID NO: 6529 - protein, 468 aa, Homo sapiens
MWLFFGITGLLTAALSGHPSPAPPDQLNTSSAESELWEPGERLPVRLTNGSSSCSGTVEVRLEASWEPACGALWDSRAAEAVCRALGCGGAEAASQLAPPTPELPPPPAAGNTSVAANATLAGAPALLCSGAEWRLCEVVEHACRSDGRRARVTCAENRALRLVDGGGACAGRVEMLEHGEWGSVCDDTWDLEDAHVVCRQLGCGWAVQALPGLHFTPGRGPIHRDQVNCSGAEAYLWDCPGLPGQHYCGHKEDAGAVCSEHQSWRLTGGADRCEGQVEVHFRGVWNTVCDSEWYPSEAKVLCQSLGCGTAVERPKGLPHSLSGRMYYSCNGEELTLSNCSWRFNNSNLCSQSLAARVLCSASRSLHNLSTPEVPASVQTVTIESSVTVKIENKESRELMLLIPSIVLGILLLGSLIFIAFILLRIKGKYALPVMVNHQHLPTTIPAGSNSYQPVPITIPKEGPGPAP

SEQ ID NO: 6530 - protein, 512 aa, Homo sapiens
MTAPWVALALLWGSLCAGSGRGEAETRECIYYNANWELERTNQSGLERCEGEQDKRLHCYASWRNSSGTIELVKKGCWLDDFNCYDRQECVATEENPQVYFCCCEGNFCNERFTHLPEAGGPEVTYEPPPTAPTLLTVLAYSLLPIGGLSLIVLLAFWMYRHRKPPYGHVDIHEDPGPPPPSPLVGLKPLQLLEIKARGRFGCVWKAQLMNDFVAVKIFPLQDKQSWQSEREIFSTPGMKHENLLQFIAAEKRGSNLEVELWLITAFHDKGSLTDYLKGNIITWNELCHVAETMSRGLSYLHEDVPWCRGEGHKPSIAHRDFKSKNVLLKSDLTAVLADFGLAVRFEPGKPPGDTHGQVGTRRYMAPEVLEGAINFQRDAFLRIDMYAMGLVLWELVSRCKAADGPVDEYMLPFEEEIGQHPSLEELQEVVVHKKMRPTIKDHWLKHPGLAQLCVTIEECWDHDAEARLSAGCVEERVSLIRRSVNGTTSDCLVSLVTSVTNVDLPPKESSI

SEQ ID NO: 6531 - protein, 680 aa, Homo sapiens
MALDGIRMPDGCYADGTWELSVHVTDLNRDVTLRVTGEVHIGGVMLKLVEKLDVKKDWSDHALWWEKKRTWLLKTHWTLDKYGIQADAKLQFTPQHKLLRLQLPNMKYVKVKVNFSDRVFKAVSDICKTFNIRHPEELSLLKKPRDPTKKKKKKLDDQSEDEALELEGPLITPGSGSIYSSPGLYSKTMTPTYDAHDGSPLSPTSAWFGDSALSEGNPGILAVSQPITSPEILAKMFKPQALLDKAKINQGWLDSSRSLMEQDVKENEALLLRFKYYSFFDLNPKYDAIRINQLYEQAKWAILLEEIECTEEEMMMFAALQYHINKLSIMTSENHLNNSDKEVDEVDAALSDLEITLEGGKTSTILGDITSIPELADYIKVFKPKKLTLKGYKQYWCTFKDTSISCYKSKEESSGTPAHQMNLRGCEVTPDVNISGQKFNIKLLIPVAEGMNEIWLRCDNEKQYAHWMAACRLASKGKTMADSSYNLEVQNILSFLKMQHLNPDPQLIPEQITTDITPECLVSPRYLKKYKNKQITARILEAHQNVAQMSLIEAKMRFIQAWQSLPEFGITHFIARFQGGKKEELIGIAYNRLIRMDASTGDAIKTWRFSNMKQWNVNWEIKMVTVEFADEVRLSFICTEVDCKVVHEFIGGYIFLSTRAKDQNESLDEEMFYKLTSGWV

SEQ ID NO: 6532 - protein, 631 aa, Homo sapiens
MPRYGASLRQSCPRSGREQGQDGTAGAPGLLWMGLVLALALALALALALSDSRVLWAPAEAHPLSPQGHPARLHRIVPRLRDVFGWGNLTCPICKGLFTAINLGLKKEPNVARVGSVAIKLCNLLKIAPPAVCQSIVHLFEDDMVEVWRRSVLSPSEACGLLLGSTCGHWDIFSSWNISLPTVPKPPPKPPSPPAPGAPVSRILFLTDLHWDHDYLEGTDPDCADPLCCRRGSGLPPASRPGAGYWGEYSKCDLPLRTLESLLSGLGPAGPFDMVYWTGDIPAHDVWHQTRQDQLRALTTVTALVRKFLGPVPVYPAVGNHESTPVNSFPPPFIEGNHSSRWLYEAMAKAWEPWLPAEALRTLRIGGFYALSPYPGLRLISLNMNFCSRENFWLLINSTDPAGQLQWLVGELQAAEDRGDKVHIIGHIPPGHCLKSWSWNYYRIVARYENTLAAQFFGHTHVDEFEVFYDEETLSRPLAVAFLAPSATTYIGLNPGYRVYQIDGNYSGSSHVVLDHETYILNLTQANIPGAIPHWQLLYRARETYGLPNTLPTAWHNLVYRMRGDMQLFQTFWFLYHKGHPPSEPCGTPCRLATLCAQLSARADSPALCRHLMPDGSLPEAQSLWPRPLFC

SEQ ID NO: 6533 - protein, 904 aa, Homo sapiens
MEWGSESAAVRRHRVGVERREGAAAAPPPEREARAQEPLVDGCSGGGRTRKRSPGGSGGASRGAGTGLSEVRAALGLALYLIALRTLVQLSLQQLVLRGAAGHRGEFDALQARDYLEHITSIGPRTTGSPENEILTVHYLLEQIKLIEVQSNSLHKISVDVQRPTGSFSIDFLGGFTSYYDNITNVVVKLEPRDGAQHAVLANCHFDSVANSPGASDDAVSCSVMLEVLRVLSTSSEALHHAVIFLFNGAEENVLQASHGFITQHPWASLIRAFINLEAAGVGGKELVFQTGPENPWLVQAYVSAAKHPFASVVAQEVFQSGIIPSDTDFRIYRDFGNIPGIDLAFIENGYIYHTKYDTADRILTDSIQRAGDNILAVLKHLATSDMLAAASKYRHGNMVFFDVLGLFVIAYPSRIGSIINYMVVMGVVLYLGKKFLQPKHKTGNYKKDFLCGLGITLISWFTSLVTVLIIAVFISLIGQSLSWYNHFYVSVCLYGTATVAKIILIHTLAKRFYYMNASAQYLGEVFFDISLFVHCCFLVTLTYQGLCSAFISAVWVAFPLLTKLCVHKDFKQHGAQGKFIAFYLLGMFIPYLYALYLIWAVFEMFTPILGRSGSEIPPDVVLASILAGCTMILSSYFINFIYLAKSTKKTMLTLTLVCAITFLLVCSGTFFPYSSNPANPKPKRVFLQHMTRTFHDLEGNAVKRDSGIWINGFDYTGISHITPHIPEINDSIRAHCEENAPLCGFPWYLPVHFLIRKNWYLPAPEVSPRNPPHFRLISKEQTPWDSIKLTFEATGPSHMSFYVRAHKGSTLSQWSLGNGTPVTSKGGDYFVFYSHGLQASAWQFWIEVQVSEEHPEGMVTVAIAAHYLSGEDKRSPQLDALKEKFPDWTFPSAWVCTYDLFVF

SEQ ID NO: 6534 - protein, 239 aa, Homo sapiens
MVQPQTSKAESPALAASPNAQMDDVIDTLTSLRLTNSALRREASTLRAEKANLTNMLESVMAELTLLRTRARIPGALQITPPISSITSNGTRPMTTPPTSLPEPFSGDPGRLAGFLMQMDRFMIFQASRFPGEAERVAFLVSRLTGEAEKWAIPHMQPDSPLRNNYQGFLAELRRTYKSPLRHARRAQIRKTSASNRAVRERQMLCRQLASAGTGPCPVHPASNGTSPAPALPARARNL

SEQ ID NO: 6535 - protein, 286 aa, Homo sapiens
MKVLLLTGLGALFFAYYWDDNFDPASLQGARVLLTGANAGVGEELAYHYARLGSHLVLTAHTEALLQKVVGNCRKLGAPKVFYIAADMASPEAPESVVQFALDKLGGLDYLVLNHIGGAPAGTRARSPQATRWLMQVNFVSYVQLTSRALPSLTDSKGSLVVVSSLLGRVPTSFSTPYSAAKFALDGFFGSLRRELDVQDVNVAITMCVLGLRDRASAAEAVRGVTRVKAAPGPKAALAVIRGGATRAAGVFYPWRFRLLCLLRRWLPRPRAWFIRQELNVTAAAA

SEQ ID NO: 6536 - protein, 176 aa, Homo sapiens
MGRARDAILDALENLTAEELKKFKLKLLSVPLREGYGRIPRGALLSMDALDLTDKLVSFYLETYGAELTANVLRDMGLQEMAGQLQAATHQGLHFIDQHRAALIARVTNVEWLLDALYGKVLTDEQYQAVRAEPTNPSKMRKLFSFTPAWNWTCKDLLLQALRESQSYLVEDLERS

SEQ ID NO: 6537 - protein, 608 aa, Homo sapiens
MADNLSDTLKKLKITAVDKTEDSLEGCLDCLLQALAQNNTETSEKIQASGILQLFASLLTPQSSCKAKVANIIAEVAKNEFMRIPCVDAGLISPLVQLLNSKDQEVLLQTGRALGNICYDSHEGRSAVDQAGGAQIVIDHLRSLCSITDPANEKLLTVFCGMLMNYSNENDSLQAQLINMGVIPTLVKLLGIHCQNAALTEMCLVAFGNLAELESSKEQFASTNIAEELVKLFKKQIEHDKREMIFEVLAPLAENDAIKLQLVEAGLVECLLEIVQQKVDSDKEDDITELKTGSDLMVLLLLGDESMQKLFEGGKGSVFQRVLSWIPSNNHQLQLAGALAIANFARNDANCIHMVDNGIVEKLMDLLDRHVEDGNVTVQHAALSALRNLAIPVINKAKMLSAGVTEAVLKFLKSEMPPVQFKLLGTLRMLIDAQAEAAEQLGKNVKLVERLVEWCEAKDHAGVMGESNRLLSALIRHSKSKDVIKTIVQSGGIKHLVTMATSEHVIMQNEALVALALIAALELGTAEKDLESAKLVQILHRLLADERSAPEIKYNSMVLICALMGSECLHKEVQDLAFLDVVSKLRSHENKSVAQQASLTEQRLTVES

SEQ ID NO: 6538 - protein, 76 aa, Homo sapiens
MLPCLALLLLMELSVCTVAGDGGEEQTLSTEAETWEGAGPSIQLQLQEVKTGKASQFFGLMGKRVGGREDEAQGSE

SEQ ID NO: 6539 - protein, 966 aa, Homo sapiens
MAAVAAVAARRRRSWASLVLAFLGVCLGITLAVDRSNFKTCEESSFCKRQRSIRPGLSPYRALLDSLQLGPDSLTVHLIHEVTKVLLVLELQGLQKNMTRFRIDELEPRRPRYRVPDVLVADPPIARLSVSGRDENSVELTMAEGPYKIILTARPFRLDLLEDRSLLLSVNARGLLEFEHQRAPRVSFSDKVNLTLGSIWDKIKNLFSRQGSKDPAEGDGAQPEETPRDGDKPEETQGKAEKDEPGAWEETFKTHSDSKPYGPMSVGLDFSLPGMEHVYGIPEHADNLRLKVTEGGEPYRLYNLDVFQYELYNPMALYGSVPVLLAHNPHRDLGIFWLNAAETWVDISSNTAGKTLFGKMMDYLQGSGETPQTDVRWMSETGIIDVFLLLGPSISDVFRQYASLTGTQALPPLFSLGYHQSRWNYRDEADVLEVDQGFDDHNLPCDVIWLDIEHADGKRYFTWDPSRFPQPRTMLERLASKRRKLVAIVDPHIKVDSGYRVHEELRNLGLYVKTRDGSDYEGWCWPGSAGYPDFTNPTMRAWWANMFSYDNYEGSAPNLFVWNDMNEPSVFNGPEVTMLKDAQHYGGWEHRDVHNIYGLYVHMATADGLRQRSGGMERPFVLARAFFAGSQRFGAVWTGDNTAEWDHLKISIPMCLSLGLVGLSFCGADVGGFFKNPEPELLVRWYQMGAYQPFFRAHAHLDTGRREPWLLPSQHNDIIRDALGQRYSLLPFWYTLLYQAHREGIPVMRPLWVQYPQDVTTFNIDDQYLLGDALLVHPVSDSGAHGVQVYLPGQGEVWYDIQSYQKHHGPQTLYLPVTLSSIPVFQRGGTIVPRWMRVRRSSECMKDDPITLFVALSPQGTAQGELFLDDGHTFNYQTRQEFLLRRFSFSGNTLVSSSADPEGHFETPIWIERVVIIGAGKPAAVVLQTKGSPESRLSFQHDPETSVLVLRKPGINVASDWSIHLR

SEQ ID NO: 6540 - protein, 225 aa, Homo sapiens
MNPTLILAAFCLGIASATLTFDHSLEAQWTKWKAMHNRLYGMNEEGWRRAVWEKNMKMIELHNQEYREGKHSFTMAMNAFGDMTSEEFRQVMNGFQNRKPRKGKVFQEPLFYEAPRSVDWREKGYVTPVKNQGQCGSCWAFSATGALEGQMFRKTGRLISLSEQNLVDCSGPQGNEGCNGGLMDYAFQYVQDNGGLDSEESYPYEATVSGAPCHHSSSAFGRWTL

SEQ ID NO: 6541 - protein, 513 aa, Homo sapiens
MASVLSRRLGKRSLLGARVLGPSASEGPSAAPPSEPLLEGAAPQPFTTSDDTPCQEQPKEVLKAPSTSGLQQVAFQPGQKVYVWYGGQECTGLVEQHSWMEGQVTVWLLEQKLQVCCRVEEVWLAELQGPCPQAPPLEPGAQALAYRPVSRNIDVPKRKSDAVEMDEMMAAMVLTSLSCSPVVQSPPGTEANFSASRAACDPWKESGDISDSGSSTTSGHWSGSSGVSTPSPPHPQASPKYLGDAFGSPQTDHGFETDPDPFLLDEPAPRKRKNSVKVMYKCLWPNCGKVLRSIVGIKRHVKALHLGDTVDSDQFKREEDFYYTEVQLKEESAAAAAAAAAGTPVPGTPTSEPAPTPSMTGLPLSALPPPLHKAQSSGPEHPGPESSLPSGALSKSAPGSFWHIQADHAYQALPSFQIPVSPHIYTSVSWAAAPSAACSLSPVRSRSLSFSEPQQPAPAMKSHLIVTSPPRAQSGARKARGEAKKCRKVYGIEHRDQWCTACRWKKACQRFLD

SEQ ID NO: 6542 - protein, 212 aa, Homo sapiens
MDPVVLSYMDSLLRQSDVSLLDPPSWLNDHIIGFAFEYFANSQFHDCSDHVSFISPEVTQFIKCTSNPAEIAMFLEPLDLPNKRVVFLAINDNSNQAAGGTHWSLLVYLQDKNSFFHYDSHSRSNSVHAKQVAEKLEAFLGRKGDKLAFVEEKAPAQQNSYDCGMYVICNTEALCQNFFRQQTESLLQLLTPAYITKKRGEWKDLITTLAKK

SEQ ID NO: 6543 - protein, 1050 aa, Homo sapiens
MEVAVEKAVAAAAAASAAASGGPSAAPSGENEAESRQGPDSERGGEAARLNLLDTCAVCHQNIQSRAPKLLPCLHSFCQRCLPAPQRYLMLPAPMLGSAETPPPVPAPGSPVSGSSPFATQVGVIRCPVCSQECAERHIIDNFFVKDTTEVPSSTVEKSNQVCTSCEDNAEANGFCVECVEWLCKTCIRAHQRVKFTKDHTVRQKEEVSPEAVGVTSQRPVFCPFHKKEQLKLYCETCDKLTCRDCQLLEHKEHRYQFIEEAFQNQKVIIDTLITKLMEKTKYIKFTGNQIQNRIIEVNQNQKQVEQDIKVAIFTLMVEINKKGKALLHQLESLAKDHRMKLMQQQQEVAGLSKQLEHVMHFSKWAVSSGSSTALLYSKRLITYRLRHLLRARCDASPVTNNTIQFHCDPSFWAQNIINLGSLVIEDKESQPQMPKQNPVVEQNSQPPSGLSSNQLSKFPTQISLAQLRLQHMQQQVMAQRQQVQRRPAPVGLPNPRMQGPIQQPSISHQQPPPRLINFQNHSPKPNGPVLPPHPQQLRYPPNQNIPRQAIKPNPLQMAFLAQQAIKQWQISSGQGTPSTTNSTSSTPSSPTITSAAGYDGKAFGSPMIDLSSPVGGSYNLPSLPDIDCSSTIMLDNIVRKDTNIDHGQPRPPSNRTVQSPNSSVPSPGLAGPVTMTSVHPPIRSPSASSVGSRGSSGSSSKPAGADSTHKVPVVMLEPIRIKQENSGPPENYDFPVVIVKQESDEESRPQNANYPRSILTSLLLNSSQSSTSEETVLRSDAPDSTGDQPGLHQDNSSNGKSEWLDPSQKSPLHVGETRKEDDPNEDWCAVCQNGGELLCCEKCPKVFHLSCHVPTLTNFPSGEWICTFCRDLSKPEVEYDCDAPSHNSEKKKTEGLVKLTPIDKRKCERLLLFLYCHEMSLAFQDPVPLTVPDYYKIIKNPMDLSTIKKRLQEDYSMYSKPEDFVADFRLIFQNCAEFNEPDSEVANAGIKLENYFEELLKNLYPEKRFPKPEFRNESEDNKFSDDSDDDFVQPRKKRLKSIEERQLLK

SEQ ID NO: 6544 - protein, 1756 aa, Homo sapiens
MNSLFRKRNKGKYSPTVQTRSISNKELSELIEQLQKNADQVEKNIVDTEAKMQSDLARLQEGRQPEHRDVTLQKVLDSEKLLYVLEADAAIAKHMKHPQGDMIAEDIRQLKERVTNLRGKHKQIYRLAVKEVDPQVNWAALVEEKLDKLNNQSFGTDLPLVDHQVEEHNIFHNEVKAIGPHLAKDGDKEQNSELRAKYQKLLAASQARQQHLSSLQDYMQRCTNELYWLDQQAKGRMQYDWSDRNLDYPSRRRQYENFINRNLEAKEERINKLHSEGDQLLAAEHPGRNSIEAHMEAVHADWKEYLNLLICEESHLKYMEDYHQFHEDVKDAQELLRKVDSDLNQKYGPDFKDRYQIELLLRELDDQEKVLDKYEDVVQGLQKRGQQVVPLKYRRETPLKPIPVEALCDFEGEQGLISRGYSYTLQKNNGESWELMDSAGNKLIAPAVCFVIPPTDPEALALADSLGSQYRSVRQKAAGSKRTLQQRYEVLKTENPGDASDLQGRQLLAGLDKVASDLDRQEKAITGILRPPLEQGRAVQDSAERAKDLKNITNELLRIEPEKTRSTAEGEAFIQALPGSGTTPLLRTRVEDTNRKYEHLLQLLDLAQEKVDVANRLEKSLQQSWELLATHENHLNQDDTVPESSRVLDSKGQELAAMACELQAQKSLLGEVEQNLQAAKQCSSTLASRFQEHCPDLERQEAEVHKLGQRFNNLRQQVERRAQSLQSAKAAYEHFHRGHDHVLQFLVSIPSYEPQETDSLSQMETKLKNQKNLLDEIASREQEVQKICANSQQYQQAVKDYELEAEKLRSLLDLENGRRSHVSKRARLQSPATKVKEEEAALAAKFTEVYAINRQRLQNLEFALNLLRQQPEVEVTHETLQRNRPDSGVEEAWKIRKELDEETERRRQLENEVKSTQEEIWTLRNQGPQESVVRKEVLKKVPDPVLEESFQQLQRTLAEEQHKNQLLQEELEALQLQLRALEQETRDGGQEYVVKEVLRIEPDRAQADEVLQLREELEALRRQKGAREAEVLLLQQRVAALAEEKSRAQEKVTEKEVVKLQNDPQLEAEYQQLQEDHQRQDQLREKQEEELSFLQDKLKRLEKERAMAEGKITVKEVLKVEKDAATEREVSDLTRQYEDEAAKARASQREKTELLRKIWALEEENAKVVVQEKVREIVRPDPKAESEVANLRLELVEQERKYRGAEEQLRSYQSELEALRRRGPQVEVKEVTKEVIKYKTDPEMEKELQRLREEIVDKTRLIERCDLEIYQLKKEIQALKDTKPQVQTKEVVQEILQFQEDPQTKEEVASLRAKLSEEQKKQVDLERERASQEEQIARKEEELSRVKERVVQQEVVRYEEEPGLRAEASAFAESIDVELRQIDKLRAELRRLQRRRTELERQLEELERERQARREAEREVQRLQQRLAALEQEEAEAREKVTHTQKVVLQQDPQQAREHALLRLQLEEEQHRRQLLEGELETLRRKLAALEKAEVKEKVVLSESVQVEKGDTEQEIQRLKSSLEEESRSKRELDVEVSRLEARLSELEFHNSKSSKELDFLREENHKLQLERQNLQLETRRLQSEINMAATETRDLRNMTVADSGTNHDSRLWSLERELDDLKRLSKDKDLEIDELQKRLGSVAVKREQRENHLRRSIVVIHPDTGRELSPEEAHRAGLIDWNMFVKLRSQECDWEEISVKGPNGESSVIHDRKSGKKFSIEEALQSGRLTPAQYDRYVNKDMSIQELAVLVSGQK

SEQ ID NO: 6545 - protein, 947 aa, Homo sapiens
MSWLRFWGPWPLLTWQLLSLLVKEAQPLVWVKDPLQLTSNPLGPPEPWSSRSSHLPWESPHAPAPPAAPGDFDYLGPSASSQMSALPQEPTENLAPFLKELDSAGELPLGPEPFLAAHQDLNDKRTPEERLPEVVPLLNRDQNQALVQLPRLKWVQTTDLDRAAGHQADEILVPLDSKVSRPTKFVVSPKNLKKDLAERWSLPEIVGIPHQLSKPQRQKQTLPDDYLSMDTLYPGSLPPELRVNADEPPGPPEQVGLSQFHLEPKSQNPETLEDIQSSSLQEEAPAQLLQLPQEVEPSTQQEAPALPPESSMESLAQTPLNHEVTVQPPGEDQAHYNLPKFTVKPADVEVTMTSEPKNETESTQAQQEAPIQPPEEAEPSSTALRTTDPPPEHPEVTLPPSDKGQAQHSHLTEATVQPLDLELSITTEPTTEVKPSPTTEETSAQPPDPGLAITPEPTTEIGHSTALEKTRAPHPDQVQTLHRSLTEVTGPPTKLESSQDSLVQSETAPEEQKASTSTNICELCTCGDETLSCVGLSPKQRLRQVPVPEPDTYNGIFTTLNFQGNYISYLDGNVWKAYSWTEKLILSENYLTELPKDSFEGLLYLQYLDLSCNKIRYIERQTFESLPFLQYINLGCNLITKLSLGTFQAWHGMQFLHNLILNRNPLTTVEDPYLFELPALKYLDMGTTHITLTTLKNILTMTVELEKLILPSHMACCLCQFKNSIEAVCKTVKLHCNTACLTNSIHCPEEASVGNPEGAFMKMLQARKQHMSTQLTIESEAPSDSSGINLSGFGGDQLEIQLTEQLRSLIPNEDVRKFMSHVIRTLKMECSETHVQGSCAKLMLRTGLLMKLLSEQQEAKALNVEWDTDQQKTNYINENMEQNEQKEQKSSELMKEVPGDDYKNKLIFAISVTVILIILIIIFCLIEVNSHKRASEKYKDNPSISGA

SEQ ID NO: 6546 - protein, 119 aa, Homo sapiens
MNKILSSTVCFGLLTLLSVLSFLQSVHGRPYLTQGNEIFPDKKYTNREELLLALLNKNFDFQRPFNTDLALPNKLEELNQLEKLKEQLVEEKDSETSYAVDGLFSSHPSKRACFWKYCV

SEQ ID NO: 6547 - protein, 450 aa, Homo sapiens
MWLKVFTTFLSFATGACSGLKVTVPSHTVHGVRGQALYLPVHYGFHTPASDIQIIWLFERPHTMPKYLLGSVNKSVVPDLEYQHKFTMMPPNASLLINPLQFPDEGNYIVKVNIQGNGTLSASQKIQVTVDDPVTKPVVQIHPPSGAVEYVGNMTLTCHVEGGTRLAYQWLKNGRPVHTSSTYSFSPQNNTLHIAPVTKEDIGNYSCLVRNPVSEMESDIIMPIIYYGPYGLQVNSDKGLKVGEVFTVDLGEAILFDCSADSHPPNTYSWIRRTDNTTYIIKHGPRLEVASEKVAQKTMDYVCCAYNNITGRQDETHFTVIITSVGLEKLAQKGKSLSPLASITGISLFLIISMCLLFLWKKYQPYKVIKQKLEGRPETEYRKAQTFSGHEDALDDFGIYEFVAFPDVSGVSRIPSRSVPASDCVSGQDLHSTVYEVIQHIPAQQQDHPE

SEQ ID NO: 6548 - protein, 1452 aa, Homo sapiens
MPSSSDTALGGGGGLSWAEKKLEERRKRRRFLSPQQPPLLLPLLQPQLLQPPPPPPPLLFLAAPGTAAAAAAAAAASSSCFSPGPPLEVKRLARGKRRAGGRQKRRRGPRAGQEAEKRRVFSLPQPQQDGGGGASSGGGVTPLVEYEDVSSQSEQGLLLGGASAATAATAAGGTGGSGGSPASSSGTQRRGEGSERRPRRDRRSSSGRSKERHREHRRRDGQRGGSEASKSRSRHSHSGEERAEVAKSGSSSSSGGRRKSASATSSSSSSRKDRDSKAHRSRTKSSKEPPSAYKEPPKAYREDKTEPKAYRRRRSLSPLGGRDDSPVSHRASQSLRSRKSPSPAGGGSSPYSRRLPRSPSPYSRRRSPSYSRHSSYERGGDVSPSPYSSSSWRRSRSPYSPVLRRSGKSRSRSPYSSRHSRSRSRHRLSRSRSRHSSISPSTLTLKSSLAAELNKNKKARAAEAARAAEAAKAAEATKAAEAAAKAAKASNTSTPTKGNTETSASASQTNHVKDVKKIKIEHAPSPSSGGTLKNDKAKTKPPLQVTKVENNLIVDKATKKAVIVGKESKSAATKEESVSLKEKTKPLTPSIGAKEKEQHVALVTSTLPPLPLPPMLPEDKEADSLRGNISVKAVKKEVEKKLRCLLADLPLPPELPGGDDLSKSPEEKKTATQLHSKRRPKICGPRYGETKEKDIDWGKRCVDKFDIIGIIGEGTYGQVYKARDKDTGEMVALKKVRLDNEKEGFPITAIREIKILRQLTHQSIINMKEIVTDKEDALDFKKDKGAFYLVFEYMDHDLMGLLESGLVHFNENHIKSFMRQLMEGLDYCHKKNFLHRDIKCSNILLNNRGQIKLADFGLARLYSSEESRPYTNKVITLWYRPPELLLGEERYTPAIDVWSCGCILGELFTKKPIFQANQELAQLELISRICGSPCPAVWPDVIKLPYFNTMKPKKQYRRKLREEFVFIPAAALDLFDYMLALDPSKRCTAEQALQCEFLRDVEPSKMPPPDLPLWQDCHELWSKKRRRQKQMGMTDDVSTIKAPRKDLSLGLDDSRTNTPQGVLPSSQLKSQGSSNVAPGEKQTDPSTPQQESSKPLGGIQPSSQTIQPKVETDAAQAAVQSAFAVLLTQLIKAQQSKQKDVLLEERENGSGHEASLQLRPPPEPSTPVSGQDDLIQHQDMRILELTPEPDRPRILPPDQRPPEPPEPPPVTEEDLDYRTENQHVPTTSSSLTDPHAGVKAALLQLLAQHQPQDDPKREGGIDYQAGDTYVSTSDYKDNFGSSSFSSAPYVSNDGLGSSSAPPLERRSFIGNSDIQSLDNYSTASSHSGGPPQPSAFSESFPSSVAGYGDIYLNAGPMLFSGDKDHRFEYSHGPIAVLANSSDPSTGPESTHPLPAKMHNYNYGGNLQENPSGPSLMHGQTWTSPAQGPGYSQGYRGHISTSTGRGRGRGLPY

SEQ ID NO: 6549 - protein, 447 aa, Homo sapiens
MYCAWMWPDQTPTPTRFLKNCEEVGLFNELASPFENEFKKASEDDIKKMPLDLSPLATPIIRSKIEEPSVVETTHQDSPLPHPESTTSDEKEVPLAQTAQPTSAIVRPASLQVPNVLLTSSDSSVIIQQAVPSPTSSTVITQAPSSNRPIVPVPGPFPLLLHLPNGQTMPVAIPASITSSNVHVPAAVPLVRPVTMVPSVPGIPGPSSPQPVQSEAKMRLKAALTQQHPPVTNGDTVKGHGSGLVRTQSEESRPQSLQQPATSTTETPASPAHTTPQTQSTSGRRRRAANEDPDEKRRKFLERNRAAASRCRQKRKVWVQSLEKKAEDLSSLNGQLQSEVTLLRNEVAQLKQLLLAHKDCPVTAMQKKSGYHTADKDDSSEDISVPSSPHTEAIQHSSVSTSNGVSSTSKAEAVATSVLTQMADQSTEPALSQIVMAPSSQSQPSGS

SEQ ID NO: 6550 - protein, 365 aa, Homo sapiens [sequence omitted]

SEQ ID NO: 6551 - protein, 213 aa, Homo sapiens
MRPRLWLLLAAQLTVLHGNSVLQQTPAYIKVQTNKMVMLSCEAKISLSNMRIYWLRQRQAPSSDSHHEFLALWDSAKGTIHGEEVEQEKIAVFRDASRFILNLTSVKPEDSGIYFCMIVGSPELTFGKGTQLSVVDFLPTTAQPTKKSTLKKRVCRLPRPETQKGRRRRARLRFMKQPQGEGISGTFVPQCLHGYYSNTTTSQKLLNPWILKT

SEQ ID NO: 6552 - protein, 1194 aa, Homo sapiens
MHDLPPDSGARRGGRGLADHSFPAGARAPGQPPSRGAAYRRACPRDGERGGGGRPRQQVSPPRSPQREPRGGQLRTPRMRPSCSRSLESLRVGAKPPPFQRWPSDSWIRCGAHRDWDEPPPRGGRMDGWSGDRARAAAPTGLQPPGCKDHGCSSGSPFRDPAGSSVIRSGKGDRQEGPSFLRPPAVTVKKLQKWMYKGRLLSLGMKGRARGTAPKVTGTQAASPNVGALKVRENRVLSVPPDQRITLTDLFENAYGSSMKGRELEELKDNIEFRGHKPLNSITVSKKRNWLYQSTLRPLNLEEENKKCQDRSHLSISPVSLPKHQLSQSFLKSSKEYCTYVVCNATNSSLSKNCALDFNEENDADDEGEIWYNPIPEDDDLGISSALSFGEADSAVLKLPAVNLSMLSGSDLMKAERHTEDSLCSSEHAGDIQTTRSNGMNPIHPAHSTEFVQQYKQKLGHKTQEGIMVEDSPMLKSPFAGSGILAATNSTELGIMEPSSPNPSPVKKGSSINWSLPDKIKSPRTVRKLSMKMKKLPEFSRKLSVKGTLNYINSPDNTPSLSKYNCREVHHTDILPSGNTTTAAKRNVISRYHLDTSVSSQQSYQKKNSMSSKYSCKGGYLSDGDSPELTTKASKHGSENKFGKGKEIISNSCSKNEIDIDAFRHYSFSDQPKCSQYISGLMSVHFYGAEDLKPPRIDSKDVFCAIQVDSVNKARTALLTCRTTFLDMDHTFNIEIENAQHLKLVVFSWEPTPRKNRVCCHGTVVLPTLFRVTKTHQLAVKLEPRGLIYVKVTLMEQWENSLHGLDINQEPIIFGVDIQKVVEKENIGLMVPLLIQKCIMEIEKRGCQVVGLYRLCGSAAVKKELREAFERDSKAVGLCENQYPDINVITGVLKDYLRELPSPLITKQLYEAVLDAMAKSPLKMSSNGCENDPGDSKYTVDLLDCLPEIEKATLKMLLDHLKLVASYHEVNKMTCQNLAVCFGPVLLSQRQEPSTHNNRVFTDSEELASALDFKKHIEVLHYLLQLWPVQRLTVKKSTDNLFPEQKSSLNYLRQKKERPHMLNLSGTDSSGVLRPRQNRLDSPLSNRYAGDWSSCGENYFLNTKENLNDVDYDDVPSEDRKIGENYSKMDGPEVMIEQPIPMSKECTFQTYLTMQTVESTVDRKNNLKDLQESIDTLIGNLERELNKNKLNMSF

SEQ ID NO: 6553 - protein, 468 aa, Homo sapiens
MAIATSVYVVPPPARPCPTSGPPAGPCPPSPDLIYKIPRASGTQLAAPRDALEVYDVPPTALRVPSSGPYDCPASFSHPLTRVAPQPPGEDDAPYDVPLTPKPPAELEPDLEWEGGREPGPPIYAAPSNLKRASALLNLYEAPEELLADGEGGGTDEGIYDVPLLGPEAPPSPEPPGALASHDQDTLAQLLARSPPPPHRPRLPSAESLSRRPLPALPVPEAPSPSPVPSPAPGRKGSIQDRPLPPPPPRLPGYGGPKVEGDPEGREMEDDPAGHHNEYEGIPMAEEYDYVHLKGMDKAQGSRPPDQACTGDPELPERGMPAPQEALSPGEPLVVSTGDLQLLYFYAGQCQSHYSALQAAVAALMSSTQANQPPRLFVPHSKRVVVAAHRLVFVGDTLGRLAASAPLRAQVRAAGTALGQALRATVLAVKGAALGYPSSPAIQEMVQCVTELAGQALQFTTLLTSLAP

SEQ ID NO: 6554 - protein, 601 aa, Homo sapiens
MWLFFGITGLLTAALSGHPSPAPPDQLNTSSAESELWEPGERLPVRLTNGSSSCSGTVEVRLEASWEPACGALWDSRAAEAVCRALGCGGAEAASQLAPPTPELPPPPAAGNTSVAANATLAGAPALLCSGAEWRLCEVVEHACRSDGRRARVTCAENRALRLVDGGGACAGRVEMLEHGEWGSVCDDTWDLEDAHVVCRQLGCGWAVQALPGLHFTPGRGPIHRDQVNCSGAEAYLWDCPGLPGQHYCGHKEDAGAVCSEHQSWRLTGGADRCEGQVEVHFRGVWNTVCDSEWYPSEAKVLCQSLGCGTAVERPKGLPHSLSGRMYYSCNGEELTLSNCSWRFNNSNLCSQSLAARVLCSASRSLHNLSTPEVPASVQTVTIESSVTVKIENKESRELMLLIPSIVLGILLLGSLIFIAFILLRIKGKYVFMLPIQVQAPPPEDSDSGSDSDYEHYDFSAQPPVALTTFYNSQRHRVTDEEVQQSRFQMPPLEEGLEELHASHIPTANPGHCITDPPSLGPQYHPRSNSESSTSSGEDYCNSPKSKLPPWNPQVFSSERSSFLEQPPNLELAGTQPAFSGSPSPQPDSTDNDDYDDISAA

SEQ ID NO: 6555 - protein, 325 aa, Homo sapiens
AALPLLGELPRLLLLVLLCLPAVWESSRVEHTMLQTCMSSLSGDCGLPPDVPNAQPALEGRTSFPEDTVITYKCEESFVKIPGEKDSVICLKGSQWSDIEEFCNRSCEVPTRLNSASLKQPYITQNYFPVGTVVEYECRPGYRREPSLSPKLTCLQNLKWSTAVEFCKKKSCPNPGEIRNGQIDVPGGILFGATISFSCNTGYKLFGSTSSFCLISGSSVQWSDPLPECREIYCPAPPQIDNGIIQGERDHYGYRQSVTYACNKGFTMIGEHSIYCTVNNDEGEWSGPPPECRGKSLTSKVPPTVQKPTTVNVPTTEVSPTSQKT

SEQ ID NO: 6556 - protein, 367 aa, Homo sapiens
MWSWKCLLFWAVLVTATLCTARPSPTLPEQAQPWGAPVEVESFLVHPGDLLQLRCRLRDDVQSINWLRDGVQLAESNRTRITGEEVEVQDSVPADSGLYACVTSSPSGSDTTYFSVNVSVPIDALPSSEDDDDDDDSSSEEKETDNTKPNPVAPYWTSPEKMEKKLHAVPAAKTVKFKCPSSGTPNPTLRWLKNGKEFKPDHRIGGYKVRYATWSIIMDSVVPSDKGNYTCIVENEYGSINHTYQLDVVERSPHRPILQAGLPANKTVALGSNVEFMCKVYSDPQPHIQWLKHIEVNGSKIGPDNLPYVQILKHSGINSSDAEVLTLFNVTEAQSGEYVCKVSNYIGEANQSAWLTVTRPVAKDCWS

SEQ ID NO: 6557 - protein, 799 aa, Homo sapiens
MKPMLKDFSNLLLVVLCDYVLGEAEYLLLREPGHVALSNDTVYVDFQYFDGANGTLRNVSVLLLEANTNQTVTTKYLLTNQSQGTLKFECFYFKEAGDYWFTMTPEATDNSTPFPWWEKSAFLKVEWPVFHVDLNRSAKAAEGTFQVGLFTSQPLCPFPVDKPNIVVDVIFTNSLPEARRNSRQPLEIRTSKRTELAQGQWVEFGCAPLGPEAYVTVVLKLLGRDSVITSTGPIDLAQKFGYKLVMVPELTCESGVEVTVLPPPCTFVQGVVTVFKEAPRYPGKRTIHLAENSLPLGERRTIFNCTLFDMGKNKYCFDFGISSRSHFSAKEECMLIQRNTAFQPSSPSPLQPQGPVKSNNIVTVTGISLCLFIIIATVLITLWRRFGRPAKCSTPARHNSIHSPSFRKNSDEENICELSEQRGSFSDGGDGPTGSPGDTGIPLTYRRSGPVPPEDDASGSESFQSNAQKIIPPLFSYRLAQQQLKEMKKKGLTETTKVYHVSQSPLTDTAIDAAPSAPLDLESPEEAAANKFRIKSPFPEQPAVSAGERPPSRLDLNVTQASCAISPSQTLIRKSQARHVGSRGGPSERSHARNAHFRRTASFHEARQARPFRERSMSTLTPRQAPAYSSRTRTCEQAEDRFRPQSRGAHLFPEKLEHFQEASGTRGPLNPLPKSYTLGQPLRKPDLGDHQAGLVAGIERTEPHRARRGPSPSHKSVSRKQSSPISPKDNYQRVSSLSPSQCRKDKCQSFPTHPEFAFYDNTSFGLTEAEQRMLDLPGYFGSNEEDETTSTLSVEKLVI

SEQ ID NO: 6558 - protein, 223 aa, Homo sapiens [sequence omitted]

SEQ ID NO: 6559 - protein, 314 aa, Homo sapiens
MFSINPLENLKVYISSRPPLVVFMISVSAMAIAFLTLGYFFKIKEIKSPEMAEDWNTFLLRFNDLDLCVSENETLKHLTNDTTTPESTMTSGQARASTQSPQALEDSGPVNISVSITLTLDPLKPFGGYSRNVTHLYSTILGHQIGLSGREAHEEINITFTLPTAWSSDDCALHGHCEQVVFTACMTLTASPGVFPVTVQPPHCVPDTYSNATLWYKIFTTARDANTKYAQDYNPFWCYKGAIGKVYHALNPKLTVIVPDDDRSLINLHLMHTSYFLFVMVITMFCYAVIKGRPSKLRQSNPEFCPEKVALAEA

SEQ ID NO: 6560 - protein, 379 aa, Homo sapiens
MGYARKVGWVTAGLVIGAGACYCIYRLTRGRKQNKEKMAEGGSGDVDDAGDCSGARYNDWSDDDDDSNESKSIVWYPPWARIGTEAGTRARARARARATRARRAVQKRASPNSDDTVLSPQELQKVLCLVEMSEKPYILEAALIALGNNAAYAFNRDIIRDLGGLPIVAKILNTRDPIVKEKALIVLNNLSVNAENQRRLKVYMNQVCDDTITSRLNSSVQLAGLRLLTNMTVTNEYQHMLANSISDFFRLFSAGNEETKLQVLKLLLNLAENPAMTRELLRAQVPSSLGSLFNKKENKEVILKLLVIFENINDNFKWEENEPTQNQFGEGSLFFFLKEFQVCADKVLGIESHHDFLVKVKVGKFMAKLAEHMFPKSQE

SEQ ID NO: 6561 - protein, 124 aa, Homo sapiens
MSLVIRNLQRVIPIRRAPLRSKIEIVRRILGVQKFDLGIICVDNKNIQHINRIYRDRNVPTDVLSFPFHEVTATHGLCHLLGFTHGTEAEWQQMFQKEKAVLDELGRRTGTRLQPLTRGLFGGS

SEQ ID NO: 6562 - protein, 351 aa, Homo sapiens
MFLSKPSVYICLFTCVLQLSHSWSVNNFLMTGPKAYLIYSSSVAAGAQSGIEECKYQFAWDRWNCPERALQLSSHGGLRSANRETAFVHAISSAGVMYTLTRNCSLGDFDNCGCDDSRNGQLGGQGWLWGGCSDNVGFGEAISKQFVDALETGQDARAAMNLHNNEAGRKAVKGTMKRTCKCHGVSGSCTTQTCWLQLPEFREVGAHLKEKYHAALKVDLLQGAGNSAAGRGAIADTFRSISTRELVHLEDSPDYCLENKTLGLLGTEGRECLRRGRALGRWERRSCRRLCGDCGLAVEERRAETVSSCNCKFHWCCAVRCEQCRRRVTKYFCSRAERPRGGAAHKPGRKP

SEQ ID NO: 6563 - protein, 527 aa, Homo sapiens
MENQEKASIAGHMFDVVVIGGGISGLSAAKLLTEYGVSVLVLEARDRVGGRTYTIRNEHVDYVDVGGAYVGPTQNRILRLSKELGIETYKVNVSERLVQYVKGKTYPFRGAFPPVWNPIAYLDYNNLWRTIDNMGKEIPTDAPWEAQHADKWDKMTMKELIDKICWTKTARRFAYLFVNINVTSEPHEVSALWFLWYVKQCGGTTRIFSVTNGGQERKFVGGSGQVSERIMDLLGDQVKLNHPVTHVDQSSDNIIIETLNHEHYECKYVINAIPPTLTAKIHFRPELPAERNQLIQRLPMGAVIKCMMYYKEAFWKKKDYCGCMIIEDEDAPISITLDDTKPDGSLPAIMGFILARKADRLAKLHKEIRKKKICELYAKVLGSQEALHPVHYEEKNWCEEQYSGGCYTAYFPPGIMTQYGRVIRQPVGRIFFAGTETATKWSGYMEGAVEAGERAAREVLNGLGKVTEKDIWVQEPESKDVPAVEITHTFWERNLPSVSGLLKIIGFSTSVTALGFVLYKYKLLPRS

SEQ ID NO: 6564 - protein, 1474 aa, Homo sapiens
MARLAAVLWNLCVTAVLVTSATQGLSRAGLPFGLMRRELACEGYPIELRCPGSDVIMVENANYGRTDDKICDADPFQMENVQCYLPDAFKIMSQRCNNRTQCVVVAGSDAFPDPCPGTYKYLEVQYDCVPYKVEQKVFVCPGTLQKVLEPTSTHESEHQSGAWCKDPLQAGDRIYVMPWIPYRTDTLTEYASWEDYVAARHTTTYRLPNRVDGTGFVVYDGAVFYNKERTRNIVKYDLRTRIKSGETVINTANYHDTSPYRWGGKTDIDLAVDENGLWVIYATEGNNGRLVVSQLNPYTLRFEGTWETGYDKRSASNAFMVCGVLYVLRSVYVDDDSEAAGNRVDYAFNTNANREEPVSLTFPNPYQFISSVDYNPRDNQLYVWNNYFVVRYSLEFGPPDPSAGPATSPPLSTTTTARPTPLTSTASPAATTPLRRAPLTTHPVGAINQLGPDLPPATAPVPSTRRPPAPNLHVSPELFCEPREVRRVQWPATQQGMLVERPCPKGTRGIASFQCLPALGLWNPRGPDLSNCTSPWVNQVAQKIKSGENAANIASELARHTRGSIYAGDVSSSVKLMEQLLDILDAQLQALRPIERESAGKNYNKMHKRERTCKDYIKAVVETVDNLLRPEALESWKDMNATEQVHTATMLLDVLEEGAFLLADNVREPARFLAAKENVVLEVTVLNTEGQVQELVFPQEEYPRKNSIQLSAKTIKQNSRNGVVKVVFILYNNLGLFLSTENATVKLAGEAGPGGPGGASLVVNSQVIAASINKESSRVFLMDPVIFTVAHLEDKNHFNANCSFWNYSERSMLGYWSTQGCRLVESNKTHTTCACSHLTNFAVLMAHREIYQGRINELLLSVITWVGIVISLVCLAICISTFCFLRGLQTDRNTIHKNLCINLFLAELLFLVGIDKTQYEIACPIFAGLLHYFFLAAFSWLCLEGVHLYLLLVEVFESEYSRTKYYYLGGYCFPALVVGIAAAIDYRSYGTEKACWLRVDNYFIWSFIGPVSFVIVVNLVFLMVTLHKMIRSSSVLKPDSSRLDNIKSWALGAIALLFLLGLTWAFGLLFINKESVVMAYLFTTFNAFQGVFIFVFHCALQKKVHKEYSKCLRHSYCCIRSPPGGTHGSLKTSAMRSNTRYYTGTQSRIRRMWNDTVRKQTESSFMAGDINSTPTLNRGTMGNHLLTNPVLQPRGGTSPYNTLIAESVGFNPSSPPVFNSPGSYREPKHPLGGREACGMDTLPLNGNFNNSYSLRSGDFPPGDGGPEPPRGRNLADAAAFEKMIISELVHNNLRGSSSAAKGPPPPEPPVPPVPGGGGEEEAGGPGGADRAEIELLYKALEEPLLLPRAQSVLYQSDLDESESCTAEDGATSRPLSSPPGRDSLYASGANLRDSPSYPDSSPEGPSEALPPPPPAPPGPPEIYYTSRPPALVARNPLQGYYQVRRPSHEGYLAAPGLEGPGPDGDGQMQLVTSL

SEQ ID NO: 6565 - protein, 598 aa, Homo sapiens
MMRLRGSGMLRDLLLRSPAGVSATLRRAQPLVTLCRRPRGGGRPAAGPAAAARLHPWWGGGGWPAEPLARGLSSSPSEILQELGKGSTHPQPGVSPPAAPAAPGPKDGPGETDAFGNSEGKELVASGENKIKQGLLPSLEDLLFYTIAEGQEKIPVHKFITALKSTGLRTSDPRLKECMDMLRLTLQTTSDGVMLDKDLFKKCVQSNIVLLTQAFRRKFVIPDFMSFTSHIDELYESAKKQSGGKVADYIPQLAKFSPDLWGVSVCTVDGQRHSTGDTKVPFCLQSCVKPLKYAIAVNDLGTEYVHRYVGKEPSGLRFNKLFLNEDDKPHNPMVNAGAIVVTSLIKQGVNNAEKFDYVMQFLNKMAGNEYVGFSNATFQSERESGDRNFAIGYYLKEKKCFPEGTDMVGILDFYFQLCSIEVTCESASVMAATLANGGFCPITGERVLSPEAVRNTLSLMHSCGMYDFSGQFAFHVGLPAKSGVAGGILLVVPNVMGMMCWSPPLDKMGNSVKGIHFCHDLVSLCNFHNYDNLRHFAKKLDPRREGGDQRHSFGPLDYESLQQELALKETVWKKVSPESNEDISTTVVYRMESLGEKS

SEQ ID NO: 6566 - protein, 453 aa, Homo sapiens
MRIPVDASTSRRFTPPSTALSPGKMSEALPLGAPDAGAALAGKLRSGDRSMVEVLADHPGELVRTDSPNFLCSVLPTHWRCNKTLPIAFKVVALGDVPDGTLVTVMAGNDENYSAELRNATAAMKNQVARFNDLRFVGRSGRGKSFTLTITVFTNPPQVATYHRAIKITVDGPREPRRHRQKLDDQTKPGSLSFSERLSELEQLRRTAMRVSPHHPAPTPNPRASLNHSTAFNPQPQSQMQDTRQIQPSPPWSYDQSYQYLGSIASPSVHPATPISPGRASGMTTLSAELSSRLSTAPDLTAFSDPRQFPALPSISDPRMHYPGAFTYSPTPVTSGIGIGMSAMGSATRYHTYLPPPYPGSSQAQGGPFQASSPSYHLYYGASAGSYQFSMVGGERSPPRILPPCTNASTGSALLNPSLPNQSDVVEAEGSHSNSPTNMAPSARLEEAVWRPY

SEQ ID NO: 6567 - protein, 118 aa, Homo sapiens
MSGGSSCSQTPSRAIPATRRVVLGDGVQLPPGDYSTTPGGTLFSTTPGGTRIIYDRKFLMECRNSPVTKTPPRDLPTIPGVTSPSSDEPPMEASQSHLRNSPEDKRAGGEESQFEMDI

SEQ ID NO: 6568 - protein, 333 aa, Homo sapiens
MPLGLGRRKKAPPLVENEEAEPGRGGLGVGEPGPLGGGGSGGPQMGLPPPPPALRPRLVFHTQLAHGSPTGRIEGFTNVKELYGKIAEAFRLPTAEVMFCTLNTHKVDMDKLLGGQIGLEDFIFAHVKGQRKEVEVFKSEDALGLTITDNGAGYAFIKRIKEGSVIDHIHLISVGDMIEAINGQSLLGCRHYEVARLLKELPRGRTFTLKLTEPRKAFDMISQRSAGGRPGSGPQLGTGRGTLRLRSRGPATVEDLPSAFEEKAIEKVDDLLESYMGIRDTELAATMVELGKDKRNPDELAEALDERLGDFAFPDEFVFDVWGAIGDAKVGRY

SEQ ID NO: 6569 - protein, 457 aa, Homo sapiens
MAFLEMASEEAAVTMVNYYTPITPHLRSQPVYIQYSNHRELKTDNLPNQARAQAALQAVSAVQSGSLALSGGPSNEGTVLPGQSPVLRIIIENLFYPVTLEVLHQIFSKFGTVLKIITFTKNNQFQALLQYADPVNAHYAKMALDGQNIYNACCTLRIDFSKLTSLNVKYNNDKSRDFTRLDLPTGDGQPSLEPPMAAAFGAPGIISSPYAGAAGFAPAIGFPQATGLSVPAVPGALGPLTITSSAVTGRMAIPGASGIPGNSVLLVTNLNPDLITPHGLFILFGVYGDVHRVKIMFNKKENALVQMADANQAQLAMNHLSGQRLYGKVLRATLSKHQAVQLPREGQEDQGLTKDFSNSPLHRFKKPGSKNFQNIFPPSATLHLSNIPPSVTVDDLKNLFIEAGCSVKAFKFFQKDRKMALIQLGSVEEAIQALIELHNHDLGENHHLRVSFSKSTI

SEQ ID NO: 6570 - protein, 600 aa, Homo sapiens
MQGPLLLPGLCFLLSLFGAVTQKTKTSCAKCPPNASCVNNTHCTCNHGYTSGSGQKLFTFPLETCNDTTSSKTTEGRKELQKIVDKFESLLTNQTLWRTEGRQEISSTATTILRDVESKVLETALKDPEQKVLKIQNDSVAIETQAITDNCSEERKTFNLNVQMNSMDIRCSDIIQGDTQGPSAIAFISYSSLGNIINATFFEEMDKKDQVYLNSQVVSAAIGPKRNVSLSKSVTLTFQHVKMTPSTKKVFCVYWKSTGQGSQWSRDGCFLIHVNKSHTMCNCSHLSSFAVLMALTSQEEDPVLTVITYVGLSVSLLCLLLAALTFLLCKAIRNTSTSLHLQLSLCLFLAHLLFLVGIDRTEPKVLCSIIAGALHYLYLAAFTWMLLEGVHLFLTARNLTVVNYSSINRLMKWIMFPVGYGVPAVTVAISAASWPHLYGTADRCWLHLDQGFMWSFLGPVCAIFSANLVLFILVFWILKRKLSSLNSEVSTIQNTRMLAFKATAQLFILGCTWCLGLLQVGPAAQVMAYLFTIINSLQGFFIFLVYCLLSQQVQKQYQKWFREIVKSKSESETYTLSSKMGPDSKPSEGDVFPGQVKRKY

SEQ ID NO: 6571 - protein, 1137 aa, Homo sapiens
MSLQSAQYLRQAEVLKADMTDSKLGPAEVWTSRQALQDLYQKMLVTDLEYALDKKVEQDLWNHAFKNQITTLQGQAKNRANPNRSEVQANLSLFLEAASGFYTQLLQELCTVFNVDLPCRVKSSQLGIISNKQTHTSAIVKPQSSSCSYICQHCLVHLGDIARYRNQTSQAESYYRHAAQLVPSNGQPYNQLAILASSKGDHLTTIFYYCRSIAVKFPFPAASTNLQKALSKALESRDEVKTKWGVSDFIKAFIKFHGHVYLSKSLEKLSPLREKLEEQFKRLLFQKAFNSQQLVHVTVINLFQLHHLRDFSNETEQHTYSQDEQLCWTQLLALFMSFLGILCKCPLQNESQEESYNAYPLPAVKVSMDWLRLRPRVFQEAVVDERQYIWPWLISLLNSFHPHEEDLSSISATPLPEEFELQGFLALRPSFRNLDFSKGHQGITGDKEGQQRRIRQQRLISIGKWIADNQPRLIQCENEVGKLLFITEIPELILEDPSEAKENLILQETSVIESLAADGSPGLKSVLSTSRNLSNNCDTGEKPVVTFKENIKTREVNRDQGRSFPPKEVRRDYSKGITVTKNDGKKDNNKRKTETKKCTLEKLQETGKQNVAVQVKSQTELRKTPVSEARKTPVTQTPTQASNSQFIPIHHPGAFPPLPSRPGFPPPTYVIPPPVAFSMGSGYTFPAGVSVPGTFLQPTAHSPAGNQVQAGKQSHIPYSQQRPSGPGPMNQGPQQSQPPSQQPLTSLPAQPTAQSTSQLQVQALTQQQQSPTKAVPALGKSPPHHSGFQQYQQADASKQLWNPPQVQGPLGKIMPVKQPYYLQTQDPIKLFEPSLQPPVMQQQPLEKKMKPFPMEPYNHNPSEVKVPEFYWDSSYSMADNRSVMAQQANIDRRGKRSPGVFRPEQDPVPRMPFEKSLLEKPSELMSHSSSFLSLTGFSLNQERYPNNSMFNEVYGKNLTSSSKAELSPSMAPQETSLYSLFEGTPWSPSLPASSDHSTPASQSPHSSNPSSLPSSPPTHNHNSVPFSNFGPIGTPDNRDRRTADRWKTDKPAMGGFGIDYLSATSSSESSWHQASTPSGTWTGHGPSMEDSSAVLMESLKSIWSSSMMHPGPSALEQLLMQQKQKQQRGQGTMNPPH

SEQ ID NO: 6572 - protein, 246 aa, Homo sapiens
MNDWMPIAKEYDPLKAGSIDGTDEDPHDRAVWRAMLARYVPNKGVIGDPLLTLFVARLNLQTKEDKLKEVFSRYGDIRRLRLVRDLVTGFSKGYAFIEYKEERAVIKAYRDADGLVIDQHEIFVDYELERTLKGWIPRRLGGGLGGKKESGQLRFGGRDRPFRKPINLPVVKNDLYREGKRERRERSRSRERHWDSRTRDRDHDRGREKRWQEREPTRVWPDNDWERERDFRDDRIKGREKKERGK

SEQ ID NO: 6573 - protein, 582 aa, Homo sapiens
MDFEDDYTHSACRNTYQGFNGMDRDYGPGSYGGMDRDYGHGSYGGQRSMDSYLNQSYGMDNHSGGGGGSRFGPYESYDSRSSLGGRDLYRSGYGFNEPEQSRFGGSYGGRFESSYRNSLDSFGGRNQGGSSWEAPYSRSKLRPGFMEDRGRENYSSYSSFSSPHMKPAPVGSRGRGTPAYPESTFGSRNYDAFGGPSTGRGRGRGHMGDFGSIHRPGIVVDYQNKSTNVTVAAARGIKRKMMQPFNKPSGTFIKKPKLAKPMEKISLSKSPTKTDPKNEEEEKRRIEARREKQRRRREKNSEKYGDGYRMAFTCSFCKFRTFEEKDIELHLESSSHQETLDHIQKQTKFDKVVMEFLHECMVNKFKKTSIRKQQTNNQTEVVKIIEKDVMEGVTVDDHMMKVETVHCSACSVYIPALHSSVQQHLKSPDHIKGKQAYKEQIKRESVLTATSILNNPIVKARYERFVKGENPFEIQDHSQDQQIEGDEEDEEKIDEPIEEEEDEDEEEEAEEVGEVEEVEEVEEVREGGIEGEGNIQGVGEGGEVGVVGEVEGVGEVEEVEELEEETAKEEPADFPVEQPEEN

SEQ ID NO: 6574 - protein, 744 aa, Homo sapiens
MAKREDSPGPEVQPMDKQFLVCSICLDRYQCPKVLPCLHTFCERCLQNYIPAQSLTLSCPVCRQTSILPEQGVSALQNNFFISSLMEAMQQAPDGAHDPEDPHPLSVVAGRPLSCPNHEGKTMEFYCEACETAMCGECRAGEHREHGTVLLRDVVEQHKAALQRQLEAVRGRLPQLSAAIALVGGISQQLQERKAEALAQISAAFEDLEQALQQRKQALVSDLETICGAKQKVLQSQLDTLRQGQEHIGSSCSFAEQALRLGSAPEVLLVRKHMRERLAALAAQAFPERPHENAQLELVLEVDGLRRSVLNLGALLTTSATAHETVATGEGLRQALVGQPASLTVTTKDKDGRLVRTGSAELRAEITGPDGTRLPVPVVDHKNGTYELVYTARTEGELLLSVLLYGQPVRGSPFRVRALRPGDLPPSPDDVKRRVKSPGGPGSHVRQKAVRRPSSMYSTGGKRKDNPIEDELVFRVGSRGREKGEFTNLQGVSAASSGRIVVADSNNQCIQVFSNEGQFKFRFGVRGRSPGQLQRPTGVAVDTNGDIIVADYDNRWVSIFSPEGKFKTKIGAGRLMGPKGVAVDRNGHIIVVDNKSCCVFTFQPNGKLVGRFGGRGATDRHFAGPHFVAVNNKNEIVVTDFHNHSVKVYSADGEFLFKFGSHGEGNGQFNAPTGVAVDSNGNIIVADWGNSRIQVFDSSGSFLSYINTSAEPLYGPQGLALTSDGHVVVADAGNHCFKAYRYLQ

SEQ ID NO: 6575 - protein, 529 aa, Homo sapiens
MSQDTEVDMKEVELNELEPEKQPMNAASGAAMSLAGAEKNGLVKIKVAEDEAEAAAAAKFTGLSKEELLKVAGSPGWVRTRWALLLLFWLGWLGMLAGAVVIIVRAPRCRELPAQKWWHTGALYRIGDLQAFQGHGAGNLAGLKGRLDYLSSLKVKGLVLGPIHKNQKDDVAQTDLLQIDPNFGSKEDFDSLLQSAKKKSIRVILDLTPNYRGENSWFSTQVDTVATKVKDALEFWLQAGVDGFQVRDIENLKDASSFLAEWQNITKGFSEDRLLIAGTNSSDLQQILSLLESNKDLLLTSSYLSDSGSTGEHTKSLVTQYLNATGNRWCSWSLSQARLLTSFLPAQLLRLYQLMLFTLPGTPVFSYGDEIGLDAAALPGQPMEAPVMLWDESSFPDIPGAVSANMTVKGQSEDPGSLLSLFRRLSDQRSKERSLLHGDFHAFSAGPGLFSYIRHWDQNERFLVVLNFGDVGLSAGLQASDLPASASLPAKADLLLSTQPGREEGSPLELERLKLEPHEGLLLRFPYAA

SEQ ID NO: 6576 - protein, 835 aa, Homo sapiens
MLSRLFRMHGLFVASHPWEVIVGTVTLTICMMSMNMFTGNNKICGWNYECPKFEEDVLSSDIIILTITRCIAILYIYFQFQNLRQLGSKYILGIAGLFTIFSSFVFSTVVIHFLDKELTGLNEALPFFLLLIDLSRASTLAKFALSSNSQDEVRENIARGMAILGPTFTLDALVECLVIGVGTMSGVRQLEIMCCFGCMSVLANYFVFMTFFPACVSLVLELSRESREGRPIWQLSHFARVLEEEENKPNPVTQRVKMIMSLGLVLVHAHSRWIADPSPQNSTADTSKVSLGLDENVSKRIEPSVSLWQFYLSKMISMDIEQVITLSLALLLAVKYIFFEQTETESTLSLKNPITSPVVTQKKVPDNCCRREPMLVRNNQKCDSVEEETGINRERKVEVIKPLVAETDTPNRATFVVGNSSLLDTSSVLVTQEPEIELPREPRPNEECLQILGNAEKGAKFLSDAEIIQLVNAKHIPAYKLETLMETHERGVSIRRQLLSKKLSEPSSLQYLPYRDYNYSLLGGGASSRVLADGMTRGPVVRLPRACDSAEVKAWLETSEGFAVIKEAFDSTSRFARLQKLHTSIAGRNLYIRFQSRSGDAMGMNMISKGTEKALSKLHEYFPEMQILAVSGNYCTDKKPAAINWIEGRGKSVVCEAVIPAKVVREVLKTTTEAMIEVNINKNLVGSAMAGSIGGYNAHAANIVTAIYIACGQDAAQNVGSSNCITLMEASGPTNEDLYISCTMPSIEIGTVGGGTNLLPQQACLQMLGVQGACKDNPGENARQLARIVCGTVMAGELSLMAALAAGHLVKSHMIHNRSKINLQDLQGACTKKTA

SEQ ID NO: 6577 - protein, 249 aa, Homo sapiens
MAERGELDLTGAKQNTGVWLVKVPKYLSQQWAKASGRGEVGKLRIAKTQGRTEVSFTLNEDLANIHDIGGKPASVSAPREHPFVLQSVGGQTLTVFTESSSDKLSLEGIVVQRAECRPAASENYMRLKRLQIEESSKPVRLSQQLDKVVTTNYKPVANHQYNIEYERKKKEDGKRARADKQHVLDMLFSAFEKHQYYNLKDLVDITKQPVVYLKEILKEIGVQNVKGIHKNTWELKPEYRHYQGEEKSD

SEQ ID NO: 6578 - protein, 105 aa, Homo sapiens
MLIRQNLALDCKQKKSRSRSGSKKKMLTLPHGADEVYILRCRFCGLVFRGPLSVQEDWIKHLQRHIVNANLPRTGAGMVEVTSLLKKPASITETSFSLLMAEAAS

SEQ ID NO: 6579 - protein, 214 aa, Homo sapiens
MSKPPPKPVKPGQVKVFRALYTFEPRTPDELYFEEGDIIYITDMSDTNWWKGTSKGRTGLIPSNYVAEQAESIDNPLHEAAKRGNLSWLRECLDNRVGVNGLDKAGSTALYWACHGGHKDIVEMLFTQPNIELNQQNKLGDTALHAAAWKGYADIVQLLLAKGARTDLRNIEKKLAFDMATNAACASLLKKKQGTDAVRTLSNAEDYLDDEDSD

SEQ ID NO: 6580 - protein, 766 aa, Homo sapiens
MDNITRQNQFYDTQVIKQENESGYERRPLEMEQQQAYRPEMKTEMKQGAPTSFLPPEASQLKPDRQQFQSRKRPYEENRGRGYFEHREDRRGRSPQPPAEEDEDDFDDTLVAIDTYNCDLHFKVARDRSSGYPLTIEGFAYLWSGARASYGVRRGRVCFEMKINEEISVKHLPSTEPDPHVVRIGWSLDSCSTQLGEEPFSYGYGGTGKKSTNSRFENYGDKFAENDVIGCFADFECGNDVELSFTKNGKWMGIAFRIQKEALGGQALYPHVLVKNCAVEFNFGQRAEPYCSVLPGFTFIQHLPLSERIRGTVGPKSKAECEILMMVGLPAAGKTTWAIKHAASNPSKKYNILGTNAIMDKMRVMGLRRQRNYAGRWDVLIQQATQCLNRLIQIAARKKRNYILDQTNVYGSAQRRKMRPFEGFQRKAIVICPTDEDLKDRTIKRTDEEGKDVPDHAVLEMKANFTLPDVGDFLDEVLFIELQREEADKLVRQYNEEGRKAGPPPEKRFDNRGGGGFRGRGGGGGFQRYENRGPPGGNRGGFQNRGGGSGGGGNYRGGFNRSGGGGYSQNRWGNNNRDNNNSNNRGSYNRAPQQQPPPQQPPPPQPPPQQPPPPPSYSPARNPPGASTYNKNSNIPGSSANTSTPTVSSYSPPQSFGFFPSTFQPSYSQPPYNQGGYSQGYTAPPPPPPPPPAYNYGSYGGYNPAPYTPPPPPTAQTYPQPSYNQYQQYAQQWNQYYQNQGQWPPYYGNYDYGSYSGNTQGGTSTQ

SEQ ID NO: 6581 - protein, 57 aa, Homo sapiens
MSRSVALAVLALLSLSGLERELKKWSIQTCLSARTGLSISCTTLNSPPLKKMSMPAV

SEQ ID NO: 6582 - protein, 281 aa, Homo sapiens
MGSRGQGLLLAYCLLLAFASGLVLSRVPHVQGEQQEWEGTEELPSPPDHAERAEEQHEKYRPSQDQGLPASRCLRCCDPGTSMYPATAVPQINITILKGEKGDRGDRGLQGKYGKTGSAGARGHTGPKGQKGSMGAPGERCKSHYAAFSVGRKKPMHSNHYYQTVIFDTEFVNLYDHFNMFTGKFYCYVPGLYFFSLNVHTWNQKETYLHIMKNEEEVVILFAQVGDRSIMQSQSLMLELREQDQVWVRLYKGERENAIFSEELDTYITFSGYLVKHATEP

SEQ ID NO: 6583 - protein, 140 aa, Homo sapiens
MRFRFCGDLDCPDWVLAEISTLAKMSSVKLRLLCSQVLKELLGQGIDYEKILKLTADAKFESGDVKATVAVLSFILSSAAKHSVDGESLSSELQQLGLPKEHAASLCRCYEEKQSPLQKHLRVCSLRKLKQAQTLMSSLG

SEQ ID NO: 6584 - protein, 364 aa, Homo sapiens
MARAMAAAWPLLLVALLVLSWPPPGTGDVVVQAPTQVPGFLGDSVTLPCYLQVPNMEVTHVSQLTWARHGESGSMAVFHQTQGPSYSESKRLEFVAARLGAELRNASLRMFGLRVEDEGNYTCLFVTFPQGSRSVDIWLRVLAKPQNTAEVQKVQLTGEPVPMARCVSTGGRPPAQITWHSDLGGMPNTSQVPGFLSGTVTVTSLWILVPSSQVDGKNVTCKVEHESFEKPQLLTVNLTVYYPPEVSISGYDNNWYLGQNEATLTCDARSNPEPTGYNWSTTMGPLPPFAVAQGAQLLIRPVDKPINTTLICNVTNALGARQAELTVQVKGTEHASASANGHVSYSAVSRENSSSQDPQTEGTR

SEQ ID NO: 6585 - protein, 1196 aa, Homo sapiens
MEPRPTAPSSGAPGLAGVGETPSAAALAAARVELPGTAVPSVPEDAAPASRDGGGVRDEGPAAAGDGLGRPLGPTPSQSRFQVDLVSENAGRAAAAAAAAAAAAAAAGAGAGAKQTPADGEASGESEPAKGSEEAKGRFRVNFVDPAASSSAEDSLSDAAGVGVDGPNVSFQNGGDTVLSEGSSLHSGGGGGSGHHQHYYYDTHTNTYYLRTFGHNTMDAVPRIDHYRHTAAQLGEKLLRPSLAELHDELEKEPFEDGFANGEESTPTRDAVVTYTAESKGVVKFGWIKGVLVRCMLNIWGVMLFIRLSWIVGQAGIGLSVLVIMMATVVTTITGLSTSAIATNGFVRGGGAYYLISRSLGPEFGGAIGLIFAFANAVAVAMYVVGFAETVVELLKEHSILMIDEINDIRIIGAITVVILLGISVAGMEWEAKAQIVLLVILLLAIGDFVIGTFIPLESKKPKGFFGYKSEIFNENFGPDFREEETFFSVFAIFFPAATGILAGANISGDLADPQSAIPKGTLLAILITTLVYVGIAVSVGSCVVRDATGNVNDTIVTELTNCTSAACKLNFDFSSCESSPCSYGLMNNFQVMSMVSGFTPLISAGIFSATLSSALASLVSAPKIFQALCKDNIYPAFQMFAKGYGKNNEPLRGYILTFLIALGFILIAELNVIAPIISNFFLASYALINFSVFHASLAKSPGWRPAFKYYNMWISLLGAILCCIVMFVINWWAALLTYVIVLGLYIYVTYKKPDVNWGSSTQALTYLNALQHSIRLSGVEDHVKNFRPQCLVMTGAPNSRPALLHLVHDFTKNVGLMICGHVHMGPRRQAMKEMSIDQAKYQRWLIKNKMKAFYAPVHADDLREGAQYLMQAAGLGRMKPNTLVLGFKKDWLQADMRDVDMYINLFHDAFDIQYGVVVIRLKEGLDISHLQGQEELLSSQEKSPGTKDVVVSVEYSKKSDLDTSKPLSEKPITHKESKGPIVPLNVADQKLLEASTQFQKKQGKNTIDVWWLFDDGGLTLLIPYLLTTKKKWKDCKIRVFIGGKINRIDHDRRAMATLLSKFRIDFSDIMVLGDINTKPKKENIIAFEEIIEPYRLHEDDKEQDIADKMKEDEPWRITDNELELYKTKTYRQIRLNELLKEHSSTANIIVMSLPVARKGAVSSALYMAWLEALSKDLPPILLVRGNHQSVLTFYS

SEQ ID NO: 6586 - protein, 282 aa, Homo sapiens
MPLLTQQIQDEDDQYSLVASLDNVRNLSTILKAIHFREHATCFATKNGIKVTVENAKCVQANAFIQAGIFQEFKVQEESVTFRINLTVLLDCLSIFGSSPMPGTLTALRMCYQGYGYPLMLFLEEGGVVTVCKINTQEPEETLDFDFCSTNVINKIILQSEGLREAFSELDMTSEVLQITMSPDKPYFRLSTFGNAGSSHLDYPKDSDLMEAFHCNQTQVNRYKISLLKPSTKALVLSCKVSIRTDNRGFLSLQYMIRNEDGQICFVEYYCCPDEEVPESES

SEQ ID NO: 6587 - protein, 628 aa, Homo sapiens
MAAAGAGPGQEAGAGPGPGAVANATGAEEGEMKPVAAGAAAPPGEGISAAPTVEPSSGEAEGGEANLVDVSGGLETESSNGKDTLEGAGDTSEVMDTQAGSVDEENGRQLGEVELQCGICTKWFTADTFGIDTSSCLPFMTNYSFHCNVCHHSGNTYFLRKQANLKEMCLSALANLTWQSRTQDEHPKTMFSKDKDIIPFIDKYWECMTTRQRPGKMTWPNNIVKTMSKERDVFLVKEHPDPGSKDPEEDYPKFGLLDQDLSNIGPAYDNQKQSSAVSTSGNLNGGIAAGSSGKGRGAKRKQQDGGTTGTTKKARSDPLFSAQRLPPHGYPLEHPFNKDGYRYILAEPDPHAPDPEKLELDCWAGKPIPGDLYRACLYERVLLALHDRAPQLKISDDRLTVVGEKGYSMVRASHGVRKGAWYFEITVDEMPPDTAARLGWSQPLGNLQAPLGYDKFSYSWRSKKGTKFHQSIGKHYSSGYGQGDVLGFYINLPEDTETAKSLPDTYKDKALIKFKSYLYFEEKDFVDKAEKSLKQTPHSEIIFYKNGVNQGVAYKDIFEGVYFPAISLYKSCTVSINFGPCFKYPPKDLTYRPMSDMGWGAVVEHTLADVLYHVETEVDGRRSPPWEP

SEQ ID NO: 6588 - protein, 1907 aa, Homo sapiens
MAAAPGLLVWLLVLRLPWRVPGQLDPSTGRRFSEHKLCADDECSMLMYRGEALEDFTGPDCRFVNFKKGDPVYVYYKLARGWPEVWAGSVGRTFGYFPKDLIQVVHEYTKEELQVPTDETDFVCFDGGRDDFHNYNVEELLGFLELYNSAATDSEKAVEKTLQDMEKNPELSKEREPEPEPVEANSEESDSVFSENTEDLQEQFTTQKHHSHANSQANHAQGEQASFESFEEMLQDKLKVPESENNKTSNSSQVSNEQDKIDAYKLLKKEMTLDLKTKFGSTADALVSDDETTRLVTSLEDDFDEELDTEYYAVGKEDEENQEDFDELPLLTFTDGEDMKTPAKSGVEKYPTDKEQNSNEEDKVQLTVPPGIKNDDKNILTTWGDTIFSIVTGGEETRDTMDLESSSSEEEKEDDDDALVPDSKQGKPQSATDYSDPDNVDDGLFIVDIPKTNNDKEVNAEHHIKGKGRGVQESKRGLVQDKTELEDENQEGMTVHSSVHSNNLNSMPAAEKGKDTLKSAYDDTENDLKGAAIHISKGMLHEEKPGEQILEGGSESESAQKAAGNQMNDRKIQQESLGSAPLMGDDHPNASRDSVEGDALVNGAKLHTLSVEHQREELKEELVLKTQNQPRFSSPDEIDLPRELEDEVPILGRNLPWQQERDVAATASKQMSEKIRLSEGEAKEDSLDEEFFHHKAMQGTEVGQTDQTDSTGGPAFLSKVEEDDYPSEELLEDENAINAKRSKEKNPGNQGRQFDVNLQVPDRAVLGTIHPDPEIEESKQETSMILDSEKTSETAAKGVNTGGREPNTMVEKERPLADKKAQRPFERSDFSDSIKIQTPELGEVFQNKDSDYLKNDNPEEHLKTSGLAGEPEGELSKEDHENTEKYMGTESQGSAAAEPEDDSFHWTPHTSVEPGHSDKREDLLIISSFFKEQQSLQRFQKYFNVHELEALLQEMSSKLKSAQQESLPYNMEKVLDKVFRASESQILSIAEKMLDTRVAENRDLGMNENNIFEEAAVLDDIQDLIYFVRYKHSTAEETATLVMAPPLEEGLGGAMEEMQPLHEDNFSREKTAELNVQVPEEPTHLDQRVIGDTHASEVSQKPNTEKDLDPGPVTTEDTPMDAIDANKQPETAAEEPASVTPLENAILLIYSFMFYLTKSLVATLPDDVQPGPDFYGLPWKPVFITAFLGIASFAIFLWRTVLVVKDRVYQVTEQQISEKLKTIMKENTELVQKLSNYEQKIKESKKHVQETRKQNMILSDEAIKYKDKIKTLEKNQEILDDTAKNLRVMLESEREQNVKNQDLISENKKSIEKLKDVISMNASEFSEVQIALNEAKLSEEKVKSECHRVQEENARLKKKKEQLQQEIEDWSKLHAELSEQIKSFEKSQKDLEVALTHKDDNINALTNCITQLNLLECESESEGQNKGGNDSDELANGEVGGDRNEKMKNQIKQMMDVSRTQTAISVVEEDLKLLQLKLRASVSTKCNLEDQVKKLEDDRNSLQAAKAGLEDECKTLRQKVEILNELYQQKEMALQKKLSQEEYERQEREHRLSAADEKAVSAAEEVKTYKRRIEEMEDELQKTERSFKNQIATHEKKAHENWLKARAAERAIAEEKREAANLRHKLLELTQKMAMLQEEPVIVKPMPGKPNTQNPPRRGPLSQNGSFGPSPVSGGECSPPLTVEPPVRPLSATLNRRDMPRSEFGSVDGPLPHPRWSAEASGKPSPSDPGSGTATMMNSSSRGSSPTRVLDEGKVNMAPKGPPPFPGVPLMSTPMGGPVPPPIRYGPPPQLCGPFGPRPLPPPFGPGMRPPLGLREFAPGVPPGRRDLPLHPRGFLPGHAPFRPLGSLGPREYFIPGTRLPPPTHGPQEYPPPPAVRDLLPSGSRDEPPPASQSTSQDCSQALKQSP

SEQ ID NO: 6589 - protein, 241 aa, Homo sapiens
MAEPSAATQSHSISSSSFGAEPSAPGGGGSPGACPALGTKSCSSSCAVHDLIFWRDVKKTGFVFGTTLIMLLSLAAFSVISVVSYLILALLSVTISFRIYKSVIQAVQKSEEGHPFKAYLDVDITLSSEAFHNYMNAAMVHINRALKLIIRLFLVEDLVDSLKLAVFMWLMTYVGAVFNGITLLILAELLIFSVPIVYEKYKDPSKTPWNRQKKGRISTWKPEMQQLLKHHLIVITSLLVL

SEQ ID NO: 6590 - protein, 47 aa, Homo sapiens
MELVRRLMPLTLLILSCLAELTMAEAEGRRSVNYLHQYNHLFCILNF

SEQ ID NO: 6591 - protein, 412 aa, Homo sapiens
MDLAKSGIKILVPKSPVKSRTAVDGFQSESPEKLDPVEQGQEDTVAPEVAAEKPVGALLGPGAERARMGSRPRIHPLVPQVPGPVTAAMATGLAVNGKGTSPFMDALTANGTTNIQTSVTGVTASKRKFIDDRRDQPFDKRLRFSVRQTESAYRYRDIVVRKQDGFTHILLSTKSSENNSLNPEVMREVQSALSTAAADDSKLVLLSAVGSVFCCGLDFIYFIRRLTDDRKRESTKMAEAIRNFVNTFIQFKKPIIVAVNGPAIGLGASILPLCDVVWANEKAWFQTPYTTFGQSPDGCSTVMFPKIMGGASANEMLLSGRKLTAQEACGKGLVSQVFWPGTFTQEVMVRIKELASCNPVVLEESKALVRCNMKMELEQANERECEVLKKIWGSAQGMDSMLKYLQRKIDEF

SEQ ID NO: 6592 - protein, 130 aa, Homo sapiens
MMPKHCFLGFLISFFLTGVAGTQSTHESLKPQRVQFQSRNFHNILQWQPGRALTGNSSVYFVQYKIYGQRQWKNKEDCWGTQELSCDLTSETSDIQEPYYGRVRAASAGSYSEWSMTPRFTPWWERAKGL

SEQ ID NO: 6593 - protein, 1170 aa, Homo sapiens
MTNPSDRVLPANSMAESREGDFGCTVMELRKLMELRSRDALTQINVHYGGVQNLCSRLKTSPVEGLSGNPADLEKRRQVFGHNVIPPKKPKTFLELVWEALQDVTLIILEIAAIISLVLSFYRPAGEENELCGQVATTPEDENEAQAGWIEGAAILFSVIIVVLVTAFNDWSKEKQFRGLQCRIEQEQKFSIIRNGQLIQLPVAEIVVGDIAQVKYGDLLPADGILIQGNDLKIDESSLTGESDHVKKSLDKDPMLLSGTHVMEGSGRMVVTAVGVNSQTGIILTLLGVNEDDEGEKKKKGKKQGVPENRNKAKTQDGVALEIQPLNSQEGIDNEEKDKKAVKVPKKEKSVLQGKLTRLAVQIGKAGLLMSALTVFILILYFVIDNFVINRRPWLPECTPIYIQYFVKFFIIGITVLVVAVPEGLPLAVTISLAYSVKKMMKDNNLVRHLDACETMGNATAICSDKTGTLTMNRMTVVQAYIGGIHYRQIPSPDVFLPKVLDLIVNGISINSAYTSKILPPEKEGGLPRQVGNKTECALLGFVTDLKQDYQAVRNEVPEEKLYKVYTFNSVRKSMSTVIRNPNGGFRMYSKGASEIILRKCNRILDRKGEAVPFKNKDRDDMVRTVIEPMACDGLRTICIAYRDFDDTEPSWDNENEILTELTCIAVVGIEDPVRPEVPDAIAKCKQAGITVRMVTGDNINTARAIATKCGILTPGDDFLCLEGKEFNRLIRNEKGEVEQEKLDKIWPKLRVLARSSPTDKHTLVKGIIDSTVGEHRQVVAVTGDGTNDGPALKKADVGFAMGIAGTDVAKEASDIILTDDNFTSIVKAVMWGRNVYDSISKFLQFQLTVNVVAVIVAFTGACITQDSPLKAVQMLWVNLIMDTFASLALATEPPTESLLKRRPYGRNKPLISRTMMKNILGHAFYQLIVIFILVFAGEKFFDIDSGRKAPLHSPPSQHYTIVFNTFVLMQLFNEINSRKIHGEKNVFSGIYRNIIFCSVVLGTFICQIFIVEFGGKPFSCTSLSLSQWLWCLFIGIGELLWGQFISAIPTRSLKFLKEAGHGTTKEEITKDAEGLDEIDHAEMELRRGQILWFRGLNRIQTQIDVINTFQTGASFKGVLRRQNMGQHLDVKLVPSSSYVAVAPVKSSPTTSVPAVSSPPMGNQSGQSVP

SEQ ID NO: 6594 - protein, 585 aa, Homo sapiens
MAAAAAAVGPGAGGAGSAVPGGAGPCATVSVFPGARLLTIGDANGEIQRHAEQQALRLEVRAGPDSAGIALYSHEDVCVFKCSVSRETECSRVGKQSFIITLGCNSVLIQFATPNDFCSFYNILKTCRGHTLERSVFSERTEESSAVQYFQFYGYLSQQQNMMQDYVRTGTYQRAILQNHTDFKDKIVLDVGCGSGILSFFAAQAGARKIYAVEASTMAQHAEVLVKSNNLTDRIVVIPGKVEEVSLPEQVDIIISEPMGYMLFNERMLESYLHAKKYLKPSGNMFPTIGDVHLAPFTDEQLYMEQFTKANFWYQPSFHGVDLSALRGAAVDEYFRQPVVDTFDIRILMAKSVKYTVNFLEAKEGDLHRIEIPFKFHMLHSGLVHGLAFWFDVAFIGSIMTVWLSTAPTEPLTHWYQVRCLFQSPLFAKAGDTLSGTCLLIANKRQSYDISIVAQVDQTGSKSSNLLDLKNPFFRYTGTTPSPPPGSHYTSPSENMWNTGSTYNLSSGMAVAGMPTAYDLSSVIASGSSVGHNNLIPLGSSGAQGSGGGSTSAHYAVNSQFTMGGPAISMASPMSIPTNTMHYGS

SEQ ID NO: 6595 - protein, 513 aa, Homo sapiens
MKISILLMFLWGLSCALPVTRYQNNESEDSEEWKGHLAQAPTPPLESSESSEGSKVSSEEQANEDPSDSTQSEEGLGSDDHQYIYRLAGGFSRSTGKGGDDKDDDEDDSGDDTFGDDDSGPGPKDRQEGGNSRLGSDEDSDDTIQASEESAPQGQDSAQDTTSESRELDNEDRVDSKPEGGDSTQESESEEHWVGGGSDGESSHGDGSELDDEGMQSDDPESIRSERGNSRMNSAGMKSKESGENSEQANTQDSGGSQLLEHPSRKIFRKSRISEEDDRSELDDNNTMEEVKSDSTENSNSRDTGLSQPRRDSKGDSQEDSKENLSQEESQNVDGPSSESSQEANLSSQENSSESQEEVVSESRGDNPDPTTSYVEDQEDSDSSEEDSSHTLSHSKSESREEQADSESSESLNFSEESPESPEDENSSSQEGLQSHSSSAESQSEESHSEEDDSDSQDSSRSKEDSNSTESKSSSEEDGQLKNIEIESRKLTVDAYHNKPIGDQDDNDCQDGY

SEQ ID NO: 6596 - protein, 438 aa, Homo sapiens
MRGPSGPPGLLYVPHLLLCLLCLLPPPLQYAAGQSQMPKDQPLWALLEQYCHTIMTLTNLSGPYSYCNTTLDQIGTCWPRSAAGALVERPCPEYFNGVKYNTTRNAYRECLENGTWASKINYSQCEPILDDKQRKYDLHYRIALVVNYLGHCVSVAALVAAFLLFLALRSIRCLRNVIHWNLITTFILRNVMWFLLQLVDHEVHESNEVWCRCITTIFNYFVVTNFFWMFVEGCYLHTAIVMTYSTERLRKCLFLFIGWCIPFPIIVAWAIGKLYYENEQCWFGKEPGDLVDYIYQGPIILVLLINFVFLFNIVRILMTKLRASTTSETIQYRKAVKATLVLLPLLGITYMLFFVNPGEDDLSQIMFIYFNSFLQSFQGFFVSVFYCFFNGEVRSAVRKRWHRWQDHHSLRVPMARAMSIPTSPTRISFHSIKQTAAV

SEQ ID NO: 6597 - protein, 593 aa, Homo sapiens [sequence omitted]

SEQ ID NO: 6598 - protein, 397 aa, Homo sapiens
MLLWTAVLLFVPCVGKTVWLYLQAWPNPVFEGDALTLRCQGWKNTPLSQVKFYRDGKFLHFSKENQTLSMGAATVQSRGQYSCSGQVMYIPQTFTQTSETAMVQVQELFPPPVLSAIPSPEPREGSLVTLRCQTKLHPLRSALRLLFSFHKDGHTLQDRGPHPELCIPGAKEGDSGLYWCEVAPEGGQVQKQSPQLEVRVQAPVSRPVLTLHHGPADPAVGDMVQLLCEAQRGSPPILYSFYLDEKIVGNHSAPCGGTTSLLFPVKSEQDAGNYSCEAENSVSRERSEPKKLSLKGSQVLFTPASNWLVPWLPASLLGLMVIAAALLVYVRSWRKAGPLPSQIPPTAPGGEQCPLYANVHHQKGKDEGVVYSVVHRTSKRSEGQFYHLCGGEMPAAQ

SEQ ID NO: 6599 - protein, 147 aa, Homo sapiens
MKTLFLGVTLGLAAALSFTLEEEDEGGSVHPEENPDAEDGGAWQIQRLWGQEAHIPAGAARDGRLRLLLQRPAPWGPALHGKACGICSLQGRAAVPTLAHLATSPAGRNPNTNLEALEEFKKLVQHKGLSEEDIFMPLQTGSCVLEH

SEQ ID NO: 6600 - protein, 836 aa, Homo sapiens
MWSLGCVIAELFLGWPLYPGASEYDQIRYISQTQGLPAEYLLSAGTKTTRFFNRDPNLGYPLWRLKTPEEHELETGIKSKEARKYIFNCLDDMAQVNMSTDLEGTDMLAEKADRREYIDLLKKMLTIDADKRITPLKTLNHQFVTMTHLLDFPHSNHVKSCFQNMEICKRRVHMYDTVSQIKSPFTTHVAPNTSTNLTMSFSNQLNTVHNQASVLASSSTAAAATLSLANSDVSLLNYQSALYPSSAAPVPGVAQQGVSLQPGTTQICTQTDPFQQTFIVCPPAFQTGLQATTKHSGFPVRMDNAVPIVPQAPAAQPLQIQSGVLTQGSCTPLMVATLHPQVATITPQYAVPFTLSCAAGRPALVEQTAAVLQAWPGGTQQILLPSTWQQLPGVALHNSVQPTAMIPEAMGSGQQLADWRNAHSHGNQYSTIMQQPSLLTNHVTLATAQPLNVGVAHVVRQQQSSSLPSKKNKQSAPVSSKSSLDVLPSQVYSLVGSSPLRTTSSYNSLVPVQDQHQPIIIPDTPSPPVSVITIRSDTDEEEDNKYKPSSSGLKPRSNVISYVTVNDSPDSDSSLSSPYSTDTLSALRGNSGSVLEGPGRVVADGTGTRTIIVPPLKTQLGDCTVATQASGLLSNKTKPVASVSGQSSGCCITPTGYRAQRGGTSAAQPLNLSQNQQSSAAPTSQERSSNPAPRRQQAFVAPLSQAPYTFQHGSPLHSTGHPHLAPAPAHLPSQAHLYTYAAPTSAAALGSTSSIAHLFSPQGSSRHAAAYTTHPSTLVHQVPVSVGPSLLTSASVAPAQYQHQFATQSYIGSSRGSTIYTGYPLSPTKISQYSYL

SEQ ID NO: 6601 - protein, 313 aa, Homo sapiens
MSDLLLLGLIGGLTLLLLLTLLAFAGYSGLLAGVEVSAGSPPIRNVTVAYKFHMGLYGETGRLFTESCSISPKLRSIAVYYDNPHMVPPDKCRCAVGSILSEGEESPSPELIDLYQKFGFKVFSFPAPSHVVTATFPYTTILSIWLATRRVHPALDTYIKERKLCAYPRLEIYQEDQIHFMCPLARQGDFYVPEMKETEWKWRGLVEAIDTQVDGTGADTMSDTSSVSLEVSPGSRETSAATLSPGASSRGWDDGDTRSEHSYSESGASGSSFEELDLEGEGPLGESRLDPGTEPLGTTKWLWEPTAPEKGKE

SEQ ID NO: 6602 - protein, 281 aa, Homo sapiens
MLPKSRRALTIQEIAALARSSLHGISQVVKDHVTKPTAMAQGRVAHLIEWKGWSKPSDSPAALESAFSSYSDLSEGEQEARFAAGVAEQFAIAEAKLRAWSSVDGEDSTDDSYDEDFAGGMDTDMAGQLPLGPHLQDLFTGHRFSRPVRQGSVEPESDCSQTVSPDTLCSSLCSLEDGLLGSPARLASQLLGDELLLAKLPPSRESAFRSLGPLEAQDSLYNSPLTESCLSPAEEEPAPCKDCQPLCPPLTGSWERQRQASDLASSGVVSLDEDEAEPEEQ

SEQ ID NO: 6603 - protein, 305 aa, Homo sapiens
MGGTLAWTLLLPLLLRESDSLEPSCTVSSADVDWNAEFSATCLNFSGLSLSLPHNQSLRASNVILLDLSGNGLRELPVTFFAHLQKLEVLNVLRNPLSRVDGALAARCDLDLQADCNCALESWHDIRRDNCSGQKPLLCWDTTSSQHNLSAFLEVSCAPGLASATIGAVVVSGCLLLGLAIAGPVLAWRLWRCRVARSRELNKPWAAQDGPKPGLGLQPRYGSRSAPKPQVAVPSCPSTPDYENMFVGQPAAEHQWDEQGAHPSEDNDFYINYKDIDLASQPVYCNLQSLGQAPMDEEEYVIPGH

SEQ ID NO: 6604 - protein, 272 aa, Homo sapiens
MEACCLLQLPQRLLLLGAAALTATALETADLAELCGQTWQGDGLLLRSHAASRRFYFVAPDTDCGLWVQAAAPGDRIRFQFRFFLVYSLTPAPPALNTSSPAPADPCAPGSYLQFYEGPPGAPRPLGSPLCGLNIPVPVASSGPFLGLRLVTRGRQPRVDFVGEVTSFRLGPCGAYFRCQNGRCIPSSLVCDPWGMDNCGDGSDQGSWSPADCRGPSPVPSQTGSTDAHTSRSLTPSPALGSAGSLWIAAERSSPAGRDPTRQDAALEGSTE

SEQ ID NO: 6605 - protein, 628 aa, Homo sapiens
MGSCARLLLLWGCTVVAAGLSGVAGVSSRCEKACNPRMGNLALGRKLWADTTCGQNATELYCFYSENTDLTCRQPKCDKCNAAYPHLAHLPSAMADSSFRFPRTWWQSAEDVHREKIQLDLEAEFYFTHLIVMFKSPRPAAMVLDRSQDFGKTWKPYKYFATNCSATFGLEDDVVKKGAICTSKYSSPFPCTGGEVIFKALSPPYDTENPYSAKVQEQLKITNLRVQLLKRQSCPCQRNDLNEEPQHFTHYAIYDFIVKGSCFCNGHADQCIPVHGFRPVKAPGTFHMVHGKCMCKHNTAGSHCQHCAPLYNDRPWEAADGKTGAPNECRTCKCNGHADTCHFDVNVWEASGNRSGGVCDDCQHNTEGQYCQRCKPGFYRDLRRPFSAPDACKPCSCHPVGSAVLPANSVTFCDPSNGDCPCKPGVAGRRCDRCMVGYWGFGDYGCRPCDCAGSCDPITGDCISSHTDIDWYHEVPDFRPVHNKSEPAWEWEDAQGFSALLHSGKCECKEQTLGNAKAFCGMKYSYVLKIKILSAHDKGTHVEVNVKIKKVLKSTKLKIFRGKRTLYPESWTDRGCTCPILNPGLEYLVAGHEDIRTGKLIVNMKSFVQHWKPSLGRKVMDILKRECK

SEQ ID NO: 6606 - protein, 209 aa, Homo sapiens
MRSTILLFCLLGSTRSLPQLKPALGLPPTKLAPDQGTLPNQQQSNQVFPSLSLIPLTQMLTLGPDLHLLNPAAGMTPGTQTHPLTLGGLNVQQQLHPHVLPIFVTQLGAQGTILSSEELPQIFTSLIIHSLFPGGILPTSQAGANPDVQDGSLPAGGAGVNPATQGTPAGRLPTPSGTDDDFAVTTPAGIQRSTHAIEEATTESANGIQ

SEQ ID NO: 6607 - protein, 916 aa, Homo sapiens
MAEGGGCRERPDAETQKSELGPLMRTTLQRGAQWYLIDSRWFKQWKKYVGFDSWDMYNVGEHNLFPGPIDNSGLFSDPESQTLKEHLIDELDYVLVPTEAWNKLLNWYGCVEGQQPIVRKVVEHGLFVKHCKVEVYLLELKLCENSDPTNVLSCHFSKADTIATIEKEMRKLFNIPAERETRLWNKYMSNTYEQLSKLDNTVQDAGLYQGQVLVIEPQNEDGTWPRQTLQSNGSGFSASYNCQEPPSSHIQPGLCGLGNLGNTCFMNSALQCLSNTAPLTDYFLKDEYEAEINRDNPLGMKGEIAEAYAELIKQMWSGRDAHVAPRMFKTQVGRFAPQFSGYQQQDSQELLAFLLDGLHEDLNRVKKKPYLELKDANGRPDAVVAKEAWENHRLRNDSVIVDTFHGLFKSTLVCPECAKVSVTFDPFCYLTLPLPLKKDRVMEVFLVPADPHCRPTQYRVTVPLMGAVSDLCEALSRLSGIAAENMVVADVYNHRFHKIFQMDEGLNHIMPRDDIFVYEVCSTSVDGSECVTLPVYFRERKSRPSSTSSASALYGQPLLLSVPKHKLTLESLYQAVCDRISRYVKQPLPDEFGSSPLEPGACNGSRNSCEGEDEEEMEHQEEGKEQLSETEGSGEDEPGNDPSETTQKKIKGQPCPKRLFTFSLVNSYGTADINSLAADGKLLKLNSRSTLAMDWDSETRRLYYDEQESEAYEKHVSMLQPQKKKKTTVALRDCIELFTTMETLGEHDPWYCPNCKKHQQATKKFDLWSLPKILVVHLKRFSYNRYWRDKLDTVVEFPIRGLNMSEFVCNLSARPYVYDLIAVSNHYGAMGVGHYTAYAKNKLNGKWYYFDDSNVSLASEDQIVTKAAYVLFYQRRDDEFYKTPSLSSSGSSDGGTRPSSSQQGFGDDEACSMDTN

SEQ ID NO: 6608 - protein, 226 aa, Homo sapiens
MKVLILACLVALALARETIESLSSSEESITEYKQKVEKVKHEDQQQGEDEHQDKIYPSFQPQPLIYPFVEPIPYGFLPQNILPLAQPAVVLPVPQPEIMEVPKAKDTVYTKGRVMPVLKSPTIPFFDPQIPKLTDLENLHLPLPLLQPLMQQVPQPIPQTLALPPQPLWSVPQPKVLPIPQQVVPYPQRAVPVQALLLNQELLLNPTHQIYPVTQPLAPVHNPISV

SEQ ID NO: 6609 - protein, 275 aa, Homo sapiens
MSTIGSFEGFQAVSLKQEGDDQPSETDHLSMEEEDPMPRQISRQSSVTESTLYPNPYHQPYISRKYFATRPGAIETAMEDLKGHVAETSGETIQGFWLLTKIDHWNNEKERILLVTDKTLLICKYDFIMLSCVQLQRIPLSAVYRICLGKFTFPGMSLDKRQGEGLRIYWGSPEEQSLLSRWNPWSTEVPYATFTEHPMKYTSEKFLEICKLSGFMSKLVPAIQNAHKNSTGSGRGKKLMVLTEPILIETYTGLMSFIGNRNKLGYSLARGSIGF

SEQ ID NO: 6610 - protein, 569 aa, Homo sapiens
MATEGGGKEMNEIKTQFTTREGLYKLLPHSEYSRPNRVPFNSQGSNPVRVSFVNLNDQSGNGDRLCFNVGRELYFYIYKGVRKAADLSKPIDKRIYKGTQPTCHDFNHLTATAESVSLLVGFSAGQVQLIDPIKKETSKLFNEERLIDKSRVTCVKWVPGSESLFLVAHSSGNMYLYNVEHTCGTTAPHYQLLKQGESFAVHTCKSKSTRNPLLKWTVGEGALNEFAFSPDGKFLACVSQDGFLRVFNFDSVELHGTMKSYFGGLLCVCWSPDGKYIVTGGEDDLVTVWSFVDCRVIARGHGHKSWVSVVAFDPYTTSVEEGDPMEFSGSDEDFQDLLHFGRDRANSTQSRLSKRNSTDSRPVSVTYRFGSVGQDTQLCLWDLTEDILFPHQPLSRARTHTNVMNATSPPAGSNGNSVTTPGNSVPPPLPRSNSLPHSAVSNAGSKSSVMDGAIASGVSKFATLSLHDRKERHHEKDHKRNHSMGHISSKSSDKLNLVTKTKTDPAKTLGTPLCPRMEDVPLLEPLICKKIAHERLTVLIFLEDCIVTACQEGFICTWGRPGKVVSFNP

SEQ ID NO: 6611 - protein, 2458 aa, Homo sapiens
MVLLLCLSCLIFSCLTFSWLKIWGKMTDSKPITKSKSEANLIPSQEPFPASDNSGETPQRNGEGHTLPKTPSQAEPASHKGPKDAGRRRNSLPPSHQKPPRNPLSSSDAAPSPELQANGTGTQGLEATDTNGLSSSARPQGQQAGSPSKEDKKQANIKRQLMTNFILGSFDDYSSDEDSVAGSSRESTRKGSRASLGALSLEAYLTTGEAETRVPTMRPSMSGLHLVKRGREHKKLDLHRDFTVASPAEFVTRFGGDRVIEKVLIANNGIAAVKCMRSIRRWAYEMFRNERAIRFVVMVTPEDLKANAEYIKMADHYVPVPGGPNNNNYANVELIVDIAKRIPVQAVWAGWGHASENPKLPELLCKNGVAFLGPPSEAMWALGDKIASTVVAQTLQVPTLPWSGSGLTVEWTEDDLQQGKRISVPEDVYDKGCVKDVDEGLEAAERIGFPLMIKASEGGGGKGIRKAESAEDFPILFRQVQSEIPGSPIFLMKLAQHARHLEVQILADQYGNAVSLFGRDCSIQRRHQKIVEEAPATIAPLAIFEFMEQCAIRLAKTVGYVSAGTVEYLYSQDGSFHFLELNPRLQVEHPCTEMIADVNLPAAQLQIAMGVPLHRLKDIRLLYGESPWGVTPISFETPSNPPLARGHVIAARITSENPDEGFKPSSGTVQELNFRSSKNVWGYFSVAATGGLHEFADSQFGHCFSWGENREEAISNMVVALKELSIRGDFRTTVEYLINLLETESFQNNDIDTGWLDYLIAEKVQAEKPDIMLGVVCGALNVADAMFRTCMTDFLHSLERGQVLPADSLLNLVDVELIYGGVKYILKVARQSLTMFVLIMNGCHIEIDAHRLNDGGLLLSYNGNSYTTYMKEEVDSYRITIGNKTCVFEKENDPTVLRSPSAGKLTQYTVEDGGHVEAGSSYAEMEVMKMIMTLNVQERGRVKYIKRPGAVLEAGCVVARLELDDPSKVHPAEPFTGELPAQQTLPILGEKLHQVFHSVLENLTNVMSGFCLPEPVFSIKLKEWVQKLMMTLRHPSLPLLELQEIMTSVAGRIPAPVEKSVRRVMAQYASNITSVLCQFPSQQIATILDCHAATLQRKADREVFFINTQSIVQLVQRYRSGIRGYMKTVVLDLLRRYLRVEHHFQQAHYDKCVINLREQFKPDMSQVLDCIFSHAQVAKKNQLVIMLIDELCGPDPSLSDELISILNELTQLSKSEHCKVALRARQILIASHLPSYELRHNQVESIFLSAIDMYGHQFCPENLKKLILSETTIFDVLPTFFYHANKVVCMASLEVYVRRGYIAYELNSLQHRQLPDGTCVVEFQFMLPSSHPNRMTVPISITNPDLLRHSTELFMDSGFSPLCQRMGAMVAFRRFEDFTRNFDEVISCFANVPKDTPLFSEARTSLYSEDDCKSLREEPIHILNVSIQCADHLEDEALVPILRTFVQSKKNILVDYGLRRITFLIAQEKEFPKFFTFRARDEFAEDRIYRHLEPALAFQLELNRMRNFDLTAVPCANHKMHLYLGAAKVKEGVEVTDHRFFIRAIIRHSDLITKEASFEYLQNEGERLLLEAMDELEVAFNNTSVRTDCNHIFLNFVPTVIMDPFKIEESVRYMVMRYGSRLWKLRVLQAEVKINIRQTTTGSAVPIRLFITNESGYYLDISLYKEVTDSRSGNIMFHSFGNKQGPQHGMLINTPYVTKDLLQAKRFQAQTLGTTYIYDFPEMFRQALFKLWGSPDKYPKDILTYTELVLDSQGQLVEMNRLPGGNEVGMVAFKMRFKTQEYPEGRDVIVIGNDITFRIGSFGPGEDLLYLRASEMARAEGIPKIYVAANSGARIGMAEEIKHMFHVAWVDPEDPHKGFKYLYLTPQDYTRISSLNSVHCKHIEEGGESRYMITDIIGKDDGLGVENLRGSGMIAGESSLAYEEIVTISLVTCRAIGIGAYLVRLGQRVIQVENSHIILTGASALNKVLGREVYTSNNQLGGVQIMHYNGVSHITVPDDFEGVYTILEWLSYMPKDNHSPVPIITPTDPIDREIEFLPSRAPYDPRWMLAGRPHPTLKGTWQSGFFDHGSFKEIMAPWAQTVVTGRARLGGIPVGVIAVETRTVEVAVPADPANLDSEAKIIQQAGQVWFPDSAYKTAQAVKDFNREKLPLMIFANWRGFSGGMKDMYDQVLKFGAYIVDGLRQYKQPILIYIPPYAELRGGSWVVIDATINPLCIEMYADKESRGGVLEPEGTVEIKFRKKDLIKSMRRIDPAYKKLMEQLGEPDLSDKDRKDLEGRLKAREDLLLPIYHQVAVQFADFHDTPGRMLEKGVISDILEWKTARTFLYWRLRRLLLEDQVKQEILQASGELSHVHIQSMLRRWFVETEGAVKAYLWDNNQVVVQWLEQHWQAGDGPRSTIRENITYLKHDSVLKTIRGLVEENPEVAVDCVIYLSQHISPAERAQVVHLLSTMDSPAST

SEQ ID NO: 6612 - protein, 530 aa, Homo sapiens
MSLKWTSVFLLIQLSCYFSSGSCGKVLVWPTEYSHWINMKTILEELVQRGHEVTVLTSSASTLVNASKSSAIKLEVYPTSLTKNYLEDSLLKILDRWIYGVSKNTFWSYFSQLQELCWEYYDYSNKLCKDAVLNKKLMMKLQESKFDVILADALNPCGELLAELFNIPFLYSLRFSVGYTFEKNGGGFLFPPSYVPVVMSELSDQMIFMERIKNMIHMLYFDFWFQIYDLKKWDQFYSEVLGRPTTLFETMGKAEMWLIRTYWDFEFPRPFLPNVDFVGGLHCKPAKPLPKEMEEFVQSSGENGIVVFSLGSMISNMSEESANMIASALAQIPQKVLWRFDGKKPNTLGSNTRLYKWLPQNDLLGHPKTKAFITHGGTNGIYEAIYHGIPMVGIPLFADQHDNIAHMKAKGAALSVDIRTMSSRDLLNALKSVINDPVYKENVMKLSRIHHDQPMKPLDRAVFWIEFVMRHKGAKHLRVAAHNLTWIQYHSLDVIAFLLACVATVIFIITKFCLFCFRKLAKKGKKKKRD

SEQ ID NO: 6613 - protein, 455 aa, Homo sapiens
MLHPETSPGRGHLLAVLLALLGTTWAEVWPPQLQEQAPMAGALNRKESFLLLSLHNRLRSWVQPPAADMRRLDWSDSLAQLAQARAALCGIPTPSLASGLWRTLQVGWNMQLLPAGLASFVEVVSLWFAEGQRYSHAAGECARNATCTHYTQLVWATSSQLGCGRHLCSAGQTAIEAFVCAYSPGGNWEVNGKTIIPYKKGAWCSLCTASVSGCFKAWDHAGGLCEVPRNPCRMSCQNHGRLNISTCHCHCPPGYTGRYCQVRCSLQCVHGRFREEECSCVCDIGYGGAQCATKVHFPFHTCDLRIDGDCFMVSSEADTYYRARMKCQRKGGVLAQIKSQKVQDILAFYLGRLETTNEVIDSDFETRNFWIGLTYKTAKDSFRWATGEHQAFTSFAFGQPDNHGLVWLSAAMGFGNCVELQASAAFNWNDQRCKTRNRYICQFAQEHISRWGPGS

SEQ ID NO: 6614 - protein, 191 aa, Homo sapiens
MQTIKCVVVGDGAVGKTCLLISYTTNKFPSEYVPTVFDNYAVTVMIGGEPYTLGLFDTAGQEDYDRLRPLSYPQTDVFLVCFSVVSPSSFENVKEKWVPEITHHCPKTPFLLVGTQIDLRDDPSTIEKLAKNKQKPITPETAEKLARDLKAVKYVECSALTQKGLKNVFDEAILAALEPPEPKKSRRCVLL

SEQ ID NO: 6615 - protein, 149 aa, Homo sapiens
MVFLTAQLWLRNRVTDRYFRIQEVLKHARHFRGRKNRCYRLAVRTVIRAFVKCTKARYLKKKNMRTLWINRITAASQEHGLKYPALIGNLVKCQVELNRKVLADLAIYEPKTFKSLAALASRRRHEGFAAALGDGKEPEGIFSRVVQYH

SEQ ID NO: 6616 - protein, 1047 aa, Homo sapiens
MALPSLLLLVAALAGGVRPPGARNLTLAVVLPEHNLSYAWAWPRVGPAVALAVEALGRALPVDLRFVSSELEGACSEYLAPLSAVDLKLYHDPDLLLGPGCVYPAASVARFASHWRLPLLTAGAVASGFSAKNDHYRTLVRTGPSAPKLGEFVVTLHGHFNWTARAALLYLDARTDDRPHYFTIEGVFEALQGSNLSVQHQVYAREPGGPEQATHFIRANGRIVYICGPLEMLHEILLQAQRENLTNGDYVFFYLDVFGESLRAGPTRATGRPWQDNRTREQAQALREAFQTVLVITYREPPNPEYQEFQNRLLIRAREDFGVELGPSLMNLIAGCFYDGILLYAEVLNETIQEGGTREDGLRIVEKMQGRRYHGVTGLVVMDKNNDRETDFVLWAMGDLDSGDFQPAAHYSGAEKQIWWTGRPIPWVKGAPPSDNPPCAFDLDDPSCDKTPLSTLAIVALGTGITFIMFGVSSFLIFRKLMLEKELASMLWRIRWEELQFGNSERYHKGAGSRLTLSLRGSSYGSLMTAHGKYQIFANTGHFKGNVVAIKHVNKKRIELTRQVLFELKHMRDVQFNHLTRFIGACIDPPNICIVTEYCPRGSLQDILENDSINLDWMFRYSLINDLVKGMAFLHNSIISSHGSLKSSNCVVDSRFVLKITDYGLASFRSTAEPDDSHALYAKKLWTAPELLSGNPLPTTGMQKADVYSFGIILQEIALRSGPFYLEGLDLSPKEIVQKVRNGQRPYFRPSIDRTQLNEELVLLMERCWAQDPAERPDFGQIKGFIRRFNKEGGTSILDNLLLRMEQYANNLEKLVEERTQAYLEEKRKAEALLYQILPHSVAEQLKRGETVQAEAFDSVTIYFSDIVGFTALSAESTPMQVVTLLNDLYTCFDAIIDNFDVYKVETIGDAYMVVSGLPGRNGQRHAPEIARMALALLDAVSSFRIRHRPHDQLRLRIGVHTGPVCAGVVGLKMPRYCLFGDTVNTASRMESNGQALKIHVSSTTKDALDELGCFQLELRGDVEMKGKGKMRTYWLLGERKGPPGLL

SEQ ID NO: 6617 - protein, 130 aa, Homo sapiens
MSGRGKQGGKARAKAKTRSSRAGLQFPVGRVHRLLRKGNYSERVGAGAPVYLAAVLEYLTAEILELAGNAARDNKKTRIIPRHLQLAIRNDEELNKLLGKVTIAQGGVLPNIQAVLLPKKTESHHKAKGK

SEQ ID NO: 6618 - protein, 3396 aa, Homo sapiens
MTAWLISLMSIEVLLLAVRHLSLHIEPEEGSLAGGTWITVIFDGLELGVLYPNNGSQLEIHLVNVNMVVPALRSVPCDVFPVFLDLPVVTCRTRSVLSEAHEGLYFLEAYFGGQLVSSPNPGPRDSCTFKFSKAQTPIVHQVYPPSGVPGKLIHVYGWIITGRLETFDFDAEYIDSPVILEAQGDKWVTPCSLINRQMGSCYPIQEDHGLGTLQCHVEGDYIGSQNVSFSVFNKGKSMVHKKAWLISAKQDLFLYQTHSEILSVFPETGSLGGRTNITITGDFFDNSAQVTIAGIPCDIRHVSPRKIECTTRAPGKDVRLTTPQPGNRGLLFEVGDAVEGLELTEATPGYRWQIVPNASSPFGFWSQEGQPFRARLSGFFVAPETNNYTFWIQADSQASLHFSWSEEPRTKVKVASISVGTADWFDSWEQNRDEGTWQQKTPKLELLGGAMYYLEAEHHGIAPSRGMRIGVQIHNTWLNPDVVTTYLREKHQIRVRAQRLPEVQVLNVSGRGNFFLTWDNVSSQPIPANATAHLIQTTIEELLAVKCKLEPLWSNILLRLGFERGPEVSNSDGDLTSGTEPFCGRFSLRQPRHLVLTPPAAQKGYRLDQYTHLCLAYKGHMNKILKMIVSFTIGFQNMVKNTTCDWSLTRTSPESWQFDCTDLWETCVRCFGDLQPPPANSPVLVHQINLLPLAQETGLFYVDEIIIADTNVTVSQADSGTARPGGNLVESVSVVGSPPVYSVTSWLAGCGTELPLITARSVPTEGTEEGSGLVLVTTQRRQRTSPPLGGHFRIQLPNTVISDVPVQISAHHLHQLLQNNADDFTSRYLNASDFTVKEDLYTCYEHVWTLSWSTQIGDLPNFIRVSDENLTGVNPAAATRVVYDGGVFLGPIFGDMLATANQHTQVVVRVNDVPAHCPGSCSFQYLQGSTPCVHSVWYSIDGDINLMIYITGTGFSGDSQFLQVTVNKTSCKVIFSNQTNVVCQTDLLPVGMHRILMLVRPSGLAISATGEDLFLNVKPRLDMVEPSRAADIGGLWATIRGSSLEGVSLILFGSYSCAINVATSNSSRIQCKVPPRGKDGRIVNVTVIRGDYSAVLPRAFTYVSSLNPVIVTLSRNISNIAGGETLVIGVARLMNYTDLDVEVHVQDALAPVHTQSAWGLEVALPPLPAGLHRISVSINGVSIHSQGVDLHIQYLTEVFSIEPCCGSLLGGTILSISGIGFSRDPALVWVLVGNRSCDIVNLTEASIWCETLPAPQIPDAGAPTVPAAVEVWAGNRFFARGPSPSLVGKGFTFMYEAAATPVVTAMQGEITNSSLSLHVGGSNLSNSVILLGNLNCDVETQSFQGNVSLSGCSIPLHSLEAGIYPLQVRQKQMGFANMSVVLQQFAVMPRIMAIFPSQGSACGGTILTVRGLLLNSRRRSVRVDLSGPFTCVILSLGDHTILCQVSLEGDPLPGASFSLNVTVLVNGLTSECQGNCTLFIREEASPVMDALSTNTSGSLTTVLIRGQRLATTADEPMVFVDDQLPCNVTFFNASHVVCQTRDLAPGPHYLSVFYTRNGYACSGNVSRHFYIMPQVFHYFPKNFSLHGGSLLTIEGTGLRGQNTTSVYIDQQTCLTVNIGAELIRCIVPTGNGSVALEIEVDGLWYHIGVIGYNKAFTPELISISQSDDILTFAVAQISGAANIDIFIGMSPCVGVSGNHTVLQCVVPSLPAGEYHVRGYDCIRGWASSALVFTSRVIITAVTENFGCLGGRLVHVFGAGFSPGNVSAAVCGAPCRVLANATVSAFSCLVLPLDVSLAFLCGLKREEDSCEAARHTYVQCDLTVAMATEQLLESWPYLYICEESSQCLFVPDHWAESMFPSFSGLFISPKLERDEVLIYNSSCNITMETEAEMECETPNQPITVKITEIRKRWGQNTQGNFSLQFCRRWSRTHSWFPERLPQDGDNVTVENGQLLLLDTNTSILNLLHIKGGKLIFMAPGPIELRAHAILVSDGGELRIGSEDKPFQGRAQITLYGSSYSTPFFPYGVKFLAVRNGTLSLHGSLPEVIVTCLRATAHALDTVLALEDAVDWNPGDEVVIISGTGVKGAKPMEEIVTVETVQDTDLYLKSPLRYSHNFTENWVAGEHHILKATVALLSRSITIQGNLTNEREKLLVSCQEANAPEGNLQHCLYSMSEKMLGSRDMGARVIVQSFPEEPSQVQLKGVQFQVLGQAFHKHLSSLTLVGAMRESFIQGCTVRNSFSRGLSMCGTLGLKVDSNVFYNILGHALLVGTCTEMRYISWEAIHGRKDDWSGHGNIIRNNVIIQVSGAEGLSNPEMLTPSGIYICSPTNVIEGNRVCGAGYGYFFHLMTNQTSQAPLLSFTQNIAHSCTRYGLFVYPKFQPPWDNVTGTTLFQSFTVWESAGGAQIFRSSNLRLKNFKVYSCRDFGIDVLESDANTSVTDSLLLGHFAHKGSLCMSSGIKTPKRWELMVSNTTFVNFDLINCVAIRTCSDCSQGQGGFTVKTSQLKFTNSSNLVAFPFPHAAILEDLDGSLSGKNRSHILASMETLSASCLVNSSFGRVVHGSACGGGVLFHRMSIGLANTPEVSYDLTMTDSRNKTTTVNYVRDTLSNPRGWMALLLDQETYSLQSENLWINRSLQYSATFDNFAPGNYLLLVHTDLPPYPDILLRCGSRVGLSFPFLPSPGQNQGCDWFFNSQLRQLTYLVSGEGQVQVILRVKEGMPPTISASTSAPESALKWSLPETWQGVEEGWGGYNNTIPGPGDDVLILPNRTVLVDTDLPFFKGLYVMGTLDFPVDRSNVLSVACMVIAGGELKVGTLENPLEKEQKLLILLRASEGVFCDRMNGIHIDPGTIGVYGKVHLYSAYPKNSWTHLGADIASGNERIIVEDAVDWRPHDKIVLSSSSYEPHEAEVLTVKEVKGHHVRIYERLKHRHIGSVHVTEDGRHIRLAAEVGLLTRNIQIQPDVSCRGRLFVGSFRKSSREEFSGVLQLLNVEIQNFGSPLYSSVEFSNVSAGSWIISSTLHQSCGGGIHAAASHGVLLNDNIVFGTAGHGIDLEGQAYTVTNNLVVLMTQPAWSTIWVAGIKVNQVKDINLHGNVVAGSERLGFHIRGHKCSSCELLWSDNVAHSSLHGLHLYKESGLDNCTRISGFLAFKNFDYGAMLHVENSVEIENITLVDNTIGLLAVVYVFSAPQNSVKKVQIVLRNSVIVATSSSFDCIQDKVKPHSANLTSTDRAPSNPRGGRIGILWPVFTSEPNQWPQEPWHKVRNDHSISGIMKLQDVTFSSFVKSCYSDDLDVCILPNAENSGIMHPITAERTRMLKIKDKNKFYFPSLQPRKDLGKVVCPELDCASPRKYLFKDLDGRALGLPPPVSVFPKTEAEWTASFFNAVTTEQALKISE

SEQ ID NO: 6619 - protein, 329 aa, Homo sapiens
MDGPVAEHAKQEPFHVVTPLLESWALSQVAGMPVFLKCENVQPSGSFKIRGIGHFCQEMAKKGCRHLVCSSGGNAGIAAAYAARKLGIPATIVLPESTSLQVVQRLQGEGAEVQLTGKVWDEANLRAQELAKRDGWENVPPFDHPLIWKGHASLVQELKAVLRTPPGALVLAVGGGGLLAGVVAGLLEVGWQHVPIIAMETHGAHCFNAAITAGKLVTLPDITSVAKSLGAKTVAARALECMQVCKIHSEVVEDTEAVSAVQQLLDDERMLVEPACGAALAAIYSGLLRRLQAEGCLPPSLTSVVVIVCGGNNINSRELQALKTHLGQV

SEQ ID NO: 6620 - protein, 466 aa, Homo sapiens
MKPPLLVFIVCLLWLKDSHCAPTWKDKTAISENLKSFSEVGEIDADEEVKKALTGIKQMKIMMERKEKEHTNLMSTLKKCREEKQEALKLLNEVQEHLEEEERLCRESLADSWGECRSCLENNCMRIYTTCQPSWSSVKNKIERFFRKIYQFLFPFHEDNEKDLPISEKLIEEDAQLTQMEDVFSQLTVDVNSLFNRSFNVFRQMQQEFDQTFQSHFISDTDLTEPYFFPAFSKEPMTKADLEQCWDIPNFFQLFCNFSVSIYESVSETITKMLKAIEDLPKQDKAPDHGGLISKMLPGQDRGLCGELDQNLSRCFKFHEKCQKCQAHLSEDCPDVPALHTELDEAIRLVNVSNQQYGQILQMTRKHLEDTAYLVEKMRGQFGWVSELANQAPETEIIFNSIQVVPRIHEGNISKQDETMMTDLSILPSSNFTLKIPLEESAESSNFIGYVVAKALQHFKEHFKTW

SEQ ID NO: 6621 - protein, 918 aa, Homo sapiens
MTTESGSDSESKPDQEAEPQEAAGAQGRAGAPVPEPPKEEQQQALEQFAAAAAHSTPVRREVTDKEQEFAARAAKQLEYQQLEDDKLSQKSSSSKLSRSPLKIVKKPKSMQCKVILLDGSEYTCDVEKRSRGQVLFDKVCEHLNLLEKDYFGLTYRDAENQKNWLDPAKEIKKQVRSGAWHFSFNVKFYPPDPAQLSEDITRYYLCLQLRDDIVSGRLPCSFVTLALLGSYTVQSELGDYDPDECGSDYISEFRFAPNHTKELEDKVIELHKSHRGMTPAEAEMHFLENAKKLSMYGVDLHHAKDSEGVEIMLGVCASGLLIYRDRLRINRFAWPKVLKISYKRNNFYIKIRPGEFEQFESTIGFKLPNHRAAKRLWKVCVEHHTFFRLLLPEAPPKKFLTLGSKFRYSGRTQAQTRRASALIDRPAPYFERSSSKRYTMSRSLDGASVNENHEIYMKDSMSAAEVGTGQYATTKGISQTNLITTVTPEKKAEEERDEEEDKRRKGEEVTPISAIRHEGKTDSERTDTAADGETTATESDQEEDAELKAQELEKTQDDLMKHQTNISELKRTFLETSTDTAVTNEWEKRLSTSPVRLAARQEDAPMIEPLVPEETKQSSGEKLMDGSEIFSLLESARKPTEFIGGVTSTSQSWVQKMETKTESSGIETEPTVHHLPLSTEKVVQETVLVEERRVVHASGDASYSAGDSGDAAAQPAFTGIKGKEGSALTEGAKEEGGEEVAKAVLEQEETAAASRERQEEQSAAIHISETLEQKPHFESSTVKTETISFGSVSPGGVKLEISTKEVPVVHTETKTITYESSQVDPGTDLEPGVLMSAQTITSETTSTTTTTHITKTVKGGISETRIEKRIVITGDADIDHDQALAQAIKEAKEQHPDMSVTKVVVHKETEITPEDGED

SEQ ID NO: 6622 - protein, 1709 aa, Homo sapiens
MGFLPKLLLLASFFPAGQASWGVSSPQDVQGVKGSCLLIPCIFSFPADVEVPDGITAIWYYDYSGQRQVVSHSADPKLVEARFRGRTEFMGNPEHRVCNLLLKDLQPEDSGSYNFRFEISEVNRWSDVKGTLVTVTEEPRVPTIASPVELLEGTEVDFNCSTPYVCLQEQVRLQWQGQDPARSVTFNSQKFEPTGVGHLETLHMAMSWQDHGRILRCQLSVANHRAQSEIHLQVKYAPKGVKILLSPSGRNILPGELVTLTCQVNSSYPAVSSIKWLKDGVRLQTKTGVLHLPQAAWSDAGVYTCQAENGVGSLVSPPISLHIFMAEVQVSPAGPILENQTVTLVCNTPNEAPSDLRYSWYKNHVLLEDAHSHTLRLHLATRADTGFYFCEVQNVHGSERSGPVSVVVNHPPLTPVLTAFLETQAGLVGILHCSVVSEPLATLVLSHGGHILASTSGDSDHSPRFSGTSGPNSLRLEIRDLEETDSGEYKCSATNSLGNATSTLDFHANAARLLISPAAEVVEGQAVTLSCRSGLSPTPDARFSWYLNGALLHEGPGSSLLLPAASSTDAGSYHCRARDGHSASGPSSPAVLTVLYPPRQPTFTTRLDLDAAGAGAGRRGLLLCRVDSDPPARLQLLHKDRVVATSLPSGGGCSTCGGCSPRMKVTKAPNLLRVEIHNPLLEEEGLYLCEASNALGNASTSATFNGQATVLAIAPSHTLQEGTEANLTCNVSREAAGSPANFSWFRNGVLWAQGPLETVTLLPVARTDAALYACRILTEAGAQLSTPVLLSVLYPPDRPKLSALLDMGQGHMALFICTVDSRPLALLALFHGEHLLATSLGPQVPSHGRFQAKAEANSLKLEVRELGLGDSGSYRCEATNVLGSSNTSLFFQVRGAWVQVSPSPELQEGQAVVLSCQVHTGVPEGTSYRWYRDGQPLQESTSATLRFAAITLTQAGAYHCQAQAPGSATTSLAAPISLHVSYAPRHVTLTTLMDTGPGRLGLLLCRVDSDPPAQLRLLHGDRLVASTLQGVGGPEGSSPRLHVAVAPNTLRLEIHGAMLEDEGVYICEASNTLGQASASADFDAQAVNVQVWPGATVREGQLVNLTCLVWTTHPAQLTYTWYQDGQQRLDAHSIPLPNVTVRDATSYRCGVGPPGRAPRLSRPITLDVLYAPRNLRLTYLLESHGGQLALVLCTVDSRPPAQLALSHAGRLLASSTAASVPNTLRLELRGPQPRDEGFYSCSARSPLGQANTSLELRLEGVRVILAPEAAVPEGAPITVTCADPAAHAPTLYTWYHNGRWLQEGPAASLSFLVATRAHAGAYSCQAQDAQGTRSSRPAALQVLYAPQDAVLSSFRDSRARSMAVIQCTVDSEPPAELALSHDGKVLATSSGVHSLASGTGHVQVARNALRLQVQDVPAGDDTYVCTAQNLLGSISTIGRLQVEGARVVAEPGLDVPEGAALNLSCRLLGGPGPVGNSTFAWFWNDRRLHAEPVPTLAFTHVARAQAGMYHCLAELPTGAAASAPVMLRVLYPPKTPTMMVFVEPEGGLRGILDCRVDSEPLASLTLHLGSRLVASSQPQGAPAEPHIHVLASPNALRVDIEALRPSDQGEYICSASNVLGSASTSTYFGVRALHRLHQFQQLLWVLGLLVGLLLLLLGLGACYTWRRRRVCKQSMGENSVEMAFQKETTQLIDPDAATCETSTCAPPLG

SEQ ID NO: 6623 - protein, 573 aa, Homo sapiens
MYDNMSTMVYIKEDKLEKLTQDEIISKTKQVIQGLEALKNEHNSILQSLLETLKCLKKDDESNLVEEKSNMIRKSLEMLELGLSEAQVMMALSNHLNAVESEKQKLRAQVRRLCQENQWLRDELANTQQKLQKSEQSVAQLEEEKKHLEFMNQLKKYDDDISPSEDKDTDSTKEPLDDLFPNDEDDPGQGIQQQHSSAAAAAQQGGYEIPARLRTLHNLVIQYASQGRYEVAVPLCKQALEDLEKTSGHDHPDVATMLNILALVYRDQNKYKDAANLLNDALAIREKTLGKDHPAVAATLNNLAVLYGKRGKYKEAEPLCKRALEIREKVLGKDHPDVAKQLNNLALLCQNQGKYEEVEYYYQRALEIYQTKLGPDDPNVAKTKNNLASCYLKQGKFKQAETLYKEILTRAHEREFGSVDDENKPIWMHAEEREECKGKQKDGTSFGEYGGWYKACKVDSPTVTTTLKNLGALYRRQGKFEAAETLEEAAMRSRKQGLDNVHKQRVAEVLNDPENMEKRRSRESLNVDVVKYESGPDGGEEVSMSVEWNGGVSGRASFCGKRQQQQWPGRRHR

SEQ ID NO: 6624 - protein, 489 aa, Homo sapiens
MAVLLLLLRALRRGPGPGPRPLWGPGPAWSPGFPARPGRGRPYMASRPPGDLAEAGGRALQSLQLRLLTPTFEGINGLLLKQHLVQNPVRLWQLLGGTFYFNTSRLKQKNKEKDKSKGKAPEEDEEERRRRERDDQMYRERLRTLLVIAVVMSLLNALSTSGGSISWNDFVHEMLAKGEVQRVQVVPESDVVEVYLHPGAVVFGRPRLALMYRMQVANIDKFEEKLRAAEDELNIEAKDRIPVSYKRTGFFGNALYSVGMTAVGLAILWYVFRLAGMTGREGGFSAFNQLKMARFTIVDGKMGKGVSFKDVAGMHEAKLEVREFVDYLKSPERFLQLGAKVPKGALLLGPPGCGKTLLAKAVATEAQVPFLAMAGPEFVEVIGGLGAARVRSLFKEARARAPCIVYIDEIDAVGKKRSTTMSGFSNTEEEQTLNQLLVEMDGASLDQLPSQGTMRKLRGKTPACSCLTEPTGSRRAMEGHSLCWGCLLH

SEQ ID NO: 6625 - protein, 794 aa, Homo sapiens
MAGWIQAQQLQGDALRQMQVLYGQHFPIEVRHYLAQWIESQPWDAIDLDNPQDRAQATQLLEGLVQELQKKAEHQVGEDGFLLKIKLGHYATQLQKTYDRCPLELVRCIRHILYNEQRLVREANNCSSPAGILVDAMSQKHLQINQTFEELRLVTQDTENELKKLQQTQEYFIIQYQESLRIQAQFAQLAQLSPQERLSRETALQQKQVSLEAWLQREAQTLQQYRVELAEKHQKTLQLLRKQQTIILDDELIQWKRRQQLAGNGGPPEGSLDVLQSWCEKLAEIIWQNRQQIRRAEHLCQQLPIPGPVEEMLAEVNATITDIISALVTSTFIIEKQPPQVLKTQTKFAATVRLLVGGKLNVHMNPPQVKATIISEQQAKSLLKNENTRNECSGEILNNCCVMEYHQATGTLSAHFRNMSLKRIKRADRRGAESVTEEKFTVLFESQFSVGSNELVFQVKTLSLPVVVIVHGSQDHNATATVLWDNAFAEPGRVPFAVPDKVLWPQLCEALNMKFKAEVQSNRGLTKENLVFLAQKLFNNSSSHLEDYSGLSVSWSQFNRENLPGWNYTFWQWFDGVMEVLKKHHKPHWNDGAILGFVNKQQAHDLLINKPDGTFLLRFSDSEIGGITIAWKFDSPERNLWNLKPFTTRDFSIRSLADRLGDLSYLIYVFPDRPKDEVFSKYYTPVLAKAVDGYVKPQIKQVVPEFVNASADAGGSSATYMDQAPSPAVCPQAPYNMYPQNPDHVLDQDGEFDLDETMDVARHVEELLRRPMDSLDSRLSPPAGLFTSARGSLS

SEQ ID NO: 6626 - protein, 143 aa, Homo sapiens
MSGGRRKEEPPQPQLANGALKVSVWSKVLRSDAAWEDKDEFLDVIYWFRQIIAVVLGVIWGVLPLRGFLGIAGSFGSSFTLPSIMTDGVQLPSAPYPVQRTLLITAQELDRWGTPAPWNLEDPCFLDRESVCWASVFSARVVT

SEQ ID NO: 6627 - protein, 628 aa, Homo sapiens
MDSGSSSSDSAPDCWDQVDMESPGSAPSGDGVSSAVAEAQREPLSSAFSRKLNVNAKPFVPNVHAAEFVPSFLRGPTQPPTLPAGSGSNDETCTGAGYPQGKRMGRGAPVEPSREEPLVSLEGSNSAVTMELSEPVVENGEVEMALEESWEHSKEVSEAEPGGGSSGDSGPPEESGQEMMEEKEEIRKSKSVIVPSGAPKKEHVNVVFIGHVDAGKSTIGGQIMFLTGMVDKRTLEKYEREAKEKNRETWYLSWALDTNQEERDKGKTVEVGRAYFETERKHFTILDAPGHKSFVPNMIGGASQADLAVLVISARKGEFETGFEKGGQTREHAMLAKTAGVKHLIVLINKMDDPTVNWSIERYEECKEKLVPFLKKVGFSPKKDIHFMPCSGLTGANIKEQSDFCPWYTGLPFIPYLDNLPNFNRSIDGPIRLPIVDKYKDMGTVVLGKLESGSIFKGQQLVMMPNKHNVEVLGILSDDTETDFVAPGENLKIRLKGIEEEEILPGFILCDPSNLCHSGRTFDVQIVIIEHKSIICPGYNAVLHIHTCIEEVEITALISLVDKKSGEKSKTRPRFVKQDQVCIARLRTAGTICLETFKDFPQMGRFTLRDEGKTIAIGKVLKLVPEKD

SEQ ID NO: 6628 - protein, 423 aa, Homo sapiens
MAQAVWSRLGRILWLACLLPWAPAGVAAGLYELNLTTDSPATTGAVVTISASLVAKDNGSLALPADAHLYRFHWIHTPLVLTGKMEKGLSSTIRVVGHVPGEFPVSVWVTAADCWMCQPVARGFVVLPITEFLVGDLVVTQNTSLPWPSSYLTKTVLKVSFLLHDPSNFLKTALFLYSWDFGDGTQMVTEDSVVYYNYSIIGTFTVKLKVVAEWEEVEPDATRAVKQKTGDFSASLKLQETLRGIQVLGPTLIQTFQKMTVTLNFLGSPPLTVCWRLKPECLPLEEGECHPVSVASTAYNLTHTFRDPGDYCFSIRAENIISKTHQYHKIQVWPSRIQPAVFAFPCATLITVMLAFIMYMTLRNATQQKDMVENPEPPSGVRCCCQMCCGPFLLETPSEYLEIVRENHGLLPPLYKSVKTYTV

SEQ ID NO: 6629 - protein, 292 aa, Homo sapiens
MLTPPLLLLLPLLSALVAAAIDAPKTCSPKQFACRDQITCISKGWRCDGERDCPDGSDEAPEICPQSKAQRCQPNEHNCLGTELCVPMSRLCNGVQDCMDGSDEGPHCRELQGNCSRLGCQHHCVPTLDGPTCYCNSSFQLQADGKTCKDFDECSVYGTCSQLCTNTDGSFICGCVEGYLLQPDNRSCKAKNEPVDRPPVLLIANSQNILATYLSGAQVSTITPTSTRQTTAMDFSYANETVCWVHVGDSAAQTQLKCARMPGLKGFVDEHTINISLSLHLCVFSKSQQEMG

SEQ ID NO: 6630 - protein, 99 aa, Homo sapiens
MPKRKSPENTEGKDGSKVTKQEPTRRSARLSAKPAPPKPEPKPRKTSAKKEPGAKISRGAKGKKEEKQEAGKEGTAPSENGETKAEEAQKTESVDNEGE

SEQ ID NO: 6631 - protein, 312 aa, Homo sapiens
MAAGQNGHEEWVGSAYLFVESSLDKVVLSDAYAHPQQKVAVYRALQAALAESGGSPDVLQMLKIHRSDPQLIVQLRFCGRQPCGRFLRAYREGALRAALQRSLAAALAQHSVPLQLELRAGAERLDALLADEERCLSCILAQQPDRLRDEELAELEDALRNLKCGSGARGGDGEVASAPLQPPVPSLSEVKPPPPPPPAQTFLFQGQPVVNRPLSLKDQQTFARSVGLKWRKVGRSLQRGCRALRDPALDSLAYEYEREGLYEQAFQLLRRFVQAEGRRATLQRLVEALEENELTSLAEDLLGLTDPNGGLA

SEQ ID NO: 6632 - protein, 1246 aa, Homo sapiens [sequence omitted]

SEQ ID NO: 6633 - protein, 445 aa, Homo sapiens
MREIVHLQAGQCGNQIGAKFWEVISDEHGIDPTGTYHGDSDLQLERINVYYNEATGGKYVPRAVLVDLEPGTMDSVRSGPFGQIFRPDNFVFGQSGAGNNWAKGHYTEGAELVDSVLDVVRKEAESCDCLQGFQLTHSLGGGTGSGMGTLLISKIREEYPDRIMNTFSVVPSPKVSDTVVEPYNATLSVHQLVENTDETYCIDNEALYDICFRTLKLTTPTYGDLNHLVSATMSGVTTCLRFPGQLNADLRKLAVNMVPFPRLHFFMPGFAPLTSRGSQQYRALTVPELTQQMFDAKNMMAACDPRHGRYLTVAAVFRGRMSMKEVDEQMLNVQNKNSSYFVEWIPNNVKTAVCDIPPRGLKMSATFIGNSTAIQELFKRISEQFTAMFRRKAFLHWYTGEGMDEMEFTEAESNMNDLVSEYQQYQDATAEEEGEFEEEAEEEVA

SEQ ID NO: 6634 - protein, 431 aa, Homo sapiens
MDPAVALVLCLSCLFLLSLWRQSSGRGRLPSGPTPLPIIGNILQLDVKDMSKSLTNFSKVYGPVFTVYFGLKPIVVLHGYEAVKEALIDHGEEFSGRGSFPVAEKVNKGLGILFSNGKRWKEIRRFCLMTLRNFGMGKRSIEDRVQEEARCLVEELRKTNASPCDPTFILGCAPCNVICSVIFHDRFDYKDQRFLNLMEKFNENLRILSSPWIQEKHNQQSEFTVESLIATVTDMFGAGTETTSTTLRYGLLLLLKYPEVTAKVQEEIECVVGRNRSPCMQDRSHMPYTDAVVHEIQRYIDLLPTNLPHAVTCDVKFKNYLIPKGTTIITSLTSVLHNDKEFPNPEMFDPGHFLDKSGNFKKSDYFMPFSAGKRMCMGEGLARMELFLFLTTILQNFNLKSQVDPKDIDITPIANAFGRVPPLYQLCFIPV

SEQ ID NO: 6635 - protein, 199 aa, Homo sapiens
MVLLRLLVFLFAPVVSDLCSLPCFINVSESQGPGTVLQFLSFNCSSYTPTPTLELLNVQPPTTFFNPPSLARWQGTYVGKLTLSSSAQLDALMVNHYKVQLKFTCGNHVMEGSLSVDVQRDLSHIQCAGQFASPGEARGSRQGGGRHGLSRSSLTSTLASWGNDSGARDSHTWGSAVHSAPPRPRTPRSAGKPRTWDGG

SEQ ID NO: 6636 - protein, 429 aa, Homo sapiens
MAQPGTLNLNNEVVKMRKEVKRIRVLVIRKLVRSVGRLKSKKGTEDALLKNQRRAQRLLEEIHAMKELKPDIVTKSALGDDINFEKIFKKPDSTATERAIARLAVHPLLKKKIDVLKAAVQAFKEARQNVAEVESSKNASEDNHSENTLYSNDNGSNLQREATVISEQKVKETKILAKKPIHNSKEKIAKMEHGPKAVTIANSPSKPSEKDSVVSLESQKTPADPKLKTLSQTKKNKGSDSSLSGNSDGGEEFCEEEKEYFDDSTEERFYKQSSMSEDSDSGDDFFIGKVRRTRKKESSCHSSVKEQKPLEKVFLKEDTGETHGDTRNDKIKPSTETRKLESVFFHSLSGSKSSRRNFKEQAPKTRSLDFPQNEPQIKNQFNKKLSGRLENTKQQLQLPLHPSWEASRRRKEQQSNIAVFQGKKITFDD

SEQ ID NO: 6637 - protein, 1351 aa, Homo sapiens
MELLPPLPQSFLLLLLLPAKPAAGEDWQCPRTPYAASRDFDVKYVVPSFSAGGLVQAMVTYEGDRNESAVFVAIRNRLHVLGPDLKSVQSLATGPAGDPGCQTCAACGPGPHGPPGDTDTKVLVLDPALPALVSCGSSLQGRCFLHDLEPQGTAVHLAAPACLFSAHHNRPDDCPDCVASPLGTRVTVVEQGQASYFYVASSLDAAVAASFSPRSVSIRRLKADASGFAPGFVALSVLPKHLVSYSIEYVHSFHTGAFVYFLTVQPASVTDDPSALHTRLARLSATEPELGDYRELVLDCRFAPKRRRRGAPEGGQPYPVLRVAHSAPVGAQLATELSIAEGQEVLFGVFVTGKDGGPGVGPNSVVCAFPIDLLDTLIDEGVERCCESPVHPGLRRGLDFFQSPSFCPNPPGLEALSPNTSCRHFPLLVSSSFSRVDLFNGLLGPVQVTALYVTRLDNVTVAHMGTMDGRILQVELVRSLNYLLYVSNFSLGDSGQPVQRDVSRLGDHLLFASGDQVFQVPIQGPGCRHFLTCGRCLRAWHFMGCGWCGNMCGQQKECPGSWQQDHCPPKLTEFHPHSGPLRGSTRLTLCGSNFYLHPSGLVPEGTHQVTVGQSPCRPLPKDSSKLRPVPRKDFVEEFECELEPLGTQAVGPTNVSLTVTNMPPGKHFRVDGTSVLRGFSFMEPVLIAVQPLFGPRAGGTCLTLEGQSLSVGTSRAVLVNGTECLLARVSEGQLLCATPPGATVASVPLSLQVGGAQVPGSWTFQYREDPVVLSISPNCGYINSHITICGQHLTSAWHLVLSFHDGLRAVESRCERQLPEQQLCRLPEYVVRDPQGWVAGNLSARGDGAAGFTLPGFRFLPPPHPPSANLVPLKPEEHAIKFEVCVDGECHILGRVVRPGPDGVPQSTLLGILLPLLLLVAALATALVFSYWWRRKQLVLPPNLNDLASLDQTAGATPLPILYSGSDYRSGLALPAIDGLDSTTCVHGASFSDSEDESCVPLLRKESIQLRDLDSALLAEVKDVLIPHERVVTHSDRVIGKGHFGVVYHGEYIDQAQNRIQCAIKSLSRITEMQQVEAFLREGLLMRGLNHPNVLALIGIMLPPEGLPHVLLPYMCHGDLLQFIRSPQRNPTVKDLISFGLQVARGMEYLAEQKFVHRDLAARNCMLDESFTVKVADFGLARDILDREYYSVQQHRHARLPVKWMALESLQTYRFTTKSDVWSFGVLLWELLTRGAPPYRHIDPFDLTHFLAQGRRLPQPEYCPDSLYQVMQQCWEADPAVRPTFRVLVGEVEQIVSALLGDHYVQLPATYMNLGPSTSHEMNVRPEQPQFSPMPGNVRRPRPLSEPPRPT

SEQ ID NO: 6638 - protein, 440 aa, Homo sapiens
MAENNENISKNVDVRPKTSRSRSADRKDGYVWSGKKLSWSKKSESYSDAETVNGIEKTEVSLRNQERKHSCSSIELDLDHSCGHRFLGRSLKQKLQDAVGQCFPIKNCSSRHSSGLPSKRKIHISELMLDKCPFPPRSDLAFRWHFIKRHTAPINSKSDEWVSTDLSQTELRDGQLKRRNMEENINCFSHTNVQPCVITTDNALCREGPMTGSVMNLVSNNSIEDSDMDSDDEILTLCTSSRKRNKPKWDLDDEILQLETPPKYHTQIDYVHCLVPDLLQINNNPCYWGVMDKYAAEALLEGKPEGTFLLRDSAQEDYLFSVSFRRYSRSLHARIEQWNHNFSFDAHDPCVFHSPDITGLLEHYKDPSACMFFEPLLSTPLIRTFPFSLQHICRTVICNCTTYDGIDALPIPSSMKLYLKEYHYKSKVRVLRIDAPEQQC

SEQ ID NO: 6639 - protein, 973 aa, Homo sapiens
MSPVRRWGSPCLFPLQLFSLCWVLSVAQSKTVRYSTFEEDAPGTVIGTLAEDLHMKVSGDTSFRLMKQFNSSLLRVREGDGQLTVGDAGLDRERLCGQAPQCVLAFDVVSFSQEQFRLVHVEVEVRDVNDHAPRFPRAQIPVEVSEGAAVGTRIPLEVPVDEDVGANGLQTVRLAEPHSPFRVELQTRADGAQCADLVLLQELDRESQAAYSLELVAQDGGRPPRSATAALSVRVLDANDHSPAFPQGAVAEVELAEDAPVGSLLLDLDAADPDEGPNGDVVFAFGARTPPEARRLFRLDPRSGRLTLAGPVDYERQDTYELDVRAQDRGPGPRAATCKVIVRIRDVNDNAPDIAITPLAAPGAPATSPFAAAAAAAALGGADASSPAGAGTPEAGATSLVPEGAARESLVALVSTSDRDSGANGQVRCALYGHEHFRLQPAYAGSYLVVTAASLDRERIAEYNLTLVAEDRGAPPLRTVRPYTVRVGDENDNAPLFTRPVYEVSVRENNPPGAYLATVAARDRDLGRNGQVTYRLLEAEVGRAGGAVSTYVSVDPATGAIYALRSFDYETLRQLDVRIQASDGGSPQLSSSALVQVRVLDQNDHAPVLVHPAPANGSLEVAVPGRTAKDTVVARVQARDADEGANGELAFELQQQEPREAFAIGRRTGEILLTGDLSQEPPGRVFRALLVISDGGRPPLTTTATVSFVVTAGGGRGPAAPASAGSPERSRPPGSRLGVSGSVLQWDTPLIVIIVLAGSCTLLLAAIIAIATTCNRRKKEPYGASPGFGKEPAPPVAVWKGHSFNTISGREAEKFSGKDSGKGDSDFNDSDSDISGDALKKDLINHMQSGLWACTAECKILGHSDRCWSPSCSGPNAHPSPHPPAQMSTFCKSTSLPRDPLRRDNYYQAQLPKTVGLQSVYEKVLHRDYDRTVTLLSPPRPGRLPDLQEIGVPLYQSPPGRYLSPKKGANENV

SEQ ID NO: 6640 - protein, 942 aa, Homo sapiens
MKRRAGLGGSMRSVVGFLSQRGLHGDPLLTQDFQRRRLRGCRNLYKKDLLGHFGCVNAIEFSNNGGQWLVSGGDDRRVLLWHMEQAIHSRVKPIQLKGEHHSNIFCLAFNSGNTKVFSGGNDEQVILHDVESSETLDVFAHEDAVYGLSVSPVNDNIFASSSDDGRVLIWDIRESPHGEPFCLANYPSAFHSVMFNPVEPRLLATANSKEGVGLWDIRKPQSSLLRYGGNLSLQSAMSVRFNSNGTQLLALRRRLPPVLYDIHSRLPVFQFDNQGYFNSCTMKSCCFAGDRDQYILSGSDDFNLYMWRIPADPEAGGIGRVVNGAFMVLKGHRSIVNQVRFNPHTYMICSSGVEKIIKIWSPYKQPGCTGDLDGRIEDDSRCLYTHEEYISLVLNSGSGLSHDYANQSVQEDPRMMAFFDSLVRREIEGWSSDSDSDLSESTILQLHAGVSERSGYTDSESSASLPRSPPPTVDESADNAFHLGPLRVTTTNTVASTPPTPTCEDAASRQQRLSALRRYQDKRLLALSNESDSEENVCEVELDTDLFPRPRSPSPEDESSSSSSSSSSEDEEELNERRASTWQRNAMRRRQKTTREDKPSAPIKPTNTYIGEDNYDYPQIKVDDLSSSPTSSPERSTSTLEIQPSRASPTSDIESVERKIYKAYKWLRYSYISYSNNKDGETSLVTGEADEGRAGTSHKDNPAPSSSKEACLNIAMAQRNQDLPPEGCSKDTFKEETPRTPSNGPGHEHSSHAWAEVPEGTSQDTGNSGSVEHPFETKKLNGKALSSRAEEPPSPPVPKASGSTLNSGSGNCPRTQSDDSEERSLETICANHNNGRLHPRPPHPHNNGQNLGELEVVAYSSPGHSDTDRDNSSLTGTLLHKDCCGSEMACETPNAGTREDPTDTPATDSSRAVHGHSGLKRQRIELEDTDSENSSSEKKLKT

SEQ ID NO: 6641 - protein, 383 aa, Homo sapiens
MEALGKLKQFDAYPKTLEDFRVKTCGGATVTIVSGLLMLLLFLSELQYYLTTEVHPELYVDKSRGDKLKINIDVLFPHMPCAYLSIDAMDVAGEQQLDVEHNLFKQRLDKDGIPVSSEAERHELGKVEVTVFDPDSLDPDRCESCYGAEAEDIKCCNTCEDVREAYRRRGWAFKNPDTIEQCRREGFSQKMQEQKNEGCQVYGFLEVNKVAGNFHFAPGKSFQQSHVHVHDLQSFGLDNINMTHYIQHLSFGEDYPGIVNPLDHTNVTAPQASMMFQYFVKVVPTVYMKVDGEVLRTNQFSVTRHEKVANGLLGDQGLPGVFVLYELSPMMVKLTEKHRSFTHFLTGVCAIIGGMFTVAGLIDSLIYHSARAIQKKIDLGKTT

SEQ ID NO: 6642 - protein, 381 aa, Homo sapiens
MLLSIGMLMLSATQVYTILTVQLFAFLNLLPVEADILAYNFENASQTFDDLPARFGYRLPAEGLKGFLINSKPENACEPIVPPPVKDNSSGTFIVLIRRLDCNFDIKVLNAQRAGYKAAIVHNVDSDDLISMGSNDIEVLKKIDIPSVFIGESSANSLKDEFTYEKGGHLILVPEFSLPLEYYLIPFLIIVGICLILIVIFMITKFVQDRHRARRNRLRKDQLKKLPVHKFKKGDEYDVCAICLDEYEDGDKLRILPCSHAYHCKCVDPWLTKTKKTCPVCKQKVVPSQGDSDSDTDSSQEENEVTEHTPLLRPLASVSAQSFGALSESRSHQNMTESSDYEEDDNEDTDSSDAENEINEHDVVVQLQPNGERDYNIANTV

SEQ ID NO: 6643 - protein, 183 aa, Homo sapiens
MQPWALPTVGELWVCGRPGAALRWSLVLSPRLEPSGVISAHCNLHLLASSDSSASASRLCQRVMMPSRTNLATGIPSSKVKYSRLSSTDDGYIDLQFKKTPPKIPYKAIALATVLFLIGAFLIIIGSLLLSGYISKGGADRAVPVLIIGILVFLPGFYHLRIAYYASKGYRGYSYDDIPDFDD

SEQ ID NO: 6644 - protein, 1188 aa, Homo sapiens
MKKKQTVQGTFSKLFGKKHTTTPSTSLYATNPPWIFTQEAPEEGTGGFDGIYYGDNRFNTVSESGTATLKARPRVRPLLTFLPLNAQENHGLAVPTPSVPDDFADKEVTGTSSLVNGNLRLYSSVGDLRPGQYGQDLLIPPPPPGPAPGPPQDISEPPGGSPLPSPPSTAPPPPPLLLEPPPPPSMAPPPPPVLEALSPPHTLSSPSIPTPPDFIPPAPPLAFLAPPPPPVPAPAPPAPASPHTVGTRLFPPGGVTKWKSDVALNGRQAEATRASPPRSPAEPKGSALGPNPEPHLTFPRSFKVPPPTPVRTSSIPVQEAQEAPRKEEGATKKAPSRLPLPPSFHIRPASQVYPDRAPEPDCPGELKATAPASPRLGQSQSQADERAGTPPPAPPLPPPAPPLPPPAPPLPPAAPPLPCAQKAAHPPAGFTKTPKSSSPALKPKPNPPSPENTASSAPVDWRDPSQMEKLRNELAAYLCGSRREDRFLSHRPGPTVAPQSKEGKKGPRLPEKETLLSLPAKDTPPGVPEKSLGGSSLTETEAAPSLTLPSVDYIPQDSPTPSVRQIRNELEARLSSAAEKEAKPSIGSLPPKPRLEGGRICENGADDDKLSKPVAKNLPPQSTTLLPTTSLQPKAMLGPAIPPKATPEPAIPPKATLWPATPPKATLGPATPLKATSGPTTPLKATSGPAIASTATTLPTTTSQLMAEKDSGPAGQPEKPASQEVSTPSQARGEGSPSEATRLPTQGARSSAAFPPKTSPGGGEVPCLYKPHCHQSSLSREVAVVMPTLARGGAAGPGEPVEVKEPPGLPAKPPASAQPTDELLRHPVTGEVVERGSPMALLLAARQRAQKGRSVGAALGRSSLPGSLRDHSHQAEASSDSIFHSQGTPNSFTVVPKLPKEAEKDSPLTTEIPNKWGPRLGRDAEGTELSRRHNWTKPEPQAPVAWERVAPSNLPQGHPLPKSFSSPPSPSNKREEEEEEFNFEVIPPPPEFSNDPEPPAPALQYLGRQSSPPRNNYSDLRQLPNAGPGAPPALGFSRFPAGARYAGAGGLERFSGGGRSLIKKRLYVGEPHRGPGLPHGGTGRSLSSPNCFGPQPGGPEMRRVNSAGRAPPGGLHAPRLSLEGAARGAAEAKHKAPGSADYGFAPAAGRSPYTTTRYGSPINTFTVRPGTRHPISYVCSGAHRKATS

SEQ ID NO: 6645 - protein, 1288 aa, Homo sapiens
MPRKGTQPSTARRREEGPPPPSPDGASSDAEPEPPSGRTESPATAAETASEELDNRSLEEILNSIPPPPPPAMTNEAGAPRLMITHIVNQNFKSYAGEKILGPFHKRFSCIIGPNGSGKSNVIDSMLFVFGYRAQKIRSKKLSVLIHNSDEHKDIQSCTVEVHFQKIIDKEGDDYEVIPNSNFYVSRTACRDNTSVYHISGKKKTFKDVGNLLRSHGIDLDHNRFLILQGEVEQIAMMKPKGQTEHDEGMLEYLEDIIGCGRLNEPIKVLCRRVEILNEHRGEKLNRVKMVEKEKDALEGEKNIAIEFLTLENEIFRKKNHVCQYYIYELQKRIAEMETQKEKIHEDTKEINEKSNILSNEMKAKNKDVKDTEKKLNKITKFIEENKEKFTQLDLEDVQVREKLKHATSKAKKLEKQLQKDKEKVEEFKSIPAKSNNIINETTTRNNALEKEKEKEEKKLKEVMDSLKQETQGLQKEKESREKELMGFSKSVNEARSKMDVAQSELDIYLSRHNTAVSQLTKAKEALIAASETLKERKAAIRDIEGKLPQTEQELKEKEKELQKLTQEETNFKSLVHDLFQKVEEAKSSLAMNRSRGKVLDAIIQEKKSGRIPGIYGRLGDLGAIDEKYDVAISSCCHALDYIVVDSIDIAQECVNFLKRQNIGVATFIGLDKMAVWAKKMTEIQTPENTPRLFDLVKVKDEKIRQAFYFALRDTLVADNLDQATRVAYQKDRRWRVVTLQGQIIEQSGTMTGGGSKVMKGRMGSSLVIEISEEEVNKMESQLQNDSKKAMQIQEQKVQLEERVVKLRHSEREMRNTLEKFTASIQRLIEQEEYLNVQVKELEANVLATAPDKKKQKLLEENVSAFKTEYDAVAEKAGKVEAEVKRLHNTIVEINNHKLKAQQDKLDKINKQLDECASAITKAQVAIKTADRNLQKAQDSVLRTEKEIKDTEKEVDDLTAELKSLEDKAAEVVKNTNAAEESLPEIQKEHRNLLQELKVIQENEHALQKDALSIKLKLEQIDGHIAEHNSKIKYWHKEISKISLHPIEDNPIEEISVLSPEDLEAIKNPDSITNQIALLEARCHEMKPNLGAIAEYKKKEELYLQRVAELDKITYERDSFRQAYEDLRKQRLNEFMAGFYIITNKLKENYQMLTLGGDAELELVDSLDPFSEGIMFSVRPPKKSWKKIFNLSGGEKTLSSLALVFALHHYKPTPLYFMDEIDAALDFKNVSIVAFYIYEQTKNAQFIIISLRNNMFEISDRLIGIYKTYNITKSVAVNPKEIASKGLC

SEQ ID NO: 6646 - protein, 398 aa, Homo sapiens
MRKRTEPVALEHERCAAAGSSSSGSAAAALDADCRLKQNLRLTGPAAAEPRCAADAGMKRALGRRKGVWLRLRKILFCVLGLYIAIPFLIKLCPGIQAKLIFLNFVRVPYFIDLKKPQDQGLNHTCNYYLQPEEDVTIGVWHTVPAVWWKNAQGKDQMWYEDALASSHPIILYLHGNAGTRGGDHRVELYKVLSSLGYHVVTFDYRGWGDSVGTPSERGMTYDALHVFDWIKARSGDNPVYIWGHSLGTGVATNLVRRLCERETPPDALILESPFTNIREEAKSHPFSVIYRYFPGFDWFFLDPITSSGIKFANDENVKHISCPLLILHAEDDPVVPFQLGRKLYSIAAPARSFRDFKVQFVPFHSDLGYRHKYIYKSPELPRILREFLGKSEPEHQH

SEQ ID NO: 6647 - protein, 207 aa, Homo sapiens
MAVFHDMLLQPLGMFLCLSLQLSSATFIRYSSTCFTFDEYYTITLDIKASSHIYESNAVYSVFVPVNDSVYAVVMKTLDENSDSAGLWQRADKNCYSNSTYYVKDQYMTVLEAQWQAPEPENITEVEIQAFTVQIRALPILSTLKLREKLSTLALAAKIPQSSAFKPFFMITPKSIRLEGLANQVFSSPITEAIYILLAFLTSTLLF

SEQ ID NO: 6648 - protein, 166 aa, Homo sapiens
MSRPRKRLAGTSGSDKGLSGKRTKTENSGEALAKVEDSNPQKTSATKNCLKNLSSHWLMKSEPESRLEKGVDVKFSIEDLKAQPKQTTCWDGVRNYQARNFLRAMKLGEEAFFYHSNCKEPGIAGLMKIVKEAYPDHTQFEKNNPHYDPSSKEDNPKWSMKSLILF

SEQ ID NO: 6649 - protein, 1044 aa, Homo sapiens
MLKPQPLQQPSQPQQPPPTQQAVARRPPGGTSPPNGGLPGPLATSAAPPGPPAAASPCLGPVAAAGSGLRRGAEGILAPQPPPPQQHQERPGAAAIGSARGQSTGKGPPQSPVFEGVYNNSRMLHFLTAVVGSTCDVKVKNGTTYEGIFKTLSSKFELAVDAVHRKASEPAGGPRREDIVDTMVFKPSDVMLVHFRNVDFNYATKDKFTDSAIAMNSKVNGEHKEKVLQRWEGGDSNSDDYDLESDMSNGWDPNEMFKFNEENYGVKTTYDSSLSSYTVPLEKDNSEEFRQRELRAAQLAREIESSPQYRLRIAMENDDGRTEEEKHSAVQRQGSGRESPSLASREGKYIPLPQRVREGPRGGVRCSSSRGGRPGLSSLPPRGPHHLDNSSPGPGSEARGINGGPSRMSPKAQRPLRGAKTLSSPSNRPSGETSVPPPPAVGRMYPPRSPKSAAPAPISASCPEPPIGSAVPTSSASIPVTSSVSDPGVGSISPASPKISLAPTDVKELSTKEPGRTLEPQELARIAGKVPGLQNEQKRFQLEELRKFGAQFKLQPSSSPENSLDPFPPRILKEEPKGKEKEVDGLLTSEPMGSPVSSKTESVSDKEDKPPLAPSGGTEGPEQPPPPCPSQTGSPPVGLIKGEDKDEGPVAEQVKKSTLNPNAKEFNPTKPLLSVNKSTSTPTSPGPRTHSTPSIPVLTAGQSGLYSPQYISYIPQIHMGPAVQAPQMYPYPVSNSVPGQQGKYRGAKGSLPPQRSDQHQPASAPPMMQAAAAAGPPLVAATPYSSYIPYNPQQFPGQPAMMQPMAHYPSQPVFAPMLQSNPRMLTSGSHPQAIVSSSTPQYPSAEQPTPQALYATVHQSYPHHATQLHAHQPQPATTPTGSQPQSQHAAPSPVQHQAGQAPHLGSGQPQQNLYHPGALTGTPPSLPPGPSAQSPQSSFPQPAAVYAIHHQQLPHGFTNMAHVTQAHVQTGITAAPPPHPGAPHPPQVMLLHPPQSHGGPPQGAVPQSGVPALSASTPSPYPYIGHPQVQSHPSQQLPFHPPGN

SEQ ID NO: 6650 - protein, 567 aa, Homo sapiens
MADLANEEKPAIAPPVFVFQKDKGQKSPAEQKNLSDSGEEPRGEAEAPHHGTGHPESAGEHALEPPAPAGASASTPPPPAPEAQLPPFPRELAGRSAGGSSPEGGEDSDREDGNYCPPVKRERTSSLTQFPPSQSEERSSGFRLKPPTLIHGQAPSAGLPSQKPKEQQRSVLRPAVLQAPQPKALSQTVPSSGTNGVSLPADCTGAVPAASPDTAAWRSPSEAADEVCALEEKEPQKNESSNASEEEACEKKDPATQQAFVFGQNLRDRVKLINESVDEADMENAGHPSADTPTATNYFLQYISSSLENSTNSADASSNKFVFGQNMSERVLSPPKLNEVSSDANRENAAAESGSESSSQEATPEKESLAESAAAYTKATARKCLLEKVEVITGEEAESNVLQMQCKLFVFDKTSQSWVERGRGLLRLNDMASTDDGTLQSRLVMRTQGSLRLILNTKLWAQMQIDKASEKSIRITAMDTEDQGVKVFLISASSKDTGQLYAALHHRILALRSRVEQEQEAKMPAPEPGAAPSNEEDDSDDDDVLAPSGATAAGAGDEGDGQTTGST

SEQ ID NO: 6651 - protein, 735 aa, Homo sapiens
MAEPLLRKTFSRLRGREKLPRKKSDAKERGHPAQRPEPSPPEPEPQAPEGSQAGAEGPSSPEASRSPARGAYLQSLEPSSRRWVLGGAKPAEDTSLGPGVPGTGEPAGEIWYNPIPEEDPRPPAPEPPGPQPGSAESEGLAPQGAAPASPPTKASRTKSPGPARRLSIKMKKLPELRRRLSLRGPRAGRERERAAPAGSVISRYHLDSSVGGPGPAAGPGGTRSPRAGYLSDGDSPERPAGPPSPTSFRPYEVGPAARAPPAALWGRLSLHLYGLGGLRPAPGATPRDLCCLLQVDGEARARTGPLRGGPDFLRLDHTFHLELEAARLLRALVLAWDPGVRRHRPCAQGTVLLPTVFRGCQAQQLAVRLEPQGLLYAKLTLSEQQEAPATAEPRVFGLPLPLLVERERPPGQVPLIIQKCVGQIERRGLRVVGLYRLCGSAAVKKELRDAFERDSAAVCLSEDLYPDINVITGILKDYLRELPTPLITQPLYKVVLEAMARDPPNRVPPTTEGTRGLLSCLPDVERATLTLLLDHLRLVSSFHAYNRMTPQNLAVCFGPVLLPARQAPTRPRARSSGPGLASAVDFKHHIEVLHYLLQSWPDPRLPRQSPDVAPYLRPKRQPPLHLPLADPEVVTRPRGRGGPESPPSNRYAGDWSVCGRDFLPCGRDFLSGPDYDHVTGSDSEDEDEEVGEPRVTGDFEDDFDAPFNPHLNLKDFDALILDLERELSKQINVCL

SEQ ID NO: 6652 - protein, 571 aa, Homo sapiens
MRALRDRAGLLLCVLLLAALLEAALGLPVKKPRLRGPRPGSLTRLAEVSASPDPRPLKEEEEAPLLPRTHLQAEPHQHGCWTVTEPAAMTPGNATPPRTPEVTPLRLELQKLPGLANTTLSTPNPDTQASASPDPRPLREEEEARLLPRTHLQAELHQHGCWTVTEPAALTPGNATPPRTQEVTPLLLELQKLPELVHATLSTPNPDNQVTIKVVEDPQAEVSIDLLAEPSNPPPQDTLSWLPALWSFLWGDYKGEEKDRAPGEKGEEKEEDEDYPSEDIEGEDQEDKEEDEEEQALWFNGTTDNWDQGWLAPGDWVFKDSVSYDYEPQKEWSPWSPCSGNCSTGKQQRTRPCGYGCTATETRTCDLPSCPGTEDKDTLGLPSEEWKLLARNATDMHDQDVDSCEKWLNCKSDFLIKYLSQMLRDLPSCPCAYPLEAMDSPVSLQDEHQGRSFRWRDASGPRERLDIYQPTARFCLRSMLSGESSTLAAQHCCYDEDSRLLTRGKGAGMPNLISTDFSPKLHFKFDTTPWILCKGDWSRLHAVLPPNNGRACTDNPLEEEYLAQLQEAKEY

SEQ ID NO: 6653 - protein, 461 aa, Homo sapiens
MHRAPSPTAEQPPGGGDSARRTLQPRLKPSARAMALPRTLGELQLYRVLQRANLLSYYETFIQQGGDDVQQLCEAGEEEFLEIMALVGMATKPLHVRRLQKALREWATNPGLFSQPVPAVPVSSIPLFKISETAGTRKGSMSNGHGSPGEKAGSARSFSPKSPLELGEKLSPLPGGPGAGDPRIWPGRSTPESDVGAGGEEEAGSPPFSPPAGGGVPEGTGAGGLAAGGTGGGPDRLEPEMVRMVVESVERIFRSFPRGDAGEVTSLLKLNKKLARSVGHIFEMDDNDSQKEEEIRKYSIIYGRFDSKRREGKQLSLHELTINEAAAQFCMRDNTLLLRRVELFSLSRQVARESTYLSSLKGSRLHPEELGGPPLKKLKQEVGEQSHPEIQQPPPGPESYVPPYRPSLEEDSASLSGESLDGHLQEFEEGLLDRCPAPGPHPALVEGRRSSVKVEAEASRQ

SEQ ID NO: 6654 - protein, 434 aa, Homo sapiens
MAATDIARQVGEGCRTVPLAGHVGFDSLPDQLVNKSVSQGFCFNILCVGETGLGKSTLMDTLFNTKFEGEPATHTQPGVQLQSNTYDLQESNVRLKLTIVSTVGFGDQINKEDSYKPIVEFIDAQFEAYLQEELKIRRVLHTYHDSRIHVCLYFIAPTGHSLKSLDLVTMKKLDSKVNIIPIIAKADAISKSELTKFKIKITSELVSNGVQIYQFPTDDESVAEINGTMNAHLPFAVIGSTEELKIGNKMMRARQYPWGTVQVENEAHCDFVKLREMLIRVNMEDLREQTHTRHYELYRRCKLEEMGFKDTDPDSKPFSLQETYEAKRNEFLGELQKKEEEMRQMFVQRVKEKEAELKEAEKELHEKFDRLKKLHQDEKKKLEDKKKSLDDEVNAFKQRKTAAELLQSQGSQAGGSQTLKRDKEKKNNPWLCTE

SEQ ID NO: 6655 - protein, 68 aa, Homo sapiens
MDQVMQFVEPSRQFVKDSIRLVKRCTKPDRKEFQKIAMATAIGFAIMGFIGFFVKLIHIPINNIIVGG

SEQ ID NO: 6656 - protein, 496 aa, Homo sapiens
MFCHLRPMRRLCLEKIFPHWFPFSRALSGAEAVNALRPFYFAVHPDFFGQHPVEREINENSLKRLSVYLENLQKPGFKSLKPTQLTFYVRETDQSSSDGQEPFSTSGFRAVKFTLHTRDLLSTVLYILNSCSLSVEHIQSLNTNMHTQPLKEAKRMPDRPIKWDKSYYSFTGFKDPDEDLEQVSRVETTLTSWLDNNGKSAVKKLKNSLPLRKELDRLKDELSHQLQLSDIRWQRSWGIAHRCSQLHSLSRLAQQNLETLKKAKGCTIIFTDRSGMSAVGHVMLGTMDVHHHWTKLFERLPSYFDLQRRLMILEDQISYLLGGIQVVYIEELQPVLTLEEYYSLLDVFYNRLLKSRILFHPRSLRGLQMILNSDRYAPSLHELGHFNIPTLCDPANLQWFILTKAQQARENMKRKEELKVIENELIQASTKKFSLEKLYKEPSISSIQMVDCCKRLLEQSLPYLHGMHLCISHFYSVMQDGDLCIPWNWKNGEAIK

SEQ ID NO: 6657 - protein, 190 aa, Homo sapiens
MYVWPCAVVLAQYLWFHRRSLPGKAILEIGAGVSLPGILAAKCGAEVILSDSSELPHCLEVCRQSCQMNNLPHLQVVGLTWGHISWDLLALPPQDIILASDVFFEPEDFEDILATIYFLMHKNPKVQLWSTYQVRSADWSLEALLYKWDMKCVHIPLESFDADKEDIAESTLPGRHTVEMLVISFAKDSL

SEQ ID NO: 6658 - protein, 552 aa, Homo sapiens
MDNMSITNTPTSNDACLSIVHSLMCHRQGGESETFAKRAIESLVKKLKEKKDELDSLITAITTNGAHPSKCVTIQRTLDGRLQVAGRKGFPHVIYARLWRWPDLHKNELKHVKYCQYAFDLKCDSVCVNPYHYERVVSPGIDLSGLTLQSNAPSSMMVKDEYVHDFEGQPSLSTEGHSIQTIQHPPSNRASTETYSTPALLAPSESNATSTANFPNIPVASTSQPASILGGSHSEGLLQIASGPQPGQQQNGFTGQPATYHHNSTTTWTGSRTAPYTPNLPHHQNGHLQHHPPMPPHPGHYWPVHNELAFQPPISNHPAPEYWCSIAYFEMDVQVGETFKVPSSCPIVTVDGYVDPSGGDRFCLGQLSNVHRTEAIERARLHIGKGVQLECKGEGDVWVRCLSDHAVFVQSYYLDREAGRAPGDAVHKIYPSAYIKVFDLRQCHRQMQQQAATAQAAAAAQAAAVAGNIPGPGSVGGIAPAISLSAAAGIGVDDLRRLCILRMSFVKGWGPDYPRQSIKETPCWIEIHLHRALQLLDEVLHTMPIADPQPLD

SEQ ID NO: 6659 - protein, 119 aa, Homo sapiens
MGRPRPRAAKTWMFLLLLGGAWAENFPDTLNCAEVKIFPQKKCEDAYPGQITDGMVCAGSSKGADTCQGDSGGPLVCDGALQGITSWGSDPCGRSDKPGVYTNICRYLDWIKKIIGSKG

SEQ ID NO: 6660 - protein, 533 aa, Homo sapiens
MWLGRRALCALVLLLACASLGLLYASTRDAPGLRLPLAPWAPPQSPRRPELPDLAPEPRYAHIPVRIKEQVVGLLAWNNCSCESSGGGLPLPFQKQVRAIDLTKAFDPAELRAASATREQEFQAFLSRSQSPADQLLIAPANSPLQYPLQGVEVQPLRSILVPGLSLQAASGQEVYQVNLTASLGTWDVAGEVTGVTLTGEGQADLTLVSPGLDQLNRQLQLVTYSSRSYQTNTADTVRFSTEGHEAAFTIRIRHPPNPRLYPPGSLPQGAQYNISALVTIATKTFLRYDRLRALITSIRRFYPTVTVVIADDSDKPERVSGPYVEHYLMPFGKGWFAGRNLAVSQVTTKYVLWVDDDFVFTARTRLERLVDVLERTPLDLVGGAVREISGFATTYRQLLSVEPGAPGLGNCLRQRRGFHHELVGFPGCVVTDGVVNFFLARTDKVREVGFDPRLSRVAHLEFFLDGLGSLRVGSCSDVVVDHASKLKLPWTSRDAGAETYARYRYPGSLDESQMAKHRLLFFKHRLQCMTSQ

SEQ ID NO: 6661 - protein, 2431 aa, Homo sapiens
MTTLLWVFVTLRVITAAVTVETSDHDNSLSVSIPQPSPLRVLLGTSLTIPCYFIDPMHPVTTAPSTAPLAPRIKWSRVSKEKEVVLLVATEGRVRVNSAYQDKVSLPNYPAIPSDATLEVQSLRSNDSGVYRCEVMHGIEDSEATLEVVVKGIVFHYRAISTRYTLDFDRAQRACLQNSAIIATPEQLQAAYEDGFHQCDAGWLADQTVRYPIHTPREGCYGDKDEFPGVRTYGIRDTNETYDVYCFAEEMEGEVFYATSPEKFTFQEAANECRRLGARLATTGQLYLAWQAGMDMCSAGWLADRSVRYPISKARPNCGGNLLGVRTVYVHANQTGYPDPSSRYDAICYTGEDFVDIPENFFGVGGEEDITVQTVTWPDMELPLPRNITEGEARGSVILTVKPIFEVSPSPLEPEEPFTFAPEIGATAFAEVENETGEATRPWGFPTPGLGPATAFTSEDLVVQVTAVPGQPHLPGGVVFHYRPGPTRYSLTFEEAQQACLRTGAVIASPEQLQAAYEAGYEQCDAGWLRDQTVRYPIVSPRTPCVGDKDSSPGVRTYGVRPSTETYDVYCFVDRLEGEVFFATRLEQFTFQEALEFCESHNATLATTGQLYAAWSRGLDKCYAGWLADGSLRYPIVTPRPACGGDKPGVRTVYLYPNQTGLPDPLSRHHAFCFRGISAVPSPGEEEGGTPTSPSGVEEWIVTQVVPGVAAVPVEEETTAVPSGETTAILEFTTEPENQTEWEPAYTPVGTSPLPGILPTWPPTGAATEESTEGPSATEVPSASEEPSPSEVPFPSEEPSPSEEPFPSVRPFPSVELFPSEEPFPSKEPSPSEEPSASEEPYTPSPPVPSWTELPSSGEESGAPDVSGDFTGSGDVSGHLDFSGQLSGDRASGLPSGDLDSSGLTSTVGSGLPVESGLPSGDEERIEWPSTPTVGELPSGAEILEGSASGVGDLSGLPSGEVLETSASGVGDLSGLPSGEVLETTAPGVEDISGLPSGEVLETTAPGVEDISGLPSGEVLETTAPGVEDISGLPSGEVLETTAPGVEDISGLPSGEVLETTAPGVEDISGLPSGEVLETTAPGVEDISGLPSGEVLETAAPGVEDISGLPSGEVLETAAPGVEDISGLPSGEVLETAAPGVEDISGLPSGEVLETAAPGVEDISGLPSGEVLETAAPGVEDISGLPSGEVLETAAPGVEDISGLPSGEVLETAAPGVEDISGLPSGEVLETAAPGVEDISGLPSGEVLETAAPGVEDISGLPSGEVLETAAPGVEDISGLPSGEVLETAAPGVEDISGLPSGEVLETAAPGVEDISGLPSGEVLETAAPGVEDISGLPSGEVLETAAPGVEDISGLPSGEVLETAAPGVEDISGLPSGEVLETAAPGVEDISGLPSGEVLETTAPGVEEISGLPSGEVLETTAPGVDEISGLPSGEVLETTAPGVEEISGLPSGEVLETSTSAVGDLSGLPSGGEVLEISVSGVEDISGLPSGEVVETSASGIEDVSELPSGEGLETSASGVEDLSRLPSGEEVLEISASGFGDLSGLPSGGEGLETSASEVGTDLSGLPSGREGLETSASGAEDLSGLPSGKEDLVGSASGDLDLGKLPSGTLGSGQAPETSGLPSGFSGEYSGVDLGSGPPSGLPDFSGLPSGFPTVSLVDSTLVEVVTASTASELEGRGTIGISGAGEISGLPSSELDISGRASGLPSGTELSGQASGSPDVSGEIPGLFGVSGQPSGFPDTSGETSGVTELSGLSSGQPGISGEASGVLYGTSQPFGITDLSGETSGVPDLSGQPSGLPGFSGATSGVPDLVSGTTSGSGESSGITFVDTSLVEVAPTTFKEEEGLGSVELSGLPSGEADLSGKSGMVDVSGQFSGTVDSSGFTSQTPEFSGLPSGIAEVSGESSRAEIGSSLPSGAYYGSGTPSSFPTVSLVDRTLVESVTQAPTAQEAGEGPSGILELSGAHSGAPDMSGEHSGFLDLSGLQSGLIEPSGEPPGTPYFSGDFASTTNVSGESSVAMGTSGEASGLPEVTLITSEFVEGVTEPTISQELGQRPPVTHTPQLFESSGKVSTAGDISGATPVLPGSGVEVSSVPESSSETSAYPEAGFGASAAPEASREDSGSPDLSETTSAFHEANLERSSGLGVSGSTLTFQEGEASAAPEVSGESTTTSDVGTEAPGLPSATPTASGDRTEISGDLSGHTSQLGVVISTSIPESEWTQQTQRPAETHLEIESSSLLYSGEETHTVETATSPTDASIPASPEWKRESESTAADQEVCEEGWNKYQGHCYRHFPDRETWVDAERRCREQQSHLSSIVTPEEQEFVNNNAQDYQWIGLNDRTIEGDFRWSDGHPMQFENWRPNQPDNFFAAGEDCVVMIWHEKGEWNDVPCNYHLPFTCKKGTATTYKRRLQKRSSRHPRRSRPSTAH

SEQ ID NO: 6662 - protein, 134 aa, Homo sapiens
MAEQSDEAVKYYTLEEIQKHNHSKSTWLILHHKVYDLTKFLEEHPGGEEVLREQAGGDATENFEDVGHSTDAREMSKTFIIGELHPDDRPKLNKPPETLITTIDSSSSWWTNWVIPAISAVAVALMYRLYMAED

SEQ ID NO: 6663 - protein, 454 aa, Homo sapiens
MTWRAAASTCAALLILLWALTTEGDLKVEMMAGGTQITPLNDNVTIFCNIFYSQPLNITSMGITWFWKSLTFDKEVKVFEFFGDHQEAFRPGAIVSPWRLKSGDASLRLPGIQLEEAGEYRCEVVVTPLKAQGTVQLEVVASPASRLLLDQVGMKENEDKYMCESSGFYPEAINITWEKQTQKFPHPIEISEDVITGPTIKNMDGTFNVTSCLKLNSSQEDPGTVYQCVVRHASLHTPLRSNFTLTAARHSLSETEKTDNFSIHWWPISFIGVGLVLLIVLIPWKKICNKSSSAYTPLKCILKHWNSFDTQTLKKEHLIFFCTRAWPSYQLQDGEAWPPEGSVNINTIQQLDVFCRQEGKWSEVPYVQAFFALRDNPDLCQCCRIDPALLTVTSGKSIDDNSTKSEKQTPREHSDAVPDAPILPVSPIWEPPPATTSTTPVLSSQPPTLLLPLQ

SEQ ID NO: 6664 - protein, 557 aa, Homo sapiens
MDQSRVLLWVKAEPFIVGALQVPPPSKFSLHYLRKISTYVQIRATEGAYPRLYWSTWRHIACGKLQLAKDLAWLYFEIFDSLSMKTPEERLEWSEVLSNCMSEEEVEKQRNQLSVDTLQFLLFLYIQQLNKVSLRTSLIGEEWPSPRNKSQSPDLTEKSNCHNKNWNDYSHQAFVYDHLSDLLELLLDPKQLTASFHSTHSSLVSREAVVALSFLIEGTISRARKIYPLHELALWQPLHADSGFSKISKTFSFYKLETWLRSCLTGNPFGTSACLKSGKKLAWAHQVEGTTKRAKIACNTHVAPRMHRLVVMSQVYKQTLAKSSDTLAGAHVKIHRCNESFIYLLSPLRSVTIEKCRNSIFVLGPVGTTLHLHSCDNVKVIAVCHRLSISSTTGCIFHVLTPTRPLILSGNQTVTFAPFHTHYPMLEDHMARTGLATVPNYWDNPMVVCRENSDTRVFQLLPPCEFYVFIIPFEMEGDTTEIPGGLPSVYQKALGQREQKIQIWQKTVKEAHLTKDQRKQFQVLVENKFYEWLINTGHRQQLDSLVPPAAGSKQAAG

SEQ ID NO: 6665 - protein, 247 aa, Homo sapiens
MAGITTIEAVKRKIQVLQQQADDAEERAERLQREVEGERRAREQAEAEVASLNRRIQLVEEELDRAQERLATALQKLEEAEKAADESERGMKVIENRALKDEEKMELQEIQLKEAKHIAEEADRKYEEVARKLVIIEGDLERTEERAELAESKCSELEEELKNVTNNLKSLEAQAEKYSQKEDKYEEEIKILTDKLKEAETRAEFAERSVAKLEKTIDDLEERLYSQLERNRLLSNELKLTLHDLCD

SEQ ID NO: 6666 - protein, 225 aa, Homo sapiens
MSRPRKRLAGTSGSDKGLSGKRTKTENSGEALAKVEDSNPQKTSATKNCLKNLSSHWLMKSEPESRLEKGVDVKFSIEDLKAQPKQTTCWDGVRNYQARNFLRAMKLGEEAFFYHSNCKEPGIAGLMKIVKEAYPDHTQFEKNNPHYDPSSKEDNPKWSMVDVQFVRMMKRFIPLAELKSYHQAHKATGGPLKNMVLFTRQRLSIQPLTQEEFDFVLSLEEKEPS

SEQ ID NO: 6667 - protein, 351 aa, Homo sapiens
MLETLRERLLSVQQDFTSGLKTLSDKSREAKVKSKPRTVPFLPKYSAGLELLSRYEDTWAALHRRAKDCASAGELVDSEVVMLSAHWEKKKTSLVELQEQLQQLPALIADLESMTANLTHLEASFEEVENNLLHLEDLCGQCELERCKHMQSQQLENYKKNKRKELETFKAELDAEHAQKVLEMEHTQQMKLKERQKFFEEAFQQDMEQYLSTGYLQIAERREPIGSMSSMEVNVDMLEQMDLMDISDQEALDVFLNSGGEENTVLSPALGPESSTCQNEITLQVPNPSELRAKPPSSSSTCTDSATRDISEGGESPVVQSDEEEVQVDTALATSHTDREATPDGGEDSDS

SEQ ID NO: 6668 - protein, 345 aa, Homo sapiens
MQPSGHRLRDVEHHPLLAENDNYDSSSSSSSEADVADRVWFIRDGCGMICAVMTWLLVAYADFVVTFVMLLPSKDFWYSVVNGVIFNCLAVLALSSHLRTMLTDPEKSSDCRPSACTVKTGLDPTLVGICGEGTESVQSLLLGAVPKGNATKEYMESLQLKPGEVIYKCPKCCCIKPERAHHCSICKRCIRKMDHHCPWVNNCVGEKNQRFFVLFTMYIALSSVHALILCGFQFISCVRGQWTECSDFSPPITVILLIFLCLEGLLFFTFTAVMFGTQIHSICNDETEIERLKSEKPTWERRLRWEGMKSVFGGPPSLLWMNPFVGFRFRRLPTRPRKGGPEFSV

SEQ ID NO: 6669 - protein, 398 aa, Homo sapiens
MMLKGITRLISRIHKLDPGRFLHMGTQARQSIAAHLDNQVPVESPRAISRTNENDPAKHGDQHEGQHYNISPQDLETVFPHGLPPRFVMQVKTFSEACLMVRKPALELLHYLKNTSFAYPAIRYLLYGEKGTGKTLSLCHVIHFCAKQDWLILHIPDAHLWVKNCRDLLQSSYNKQRFDQPLEASTWLKNFKTTNERFLNQIKVQEKYVWNKRESTEKGSPLGEVVEQGITRVRNATDAVGIVLKELKRQSSLGMFHLLVAVDGINALWGRTTLKREDKSPIAPEELALVHNLRKMMKNDWHGGAIVSALSQTGSLFKPRKAYLPQELLGKEGFDALDPFIPILVSNYNPKEFESCIQYYLENNWLQHEKAPTEEGKKELLFLSNANPSLLERHCAYL

SEQ ID NO: 6670 - protein, 92 aa, Homo sapiens
MLYLEDYLEMIEQLPMDLRDRFTEMREMDLQVQNAMDQLEQRVSEFFMNAKKNKPEWREEQMASIKKDYYKALEDADEKVQLANQIYDLQHF

SEQ ID NO: 6671 - protein, 214 aa, Homo sapiens
MGRRPARCYRYCKNKPYPKSRFCRGVPDAKIRIFDLGRKKAKVDEFPLCGHMVSDEYEQLSSEALEAARICANKYMVKSCGKDGFHIRVRLHPFHVIRINKMLSCAGADRLQTGMRGAFGKPQGTVARVHIGQVIMSIRTKLQNKEHVIEALRRAKFKFPGRQKIHISKKWGFTKFNADEFEDMVAEKRLIPDGCGVKYIPSRGPLDKWRALHS

SEQ ID NO: 6672 - protein, 275 aa, Homo sapiens
MATELEYESVLCVKPDVSVYRIPPRASNRGYRASDWKLDQPDWTGRLRITSKGKTAYIKLEDKVSGELFAQAPVEQYPGIAVETVTDSSRYFVIRIQDGTGRSAFIGIGFTDRGDAFDFNVSLQDHFKWVKQESEISKESQEMDARPKLDLGFKEGQTIKLCIGNITNKKGGASKPRTARGGGLSLLPPPPGGKVTIPPPSSSVAISNHVTPPPIPKSNHGGSDADILLDLDSPAPVTTPAPTPVSVSNDLWGDFSTASSSVPNQAPQPSNWVQF

SEQ ID NO: 6673 - protein, 6885 aa, Homo sapiens
MASSPELPTEDEQGSWGIDDLHISLQAEQEDTQKKAFTCWINSQLARHTSPSVISDLFTDIKKGHVLLDLLEVLSGQQLPRDKGSNTFQCRINIEHALTFLRNRSIKLINIHVTDIIDGNPSIILGLIWTIILHFHIEKLAQTLSCNYNQPSLDDVSVVDSSPASSPPAKKCSKVQARWQMSARKALLLWAQEQCATYESVNVTDFKSSWRNGMAFLAIIHALRPDLIDMKSVKHRSNKDNLREAFRIAEQELKIPRLLEPEDVDVVDPDEKSIMTYVAQFLQYSKDAPGTGEEAQGKVKDAMGWLTLQKEKLQKLLKDSENDTYFKKYNSLLSFMESFNEEKKSFLDVLSIKRDLDELDKDHLQLREAWDGLDHQINAWKIKLNYALPPPLHQTEAWLQEVEELMDEDLSASQDHSQAVTLIQEKMTLFKSLMDRFEHHSNILLTFENKDENHLPLVPPNKLEEMKRRINNILEKKFILLLEFHYYKCLVLGLVDEVKSKLDIWNIKYGSRESVELLLEDWHKFIEEKEFLARLDTSFQKCGEIYKNLAGECQNINKQYMMVKSDVCMYRKNIYNVKSTLQKVLACWATYVENLRLLRACFEETKKEEIKEVPFETLAQWNLEHATLNEAGNFLVEVSNDVVGSSISKELRRLNKRWRKLVSKTQLEMNLPLMIKKQDQPTFDNSGNILSKEEKATVEFSTDMSVELPENYNQNIKAGEKHEKENEEFTGQLKVAKDVEKLIGQVEIWEAEAKSVLDQDDVDTSMEESLKHLIAKGSMFDELMARSEDMLQMDIQNISSQESFQHVLTTGLQAKIQEAKEKVQINVVKLIAALKNLTDVSPDLDIRLKMEESQKELESYMMRAQQLLGQRESPGELISKHKEALIISNTKSLAKYLKAVEELKNNVTEDIKMSLEEKSRDVCAKWESLHHELSLYVQQLKIDIEKGKLSDNILKLEKQINKEKKLIRRGRTKGLIKEHEACFSEEGCLYQLNHHMEVLRELCEELPSQKSQQEVKRLLKDYEQKIERLLKCASEIHMTLQPTAGGTSKNEGTITTSENRGGDPHSEAPFAKSDNQPSTEKAMEPTMKFSLASVLRPLQEESIMEKDYSASINSLLERYDTYRDILEHHLQNNKFRITSDFSSEEDRSSSCLQAKLTDLQVIKNETDARWKEFEIISLKLENHVNDIKKPFVIKERDTLKERERELQMTLNTRMESLETALRLVLPVEKASLLLCGSDLPLHKMAIQGFHLIDADRIYQHLRNIQDSIAKQIEICNRLEEPGNFVLKELHPFDLHAMQNIILKYKTQFEGMNHRVQRSEDTLKALEDFLASLRTAKLSAEPVTDLSASDTQVAQENTLTVKNKEGEIHLMKDKAKHLDKCLKMLDMSFKDAERGDDTSCENLLDAFSIKLSETHGYGVQEEFTEENKLLEACIFKNNELLKNIQDVQSQISKIGLKDPTVPAVKHRKKSLIRLDKVLDEYEEEKRHLQEMANSLPHFKDGREKTVNQQCQNTVVLWENTKALVTECLEQCGRVLELLKQYQNFKSILTTLIQKEESVISLQASYMGKENLKKRIAEIEIVKEEFNEHLEVVDKINQVCKNLQFYLNKMKTFEEPPFEKEANIIVDRWLDINEKTEDYYENLGRALALWDKLFNLKNVIDEWTEKALQKMELHQLTEEDRERLKEELQVHEQKTSEFSRRVAEIQFLLQSSEIPLELQVMESSILNKMEHVQKCLTGESNCHALSGSTAELREDLDQAKTQIGMTESLLKALSPSDSLEIFTKLEEIQQQILQQKHSMILLENQIGCLTPELSELKKQYESVSDLFNTKKSVLQDHFSKLLNDQCKNFNDWFSNIKVNLKECFESSETKKSVEQKLQKLSDFLTLEGRNSKIKQVDSVLKHVKKHLPKAHVKELISWLVGQEFELEKMESICQARAKELEDSLQQLLRLQDDHRNLRKWLTNQEEKWKGMEEPGEKTELFCQALARKREQFESVAQLNNSLKEYGFTEEEEIIMEATCLMDRYQTLLRQLSEIEEEDKLLPTEDQSFNDLAHDVIHWIKEIKESLMVLNSSEGKMPLEERIQKIKEIILLKPEGDARIETIMKQAESSEAPLVQKTLTDISNQWDNTLHLASTYLSHQEKLLLEGEKYLQSKEDLRLMLIELKKKQEAGFALQHGLQEKKAQLKIYKKFLKKAQDLTSLLKELKSQGNYLLECTKNPSFSEEPWLEIKHLHESLLQQLQDSVQNLDGHVREHDSYQVCVTDLNTTLDNFSKEFVSFSDKPVDQIAVEEKLQKLQELENRLSLQDGTLKKILALAKSVKQNTSSVGQKIIKDDIKSLQCKQKDLENRLASAKQEMECCLNSILKSKRSTEKKGKFTLPGREKQATSDVQESTQESAAVEKLEEDWEINKDSAVEMAMSKQLSLNAQESMKNTEDERKVNELQNQPLELDTMLRNEQLEEIEKLYTQLEAKKAAIKPLEQTECLNKTETGALVLHNIGYSAQHLDNLLQALITLKKNKESQYCVLRDFQEYLAAVESSMKALLTDKESLKVGPLDSVTYLDKIKKFIASIEKEKDSLGNLKIKWENLSNHVTDMDKKLLESQIKQLEHGWEQVEQQIQKKYSQQVVEYDEFTTLMNKVQDTEISLQQQQQHLQLRLKSPEERAGNQSMIALTTDLQATKHGFSVLKGQAELQMKRIWGEKEKKNLEDGINNLKKQWETLEPLHLEAENQIKKCDIRNKMKETILWAKNLLGELNPSIPLLPDDILSQIRKCKVTHDGILARQQSVESLAEEVKDKVPSLTTYEGSDLNNTLEDLRNQYQMLVLKSTQRSQQLEFKLEERSNFFAIIRKFQLMVQESETLIIPRVETAATEAELKHHHVTLEASQKELQEIDSGISTHLQELTNIYEELNVFERLFLEDQLKNLKIRTNRIQRFIQNTCNEVEHKIKFCRQFHEKTSALQEEADSIQRNELLLNQEVNKGVKEEIYNLKDRLTAIKCCILQVLKLKKVFDYIGLNWDFSQLDQLQTQVFEKEKELEEKIKQLDTFEEEHGKYQALLSKMRAIDLQIKKMTEVVLKAPDSSPESRRLNAQILSQRIEKAKCLCDEIIKKLNENKTFDDSFKEKEILQIKLNAEENDKLYKVLQNMVLELSPKELDEKNCQDKLETSLHVLNQIKSQLQQPLLINLEIKHIQNEKDNCEAFQEQVWAEMCSIKAVTAIEKQREENSSEASDVETKLREFEDLQMQLNTSIDLRTNVLNDAYENLTRYKEAVTRAVESITSLEAIIIPYRVDVGNPEESLEMPLRKQEELESTVAHIQDLTEKLGMISSPEAKLQLQYTLQELVSKNSAMKEAFKAQETEAERYLENYKCYRKMEEDIYTNLSKMETVLGQSMSSLPLSYREALERLEQSKALVSNLISTKEELMKLRQILRLLRLRCTENDGICLLKIVSALWEKWLSLLEAAKEWEMWCEELKQEWKFVSEEIEREAIILDNLQEELPEISKTKEAATTEELSELLDCLCQYGENVEKQQLLLTLLLQRIRSIQNVPESSGAVETVPAFQEITSMKERCNKLLQKVQKNKELVQTEIQERHSFTKEIIALKNFFQQTTTSFQNMAFQDHPEKSEQFEELQSILKKGKLTFENIMEKLRIKYSEMYTIVPAEIESQVEECRKALEDIDEKISNEVLKSSPSYAMRRKIEEINNGLHNVEKMLQQKSKNIEKAQEIQKKMWDELDLWHSKLNELDSEVQDIVEQDPGQAQEWMDNLMIPFQQYQQVSQRAECRTSQLNKATVKMEEYSDLLKSTEAWIENTSHLLANPADYDSLRTLSHHASTVQMALEDSEQKHNLLHSIFMDLEDLSIIFETDELTQSIQELSNQVTALQQKIMESLPQIQRMADDVVAIESEVKSMEKRVSKIKTILLSKEIFDFSPEEHLKHGEVILENIRPMKKTIAEIVSYQVELRLPQTGMKPLPVFQRTNQLLQDIKLLENVTQEQNELLKVVIKQTNEWDEEIENLKQILNNYSAQFSLEHMSPDQADKLPQLQGEIERMEKQILSLNQRKEDLLVDLKATVLNLHQHLKQEQEGVERDRLPAVTSEEGGVAERDASERKLNRRGSMSYLAAVEEEVEESSVKSDNGDEKAEPSPQSWSSLWKHDKDMEEDRASSSSGTIVQEAYGKISTSDNSMAQILTPDSLNTEQGPECSLRPNQTEEGTTPPIEADTLDSSDAQGGLEPRVEKTRPEPTEVLHACKTQVAELELWLQQANVAVEPETLNADMQQVLEQQLVGCQAMLTEIEHKVAFLLETCKDQGLGDNGATQHEAEALSLKLKTVKCNLEKVQMMLQEKHSEDQHPTILKKSSEPEHQEALQPVNLSELESIVTERPQFSRQKDFQQQQVLELKPMEQKDFIKFIEFNAKKMWPQYCQHDNDTTQESSASNQASSPENDVPDSILSPQGQNGDKWQYLHHELSSKIKLPLPQLVEPQVSTNMGILPSVTMYNFRYPTTEELKTYTTQLEDLRQEASNLQTQENMTEEAYINLDKKLFELFLTLSQCLSSVEEMLEMPRLYREDGSGQQVHYETLALELKKLYLALSDKKGDLLKAMTWPGENTNLLLECFDNLQVCLEHTQAAAVCRSKSLKAGLDYNRSYQNEIKRLYHQLIKSKTSLQQSLNEISGQSVAEQLQKADAYTVELENAESRVAKLRDEGERLHLPYALLQEVYKLEDVLDSMWGMLRARYTELSSPFVTESQQDALLQGMVELVKIGKEKLAHGHLKQTKSKVALQAQIENHKVFFQKLVADMLLIQAYSAKILPSLLQNRETFWAEQVTEVKILEEKSRQCGMKLQSLLQKWEEFDENYASLEKDLEILISTLPSVSLVEETEERLVERISFYQQIKRNIGGKHARLYQTLNEGKQLVASVSCPELEGQIAKLEEQWLSLNKKIDHELHRLQALLKHLLSYNRDSDQLTKWLESSQHTLNYWKEQSLNVSQDLDTIRSNINNFFEFSKEVDEKSSLKTAVISIGNQLLHLKETDTATLRASLAQFEQKWTMLITQLPDIQEKLHQLQMEKLPSRKAITEMISWMNNVEHQTSDEDSVHSPSSASQVKHLLQKHKEFRMEMDYKQWIVDFVNQSLLQLSTCDVESKRYERTEFAEHLGEMNRQWHRVHGMLNRKIQHLEQLLESITESENKIQILNNWLEAQEERLKTLQKPESVISVQKLLLDCQDIENQLAIKSKALDELKQSYLTLESGAVPLLEDTASRIDELFQKRSSVLTQVNQLKTSMQSVLQEWKIYDQLYDEVNMMTIRFWYCMEHSKPVVLSLETLRCQVENLQSLQDEAESSEGSWEKLQEVIGKLKGLCPSVAEIIEEKCQNTHKRWTQVNQAIADQLQKAQSLLQLWKAYSNAHGEAAARLKQQEAKFQQLANISMSGNNLAEILPPALQDIKELQHDVQKTKEAFLQNSSVLDRLPQPAESSTHMLLPGPLHSLQRAAYLEKMLLVKANEFEFVLSQFKDFGVRLESLKGLIMHEEENLDRLHQQEKENPDSFLNHVLALTAQSPDIEHLNEVSLKLPLSDVAVKTLQNMNRQWIRATATALERCSELQGIGLNEKFLYCCEKWIQLLEKIEEALKVDVANSLPELLEQQKTYKMLEAEVSINQTIADSYVTQSLQLLDTTEIENRPEFITEFSKLTDRWQNAVQGVRQRKGDVDGLVRQWQDFTTSVENLFRFLTDTSHLLSAVKGQERFSLYQTRSLIHELKNKEIHFQRRRTTCALTLEAGEKLLLTTDLKTKESVGRRISQLQDSWKDMEPQLAEMIKQFQSTVETWDQCEKKIKELKSRLQVLKAQSEDPLPELHEDLHNEKELIKELEQSLASWTQNLKELQTMKADLTRHVLVEDVMVLKEQIEHLHRQWEDLCLRVAIRKQEIEDRLNTWVVFNEKNKELCAWLVQMENKVLQTADISIEEMIEKLQKDCMEEINLFSENKLQLKQMGDQLIKASNKSRAAEIDDKLNKINDRWQHLFDVIGSRVKKLKETFAFIQQLDKNMSNLRTWLARIESELSKPVVYDVCDDQEIQKRLAEQQDLQRDIEQHSAGVESVFNICDVLLHDSDACANETECDSIQQTTRSLDRRWRNICAMSMERRMKIEETWRLWQKFLDDYSRFEDWLKSAERTAACPNSSEVLYTSAKEELKRFEAFQRQIHERLTQLELINKQYRRLARENRTDTASRLKQMVHEGNQRWDNLQRRVTAVLRRLRHFTNQREEFEGTRESILVWLTEMDLQLTNVEHFSESDADDKMRQLNGFQQEITLNTNKIDQLIVFGEQLIQKSEPLDAVLIEDELEELHRYCQEVFGRVSRFHRRLTSCTPGLEDEKEASENETDMEDPREIQTDSWRKRGESEEPSSPQSLCHLVAPGHERSGCETPVSVDSIPLEWDHTGDVGGSSSHEEDEEGPYYSALSGKSISDGHSWHVPDSPSCPEHHYKQMEGDRNVPPVPPASSTPYKPPYGKLLLPPGTDGGKEGPRVLNGNPQQEDGGLAGITEQQSGAFDRWEMIQAQELHNKLKIKQNLQQLNSDISAITTWLKKTEAELEMLKMAKPPSDIQEIELRVKRLQEILKAFDTYKALVVSVNVSSKEFLQTESPESTELQSRLRQLSLLWEAAQGAVDSWRGGLRQSLMQCQDFHQLSQNLLLWLASAKNRRQKAHVTDPKADPRALLECRRELMQLEKELVERQPQVDMLQEISNSLLIKGHGEDCIEAEEKVHVIEKKLKQLREQVSQDLMALQGTQNPASPLPSFDEVDSGDQPPATSVPAPRAKQFRAVRTTEGEEETESRVPGSTRPQRSFLSRVVRAALPLQLLLLLLLLLACLLPSSEEDYSCTQANNFARSFYPMLRYTNGPPPT

SEQ ID NO: 6674 - protein, 375 aa, Homo sapiens
MSSHKGSVVAQGNGAPASNREADTVELAELGPLLEEKGKRVIANPPKAEEEQTCPVPQEEEEEVRVLTLPLQAHHAMEKMEEFVYKVWEGRWRVIPYDVLPDWLKDNDYLLHGHRPPMPSFRACFKSIFRIHTETGNIWTHLLGFVLFLFLGILTMLRPNMYFMAPLQEKVVFGMFFLGAVLCLSFSWLFHTVYCHSEKVSRTFSKLDYSGIALLIMGSFVPWLYYSFYCSPQPRLIYLSIVCVLGISAIIVAQWDRFATPKHRQTRAGVFLGLGLSGVVPTMHFTIAEGFVKATTVGQMGWFFLMAVMYITGAGLYAARIPERFFPGKFDIWFQSHQIFHVLVVAAAFVHFYGVSNLQEFRYGLEGGCTDDTLL

SEQ ID NO: 6675 - protein, 466 aa, Homo sapiens
MAFVLILVLSFYELVSGQWQVTGPGKFVQALVGEDAVFSCSLFPETSAEAMEVRFFRNQFHAVVHLYRDGEDWESKQMPQYRGRTEFVKDSIAGGRVSLRLKNITPSDIGLYGCWFSSQIYDEEATWELRVAALGSLPLISIVGYVDGGIQLLCLSSGWFPQPTAKWKGPQGQDLSSDSRANADGYSLYDVEISIIVQENAGSILCSIHLAEQSHEVESKVLIGETFFQPSPWRLASILLGLLCGALCGVVMGMIIVFFKSKGKIQAELDWRRKHGQAELRDARKHAVEVTLDPETAHPKLCVSDLKTVTHRKAPQEVPHSEKRFTRKSVVASQGFQAGKHYWEVDVGQNVGWYVGVCRDDVDRGKNNVTLSPNNGYWVLRLTTEHLYFTFNPHFISLPPSTPPTRVGVFLDYEGGTISFFNTNDQSLIYTLLTCQFEGLLRPYIQHAMYDEEKGTPIFICPVSWG

SEQ ID NO: 6676 - protein, 113 aa, Homo sapiens
MVRFKHRYLLCELVSDDPRCRLSLDDRVLSSLVRDTIARVHGTFGAAACSIGFAGTIRTCQKFLIQYNRRQLLILLQNCTDEGEREAIQKSVTRSCLLEEEEESGEEAAEAME

SEQ ID NO: 6677 - protein, 498 aa, Homo sapiens
MAAAAGPGAALSPRPCDSDPATPGAQSPKDDNEDNSNDGTQPSKRRRMGSGDSSRSCETSSQDLGFSYYPAENLIEYKWPPDETGEYYMLQEQVSEYLGVTSFKRKYPDLERRDLSHKEKLYLRELNVITETQCTLGLTALRSDEVIDLMIKEYPAKHAEYSVILQEKERQRITDHYKEYSQMQQQNTQKVEASKVPEYIKKAAKKAAEFNSNLNRERMEERRAYFDLQTHVIQVPQGKYKVLPTERTKVSSYPVALIPGQFQEYYKRYSPDELRYLPLNTALYEPPLDPELPALDSDGDSDDGEDGRGDEKRKNKGTSDSSSGNVSEGESPPDSQEDSFQGRQKSKDKAATPRKDGPKRSVLSKSVPGYKPKVIPNAICGICLKGKESNKKGKAESLIHCSQCENSGHPSCLDMTMELVSMIKTYPWQCMECKTCIICGQPHHEEEMMFCDMCDRGYHTFCVGLGAIPSGRWICDCCQRAPPTPRKVGRRGKNSKEG

SEQ ID NO: 6678 - protein, 594 aa, Homo sapiens
MTDKSIVILSLMVFHSSFINGKTCRRQLVEEWHPQPSSYVVNWTLTENICLDFYRDCWFLGVNTKIDTSGNQAVPQICPLQIQLGDILVISSEPSLQFPEINLMNVSETSFVGCVQNTTTEDQLLFGCRLKGMHTVNSKWLSVGTHYFITVMASGPSPCPLGLRLNVTVKQQFCQESLSSEFCSGHGKCLSEAWSKTYSCHCQPPFSGKYCQELDACSFKPCKNNGSCINKRENWDEQAYECVCHPPFTGKNCSEIIGQCQPHVCFHGNCSNITSNSFICECDEQFSGPFCEVSAKPCVSLLFWKRGICPNSSSAYTYECPKGSSSQNGETDVSEFSLVPCQNGTDCIKISNDVMCICSPIFTDLLCKSIQTSCESFPLRNNATCKKCEKDYPCSCISGFTEKNCEKAIDHCKLLSINCLNEEWCFNIIGRFKYVCIPGCTKNPCWFLKNVYLIHQHLCYCGVTFHGICQDKGPAQFEYVWQLGFAGSEGEKCQGVIDAYFFLAANCTEDATYVNDPEDNNSSCWFPHEGTKEICANGCSCLSEEDSQEYRYLCFLRWAGNMYLENTTDDQENECQHEAVCKDEINRPRYLCII

SEQ ID NO: 6679 - protein, 325 aa, Homo sapiens
MPSSTAMAVGALSSSLLVTCCLMVALCSPSIPLEKLAQAPEQPGQEKREHASRDGPGRVNELGRPARDEGGSGRDWKSKSGRGLAGREPWSKLKQAWVSQGGGAKAGDLQVRPRGDTPQAEALAAAAQDAIGPELAPTPEPPEEYVYPDYRGKGCVDESGFVYAIGEKFAPGPSACPCLCTEEGPLCAQPECPRLHPRCIHVDTSQCCPQCKERKNYCEFRGKTYQTLEEFVVSPCERCRCEANGEVLCTVSACPQTECVDPVYEPDQCCPICKNGPNCFAETAVIPAGREVKTDECTICHCTYEEGTWRIERQAMCTRHECRQM

SEQ ID NO: 6680 - protein, 372 aa, Homo sapiens
MSKSESPKEPEQLRKLFIGGLSFETTDESLRSHFEQWGTLTDCVVMRDPNTKRSRGFGFVTYATVEEVDAAMNARPHKVDGRVVEPKRAVSREDSQRPGAHLTVKKIFVGGIKEDTEEHHLRDYFEQYGKIEVIEIMTDRGSGKKRGFAFVTFDDHDSVDKIVIQKYHTVNGHNCEVRKALSKQEMASASSSQRGRSGSGNFGGGRGGGFGGNDNFGRGGNFSGRGGFGGSRGGGGYGGSGDGYNGFGNDGGYGGGGPGYSGGSRGYGSGGQGYGNQGSGYGGSGSYDSYNNGGGGGFGGGSGSNFGGGGSYNDFGNYNNQSSNFGPMKGGNFGGRSSGPYGGGGQYFAKPRNQGGYGGSSSSSSYGSGRRF

SEQ ID NO: 6681 - protein, 476 aa, Homo sapiens [sequence omitted]

SEQ ID NO: 6682 - protein, 3259 aa, Homo sapiens
MLSRLSGLANVVLHELSGDDDTDQNMRAPLDPELHQESDMEFNNTTQEDVQERLAYAEQLVVELKDIIRQKDVQLQQKDEALQEERKAADNKIKKLKLHAKAKLTSLNKYIEEMKAQGGTVLPTEPQSEEQLSKHDKSSTEEEMEIEKIKHKLQEKEELISTLQAQLTQAQAEQPAQSSTEMEEFVMMKQQLQEKEEFISTLQAQLSQTQAEQAAQQVVREKDARFETQVRLHEDELLQLVTQADVETEMQQKLRVLQRKLEEHEESLVGRAQVVDLLQQELTAAEQRNQILSQQLQQMEAEHNTLRNTVETEREESKILLEKMELEVAERKLSFHNLQEEMHHLLEQFEQAGQAQAELESRYSALEQKHKAEMEEKTSHILSLQKTGQELQSACDALKDQNSKLLQDKNEQAVQSAQTIQQLEDQLQQKSKEISQFLNRLPLQQHETASQTSFPDVYNEGTQAVTEENIASLQKRVVELENEKGALLLSSIELEELKAENEKLSSQITLLEAQNRTGEADREVSEISIVDIANKRSSSAEESGQDVLENTFSQKHKELSVLLLEMKEAQEEIAFLKLQLQGKRAEEADHEVLDQKEMKQMEGEGIAPIKMKVFLEDTGQDFPLMPNEESSLPAVEKEQASTEHQSRTSEEISLNDAGVELKSTKQDGDKSLSAVPDIGQCHQDELERLKSQILELELNFHKAQEIYEKNLDEKAKEISNLNQLIEEFKKNADNNSSAFTALSEERDQLLSQVKELSMVTELRAQVKQLEMNLAEAERQRRLDYESQTAHDNLLTEQIHSLSIEAKSKDVKIEVLQNELDDVQLQFSEQSTLIRSLQSQLQNKESEVLEGAERVRHISSKVEELSQALSQKELEITKMDQLLLEKKRDVETLQQTIEEKDQQVTEISFSMTEKMVQLNEEKFSLGVEIKTLKEQLNLLSRAEEAKKEQVEEDNEVSSGLKQNYDEMSPAGQISKEELQHEFDLLKKENEQRKRKLQAALINRKELLQRVSRLEEELANLKDESKKEIPLSETERGEVEEDKENKEYSEKCVTSKCQEIEIYLKQTISEKEVELQHIRKDLEEKLAAEEQFQALVKQMNQTLQDKTNQIDLLQAEISENQAIIQKLITSNTDASDGDSVALVKETVVISPPCTGSSEHWKPELEEKILALEKEKEQLQKKLQEALTSRKAILKKAQEKERHLREELKQQKDDYNRLQEQFDEQSKENENIGDQLRQLQIQVRESIDGKLPSTDQQESCSSTPGLEEPLFKATEQHHTQPVLESNLCPDWPSHSEDASALQGGTSVAQIKAQLKEIEAEKVELELKVSSTTSELTKKSEEVFQLQEQINKQGLEIESLKTVSHEAEVHAESLQQKLESSQLQIAGLEHLRELQPKLDELQKLISKKEEDVSYLSGQLSEKEAALTKIQTEIIEQEDLIKALHTQLEMQAKEHDERIKQLQVELCEMKQKPEEIGEESRAKQQIQRKLQAALISRKEALKENKSLQEELSLARGTIERLTKSLADVESQVSAQNKEKDTVLGRLALLQEERDKLITEMDRSLLENQSLSSSCESLKLALEGLTEDKEKLVKEIESLKSSKIAESTEWQEKHKELQKEYEILLQSYENVSNEAERIQHVVEAVRQEKQELYGKLRSTEANKKETEKQLQEAEQEMEEMKEKMRKFAKSKQQKILELEEENDRLRAEVHPAGDTAKECMETLLSSNASMKEELERVKMEYETLSKKFQSLMSEKDSLSEEVQDLKHQIEGNVSKQANLEATEKHDNQTNVTEEGTQSIPGETEEQDSLSMSTRPTCSESVPSAKSANPAVSKDFSSHDEINNYLQQIDQLKERIAGLEEEKQKNKEFSQTLENEKNTLLSQISTKDGELKMLQEEVTKMNLLNQQIQEELSRVTKLKETAEEEKDDLEERLMNQLAELNGSIGNYCQDVTDAQIKNELLESEMKNLKKCVSELEEEKQQLVKEKTKVESEIRKEYLEKIQGAQKEPGNKSHAKELQELLKEKQQEVKQLQKDCIRYQEKISALERTVKALEFVQTESQKDLEITKENLAQAVEHRKKAQAELASFKVLLDDTQSEAARVLADNLKLKKELQSNKESVKSQMKQKDEDLERRLEQAEEKHLKEKKNMQEKLDALRREKVHLEETIGEIQVTLNKKDKEVQQLQENLDSTVTQLAAFTKSMSSLQDDRDRVIDEAKKWERKFSDAIQSKEEEIRLKEDNCSVLKDQLRQMSIHMEELKINISRLEHDKQIWESKAQTEVQLQQKVCDTLQGENKELLSQLEETRHLYHSSQNELAKLESELKSLKDQLTDLSNSLEKCKEQKGNLEGIIRQQEADIQNSKFSYEQLETDLQASRELTSRLHEEINMKEQKIISLLSGKEEAIQVAIAELRQQHDKEIKELENLLSQEEEENIVLEEENKKAVDKTNQLMETLKTIKKENIQQKAQLDSFVKSMSSLQNDRDRIVGDYQQLEERHLSIILEKDQLIQEAAAENNKLKEEIRGLRSHMDDLNSENAKLDAELIQYREDLNQVITIKDSQQKQLLEVQLQQNKELENKYAKLEEKLKESEEANEDLRRSFNALQEEKQDLSKEIESLKVSISQLTRQVTALQEEGTLGLYHAQLKVKEEEVHRLSALFSSSQKRIAELEEELVCVQKEAAKKVGEIEDKLKKELKHLHHDAGIMRNETETAEERVAELARDLVEMEQKLLMVTKENKGLTAQIQSFGRSMSSLQNSRDHANEELDELKRKYDASLKELAQLKEQGLLNRERDALLSETAFSMNSTEENSLSHLEKLNQQLLSKDEQLLHLSSQLEDSYNQVQSFSKAMASLQNERDHLWNELEKFRKSEEGKQRSAAQPSTSPAEVQSLKKAMSSLQNDRDRLLKELKNLQQQYLQINQEITELHPLKAQLQEYQDKTKAFQIMQEELRQENLSWQHELHQLRMEKSSWEIHERRMKEQYLMAISDKDQQLSHLQNLIRELRSSSSQTQPLKVQYQRQASPETSASPDGSQNLVYETELLRTQLNDSLKEIHQKELRIQQLNSNFSQLLEEKNTLSIQLCDTSQSLRENQQHYGDLLNHCAVLEKQVQELQAGPLNIDVAPGAPQEKNGVHRKSDPEELREPQQSFSEAQQQLCNTRQEVNELRKLLEEERDQRVAAENALSVAEEQIRRLEHSEWDSSRTPIIGSCGTQEQALLIDLTSNSCRRTRSGVGWKRVLRSLCHSRTRVPLLAAIYFLMIHVLLILCFTGHL

SEQ ID NO: 6683 - protein, 463 aa, Homo sapiens
MASRLTLLTLLLLLLAGDRASSNPNATSSSSQDPESLQDRGEGKVATTVISKMLFVEPILEVSSLPTTNSTTNSATKITANTTDEPTTQPTTEPTTQPTIQPTQPTTQLPTDSPTQPTTGSFCPGPVTLCSDLESHSTEAVLGDALVDFSLKLYHAFSAMKKVETNMAFSPFSIASLLTQVLLGAGENTKTNLESILSYPKDFTCVHQALKGFTTKGVTSVSQIFHSPDLAIRDTFVNASRTLYSSSPRVLSNNSDANLELINTWVAKNTNNKISRLLDSLPSDTRLVLLNAIYLSAKWKTTFDPKKTRMEPFHFKNSVIKVPMMNSKKYPVAHFIDQTLKAKAIMEKLEMSKFQPTLLTLPRIKVTTSQDMLSIMEKLEFFDFSYDLNLCGLTEDPDLQVSAMQHQTVLELTETGVEAAAASAISVARTLLVFEVQQPFLFVLWDQQHKFPVFMGRVYDPRA

SEQ ID NO: 6684 - protein, 519 aa, Homo sapiens
MDLVGVASPEPGTAAAWGPSKCPWAIPQNTISCSLADVMSEQLAKELQLEEEAAVFPEVAVAEGPFITGENIDTSSDLMLAQMLQMEYDREYDAQLRREEKKFNGDSKVSISFENYRKVHPYEDSDSSEDEVDWQDTRDDPYRPAKPVPTPKKGFIGKGKDITTKHDEVVCGRKNTARMENFAPEFQVGDGIGMDLKLSNHVFNALKQHAYSEERRSARLHEKKEHSTAEKAVDPKTRLLMYKMVNSGMLETITGCISTGKESVVFHAYGGSMEDEKEDSKVIPTECAIKVFKTTLNEFKNRDKYIKDDFRFKDRFSKLNPRKIIRMWAEKEMHNLARMQRAGIPCPTVVLLKKHILVMSFIGHDQVPAPKLKEVKLNSEEMKEAYYQTLHLMRQLYHECTLVHADLSEYNMLWHAGKVWLIDVSQSVEPTHPHGLEFLFRDCRNVSQFFQKGGVKEALSERELFNAVSGLNITADNEADFLAEIEALEKMNEDHVQKNGRKAASFLKDDGDPPLLYDE

SEQ ID NO: 6685 - protein, 1028 aa, Homo sapiens
MRLLWKLVILLPLINSSAGDGLLSRPIFTQEPHDVIFPLDLSKSEVILNCAANGYPSPHYRWKQNGTDIDFTMSYHYRLDGGSLAINSPHTDQDIGMYQCLATNLLGTILSRKAKLQFAYIEDFETKTRSTVSVREGQGVVLLCGPPPHFGDLSYAWTFNDNPLYVQEDNRRFVSQETGNLYIAKVEPSDVGNYTCFITNKEAQRSVQGPPTPLVQRTDGVMGEYEPKIEVRFPETIQAAKDSSVKLECFALGNPVPDISWRRLDGSPLPGKVKYSKSQAILEIPNFQQEDEGFYECIASNLRGRNLAKGQLIFYAPPEWEQKIQNTHLSIYDNLLWECKASGKPNPWYTWLKNGERLNPEERIQIENGTLIITMLNVSDSGVYQCAAENKYQIIYANAELRVLASAPDFSKSPVKKKSFVQVGGDIVIGCKPNAFPRAAISWKRGTETLRQSKRIFLLEDGSLKIYNITRSDAGSYTCIATNQFGTAKNTGSLIVKERTVITVPPSKMDVTVGESIVLPCQVSHDPSIEVVFVWFFNGDVIDLKKGVAHFERIGGESVGDLMIRNIQLHHSGKYLCTVQTTLESLSAVADIIVRGPPGPPEDVQVEDISSTTSQLSWRAGPDNNSPIQIFTIQTRTPFSVGWQAVATVPEILNGKTYNATVVGLSPWVEYEFRVVAGNSIGIGEPSEPSELLRTKASVPVVAPVNIHGGGGSRSELVITWESIPEELQNGEGFGYIIMFRPVGSTTWSKEKVSSVESSRFVYRNESIIPLSPFEVKVGVYNNEGEGSLSTVTIVYSGEDEPQLAPRGTSLQSFSASEMEVSWNAIAWNRNTGRVLGYEVLYWTDDSKESMIGKIRVSGNVTTKNITGLKANTIYFASVRAYNTAGTGPSSPPVNVTTKKSPPSQPPANIAWKLTNSKLCLNWEHVKTMENESEVLGYKILYRQNRQSKTHILETNNTSAELLVPFEEDYLIEIRTVSDGGDGSSSEEIRIPKMSSLSSRGIQFLEPSTHFLSIVIVIFHCFAIQPLI

SEQ ID NO: 6686 - protein, 293 aa, Homo sapiens [sequence omitted]

SEQ ID NO: 6687 - protein, 1078 aa, Homo sapiens
MAKMEVKTSLLDNMIGVGDMVLLEPLNEETFINNLKKRFDHSEIYTYIGSVVISVNPYRSLPIYSPEKVEEYRNRNFYELSPHIFALSDEAYRSLRDQDKDQCILITGESGAGKTEASKLVMSYVAAVCGKGAEVNQVKEQLLQSNPVLEAFGNAKTVRNDNSSRFGKYMDIEFDFKGDPLGGVISNYLLEKSRVVKQPRGERNFHVFYQLLSGASEELLNKLKLERDFSRYNYLSLDSAKVNGVDDAANFRTVRNAMQIVGFMDHEAESVLAVVAAVLKLGNIEFKPESRVNGLDESKIKDKNELKEICELTGIDQSVLERAFSFRTVEAKQEKVSTTLNVAQAYYARDALAKNLYSRLFSWLVNRINESIKAQTKVRKKVMGVLDIYGFEIFEDNSFEQFIINYCNEKLQQIFIELTLKEEQEEYIREDIEWTHIDYFNNAIICDLIENNTNGILAMLDEECLRPGTVTDETFLEKLNQVCATHQHFESRMSKCSRFLNDTSLPHSCFRIQHYAGKVLYQVEGFVDKNNDLLYRDLSQAMWKASHALIKSLFPEGNPAKINLKRPPTAGSQFKASVATLMKNLQTKNPNYIRCIKPNDKKAAHIFNEALVCHQIRYLGLLENVRVRRAGYAFRQAYEPCLERYKMLCKQTWPHWKGPARSGVEVLFNELEIPVEEYSFGRSKIFIRNPRTLFKLEDLRKQRLEDLATLIQKIYRGWKCRTHFLLMKKSQIVIAAWYRRYAQQKRYQQTKSSALVIQSYIRGWKARKILRELKHQKRCKEAVTTIAAYWHGTQVRREYRKFFRANAGKKIYEFTLQRIVQKYFLEMKNKMPSLSPIDKNWPSRPYLFLDSTHKELKRIFHLWRCKKYRDQFTDQQKLIYEEKLEASELFKDKKALYPSSVGQPFQGAYLEINKNPKYKKLKDAIEEKIIIAEVVNKINRANGKSTSRIFLLTNNNLLLADQKSGQIKSEVPLVDVTKVSMSSQNDGFFAVHLKEGSEAASKGDFLFSSDHLIEMATKLYRTTLSQTKQKLNIEISDEFLVQFRQDKVCVKFIQGNQKNGSVPTCKRKNNRLLEVAVP

SEQ ID NO: 6688 - protein, 387 aa, Homo sapiens
MEVLAAETTSQQERLQAIAEKRKRQAEIENKRRQLEDERRQLQHLKSKALRERWLLEGTPSSASEGDEDLRRQMQDDEQKTRLLEDSVSRLEKEIEVLERGDSAPATAKENAAAPSPVRAPAPSPAKEERKTEVVMNSQQTPVGTPKDKRVSNTPLRTVDGSPMMKAAMYSVEITVEKDKVTGETRVLSSTTLLPRQPLPLGIKVYEDETKVVHAVDGTAENGIHPLSSSEVDELIHKADEVTLSEAGSTAGAAETRGAVEGAARTTPSRREITGVQAQPGEATSGPPGIQPGQEPPVTMIFMGYQNVEDEAETKKVLGLQDTITAELVVIEDAAEPKEPAPPNGSAAEPPTEAASREENQAGPEATTSDPQDLDMKKHRCKCCSIM

SEQ ID NO: 6689 - protein, 625 aa, Homo sapiens
MDRGTLPLAVALLLASCSLSPTSLAETVHCDLQPVGPERGEVTYTTSQVSKGCVAQAPNAILEVHVLFLEFPTGPSQLELTLQASKQNGTWPREVLLVLSVNSSVFLHLQALGIPLHLAYNSSLVTFQEPPGVNTTELPSFPKTQILEWAAERGPITSAAELNDPQSILLRLGQAQGSLSFCMLEASQDMGRTLEWRPRTPALVRGCHLEGVAGHKEAHILRVLPGHSAGPRTVTVKVELSCAPGDLDAVLILQGPPYVSWLIDANHNMQIWTTGEYSFKIFPEKNIRGFKLPDTPQGLLGEARMLNASIVASFVELPLASIVSLHASSCGGRLQTSPAPIQTTPPKDTCSPELLMSLIQTKCADDAMTLVLKKELVAHLKCTITGLTFWDPSCEAEDRGDKFVLRSAYSSCGMQVSASMISNEAVVNILSSSSPQRKKVHCLNMDSLSFQLGLYLSPHFLQASNTIEPGQQSFVQVRVSPSVSEFLLQLDSCHLDLGPEGGTVELIQGRAAKGNCVSLLSPSPEGDPRFSFLLHFYTVPIPKTGTLSCTVALRPKTGSQDQEVHRTVFMRLNIISPDLSGCTSKGLVLPAVLGITFGAFLIGALLTAALWYIYSHTREYPRPPQ

SEQ ID NO: 6690 - protein, 97 aa, Homo sapiens
MSPAFRAMDVEPRAKGVLLEPFVHQVGGHSCVLRFNETTLCKPLVPREHQFYETLPAEMRKFTPQYKGQSQRPLVSWPSLPHFFPWSFPLWPQGSVA

SEQ ID NO: 6691 - protein, 339 aa, Homo sapiens
MARHGLPLLPLLSLLVGAWLKLGNGQATSMVQLQGGRFLMGTNSPDSRDGDGPVREATVKPFAIDIFPVTNKDFRDFVREKKYRTEAEMFGWSFVFEDFVSDELRNKATQPMKSVLWWLPVEKAFWRQPAGPGSGIRERLEHPVLHVSWNDARAYCAWRGKRLPTEEEWEFAARGGLKGQVYPWGNWFQPNRTNLWQGKFPKGDKAEDGFHGVSPVNAFPAQNNYGWATLQIQPQTTSVSAVLQTQAGRQGSCKQPGGDKEKSLLGSLSFPGHVANSAIPSSRASASGKNFPFPVSHPSVAGASHQGRRGLSLLCFGEGAQCVLTMAGGQVFLLEAKYY

SEQ ID NO: 6692 - protein, 749 aa, Homo sapiens
MEVVPAEVNSLLPEEIMDTGITLVDDDSIEAVIVSSPIPMETELEEIVNINSTGDSTATPISTEPITVYSNHTNQVAVNTTITKADSNTTVKPAFPSGLQKLGAQTPVTISANQIILNKVSQTSDLKLGNQTLKPDGQKLILTTLGKSGSPIVLALPHSQLPQAQKVTTQAQSGDAKLPPQQIKVVTIGGRPEVKPVIGVSALTPGSQLINTTTQPSVLQTQQLKTVQIAKKPRTPTSGPVITKLIFAKPINSKAVTGQTTQVSPPVIAGRVLSQSTPGTPSKTITISESGVIGSTLNSTTQTPNKIAISPLKSPNKAVKSTVQTITVGGVSTSQFKTIIPLATAPNVQQIQVPGSKFHYVRLVTATSASSSTQPVSQNPSTNTQPLQQAKPVVVNTTPVRMSVPIVSAQAVKQVVPKPINPTSQIVTTSQPQQRLIMPATPLPQIQPNLTNLPPGTVLAPAPGTGNVGYAVLPAQYVTQLQQSSYVSIASNSTFTGTSGIQTQARLPFNGIIPSESASRPRKPCNCTKSLCLKLYCDCFANGEFCNNCNCTNCYNNLEHENERQKAIKACLDRNPEAFKPKIGKGKEGESDRRHSKGCNCKRSGCLKNYCECYEAKIMCSSICKCIGCKNFEESPERKTLMHLADAAEVRVQQQTAAKTKLSSQISDLLTRPTPALNSGGGKLPFTFVTKEVAEATCNCLLAQAEQADKKGKSKAAAERMILEEFGRCLMSVINSAGKAKSDPCAMNC

SEQ ID NO: 6693 - protein, 1134 aa, Homo sapiens
MRFGSKMMPMFLTVYLSNNEQHFTEVPVTPETICRDVVDLCKEPGESDCHLAEVWCGSERPVADNERMFDVLQRFGSQRNEVRFFLRHERPPGRDIVSGPRSQDPSLKRNGVKVPGEYRRKENGVNSPRMDLTLAELQEMASRQQQQIEAQQQLLATKEQRLKFLKQQDQRQQQQVAEQEKLKRLKEIAENQEAKLKKVRALKGHVEQKRLSNGKLVEEIEQMNNLFQQKQRELVLAVSKVEELTRQLEMLKNGRIDSHHDNQSAVAELDRLYKELQLRNKLNQEQNAKLQQQRECLNKRNSEVAVMDKRVNELRDRLWKKKAALQQKENLPVSSDGNLPQQAASAPSRVAAVGPYIQSSTMPRMPSRPELLVKPALPDGSLVIQASEGPMKIQTLPNMRSGAASQTKGSKIHPVGPDWSPSNADLFPSQGSASVPQSTGNALDQVDDGEVPLREKEKKVRPFSMFDAVDQSNAPPSFGTLRKNQSSEDILRDAQVANKNVAKVPPPVPTKPKQINLPYFGQTNQPPSDIKPDGSSQQLSTVVPSMGTKPKPAGQQPRVLLSPSIPSVGQDQTLSPGSKQESPPAAAVRPFTPQPSKDTLLPPFRKPQTVAASSIYSMYTQQQAPGKNFQQAVQSALTKTHTRGPHFSSVYGKPVIAAAQNQQQHPENIYSNSQGKPGSPEPETEPVSSVQENHENERIPRPLSPTKLLPFLSNPYRNQSDADLEALRKKLSNAPRPLKKRSSITEPEGPNGPNIQKLLYQRTTIAAMETISVPSYPSKSASVTASSESPVEIQNPYLHVEPEKEVVSLVPESLSPEDVGNASTENSDMPAPSPGLDYEPEGVPDNSPNLQNNPEEPNPEAPHVLDVYLEEYPPYPPPPYPSGEPEGPGEDSVSMRPPEITGQVSLPPGKRTNLRKTGSERIAHGMRVKFNPLALLLDSSLEGEFDLVQRIIYEVDDPSLPNDEGITALHNAVCAGHTEIVKFLVQFGVNVNAADSDGWTPLHCAASCNNVQVCKFLVESGAAVFAMTYSDMQTAADKCEEMEEGYTQCSQFLYGVQEKMGIMNKGVIYALWDYEPQNDDELPMKEGDCMTIIHREDEDEIEWWWARLNDKEGYVPRNLLGLYPRIKPRQRSLA

SEQ ID NO: 6694 - protein, 617 aa, Homo sapiens
MSSLPTSDGFNHPARSSGQSPDVGNPMSLARSVSASVCPIKPSDSDRIEPKAVKALKASAEFQLNSEKKEHLSLQDLSDHASSADHAPTDQSPAMPMQNSSEEITVAGNLEKSAERSTQGLKFHLHTRQEASLSVTSTRMHEPQMFLGEKDWHPENQNLSQVSDPQQHEEPGNEQYEVAQQKASHDQEYLCNIGDLELPEERQQNQHKIVDLEATMKGNGLPQNVDPPSAKKSIPSSECSGCSNSETFMEIDTAQQSLVTLLNSTGRQNANVKNIGALDLTLDNPLMEVETSKCNPSSEILNDSISTQDLQPPETNVEIPGTNKEYGHYSSPSLCGSCQPSVESAEESCPSITAALKELHELLVVSSKPASENTSEEVICQSETIAEGQTSIKDLSERWTQNEHLTQNEQCPQVSFHQAISVSVETEKLTGTSSDTGREAVENVNFRSLGDGLSTDKEGVPKSRESINKNRSVTVTSAKTSNQLHCTLGVEISPKLLAGEEDALNQTSEQTKSLSSNFILVKDLGQGIQNSVTDRPETRENVCPDASRPLLEYEPPTSHPSSSPAILPPLIFPATDIDRILRAGFTLQEALGALHRVGGNADLALLVLLAKNIVVPT

SEQ ID NO: 6695 - protein, 516 aa, Homo sapiens
MALSQSVPFSATELLLASAIFCLVFWVLKGLRPRVPKGLKSPPEPWGWPLLGHVLTLGKNPHLALSRMSQRYGDVLQIRIGSTPVLVLSRLDTIRQALVRQGDDFKGRPDLYTSTLITDGQSLTFSTDSGPVWAARRRLAQNALNTFSIASDPASSSSCYLEEHVSKEAKALISRLQELMAGPGHFDPYNQVVVSVANVIGAMCFGQHFPESSDEMLSLVKNTHEFVETASSGNPLDFFPILRYLPNPALQRFKAFNQRFLWFLQKTVQEHYQDFDKNSVRDITGALFKHSKKGPRASGNLIPQEKIVNLVNDIFGAGFDTVTTAISWSLMYLVTKPEIQRKIQKELDTVIGRERRPRLSDRPQLPYLEAFILETFRHSSFLPFTIPHSTTRDTTLNGFYIPKKCCVFVNQWQVNHDPELWEDPSEFRPERFLTADGTAINKPLSEKMMLFGMGKRRCIGEVLAKWEIFLFLAILLQQLEFSVPPGVKVDLTPIYGLTMKHARCEHVQARLRFSIN

SEQ ID NO: 6696 - protein, 336 aa, Homo sapiens
MERKISRIHLVSEPSITHFLQVSWEKTLESGFVITLTDGHSAWTGTVSESEISQEADDMAMEKGKYVGELRKALLSGAGPADVYTFNFSKESCYFFFEKNLKDVSFRLGSFNLEKVENPAEVIRELICYCLDTIAENQAKNEHLQKENERLLRDWNDVQGRFEKCVSAKEALETDLYKRFILVLNEKKTKIRSLHNKLLNAAQEREKDIKQEGETAICSEMTADRDPVYDESTDEESENQTDLSGLASAAVSKDDSIISSLDVTDIAPSRKRRQRMQRNLGTEPKMAPQENQLQEKENSRPDSSLPETSKKEHISAENMSLETLRNSSPEDLFDEI

SEQ ID NO: 6697 - protein, 476 aa, Homo sapiens
MKFQGPLACLLLALCLGSGEAGPLQSGEESTGTNIGEALGHGLGDALSEGVGKAIGKEAGGAAGSKVSEALGQGTREAVGTGVRQVPGFGVADALGNRVGEAAHALGNTGHEIGRQAEDVIRHGADAVRGSWQGVPGHNGAWETSGGHGIFGSQGGLGGQGQGNPGGLGTPWVHGYPGNSAGSFGMNPQGAPWGQGGNGGPPNFGTNTQGAVAQPGYGSVRASNQNEGCTNPPPSGSGGGSSNSGGGSGSQSGSSGSGSNGDNNNGSSSGGSSSGSSSGGSSGGSSGGSSGNSGGSRGDSGSESSWGSSTGSSSGNHGGSGGGNGHKPGCEKPGNEARGSGESGIQNSETSPGMFNFDTFWKNFKSKLGFINWDAINKNQVPPPSTRALLYFSRLWEDFKQNTPFLNWKAIIEGADASSLQKRAGRDDQNYNYNQHAYPTAYGGKYSVKTPAKGGVSPSSSASRVQPGLLQWVKFW

SEQ ID NO: 6698 - protein, 90 aa, Homo sapiens
MSTAMNFGTKSFQPRPPDKGSFPLDHLGECKSFKEKFMKCLHNNNFENALCRKESKEYLECRMERKLMLQEPLEKLGFGDLTSGKSEAKK

SEQ ID NO: 6699 - protein, 1188 aa, Homo sapiens
MGPRKKSVKTCIMNNEIPEEMTADETKDYMNQLSHEVLCHIFRYLPLQDIMCMECLSRKLKEAVTLYLRVVRVVDLCAGRWWEYMPSGFTDASFLTLLKKMPDVEQLYGLHPRYLERRRVRGHEAFSIPGVLEALQACPNLVGVETSHLELVESIWTYMPHVHILGKFRNRNGAFPIPPENKLKIPIGAKIQTLHLVGVNVPEIPCIPMLRHLYMKWVRLTKPQPFKDFLCISLRTFVMRNCAGPTNSLKYVPLVTGLASARNLEHLEMVRVPFLGGLIQHVVEDSWRSGGFRNLHTIVLGACKNALEVDLGYLIITAARRLHEVRIQPSLTKDGVFSALKMAELEFPQFETLHLGYVDEFLLQSRMANADLVKYGLADVVENPGIITDIGMKAVNEVFSCIKYLAIYNCPHLHNPYNWISDHSRWTRLVDINLVRCHALKLDSFGQFIELLPSLEFISLDQMFREPPKGCARVGLSAGTGIGVSSALVSNQNSNNDDNNAQNNNANIHDNNHHHPDDSDEENDFRQDLQPGEQQFAADALNEMEDIVQEDGEVVAESGNNTPAHSQAIIPVDVDEEQAGPSGLQRVVKPTSITVHDSESDDEEDSLELQEVWIPKNGTRRYSEREEKTGESVQSRELSVSGKGKTPLRKRYNSHQMGQSKQFPLEESSCEKGCQVTSEQIKADMKAARDIPEKKKNKDVYPSCSSTTASTVGNSSSHNTASQSPDFVRTVNSGGSSEPSPTEVDVSRQCACSPGGSEDSEAMEEGDAESSVCPRCCCHRPQESQRRTSRCSDEERPSTSRACVVNGPDGTRSAFSFRTLPQGGSSGPAHDERTNGSGSGATGEDRRGSSQPESCDVQSNEDYPRRPLTRARSRLSHVLLVSESEVAKTKPRHAMKRKRTADKSTSTSDPVIEDDHVQVLVLKSKNLVGVTMTNCGITDLVLKDCPKMMFIHATRCRVLKHLKVENAPIVNRFDYAQCKKLNMDQVLDQILRMPPERNRIIYLRPMQQVDTLTLEQKLFSGPYPYHICIIHEFSNPPNVRNKVRIRSWMDTIANINQELIKYEFFPEATRSEEDLKKYPKYPWGREIYTLEGVVDGAPYSMISDFPWLRSLRAAEPNSFARYDFEDDEESTIYAPRRKGQLSADICMETIGEEISEMRQMKKGVFQRVVAIFIHYCDVNGEPVEDDYI

SEQ ID NO: 6700 - protein, 224 aa, Homo sapiens
MPGGLLLGDVAPNFEANTTVGRIRFHDFLGDSWGILFSHPRDFTPVCTTELGRAAKLAPEFAKRNVKLIALSIDSVEDHLAWSKDINAYNCEEPTEKLPFPIIDDRNRELAILLGMLDPAEKDEKGMPVTARVVFVFGPDKKLKLSILYPATTGRNFDEILRVVISLQLTAEKRVATPVDWKDGDSVMVLPTIPEEEAKKLFPKGVFTKELPSGKKYLRYTPQP

SEQ ID NO: 6701 - protein, 259 aa, Homo sapiens
MSKYKLIMLRHGEGAWNKENRFCSWVDQKLNSEGMEEARNCGKQLKALNFEFDLVFTSVLNRSIHTAWLILEELGQEWVPVESSWRLNERHYGALIGLNREQMALNHGEEQVRLWRRSYNVTPPPIEESHPYYQEIYNDRRYKVCDVPLDQLPRSESLKDVLERLLPYWNERIAPEVLRGKTILISAHGNSSRALLKHLEGISDEDIINITLPTGVPILLELDENLRAVGPHQFLGDQEAIQAAIKKVEDQGKVKQAKK

SEQ ID NO: 6702 - protein, 281 aa, Homo sapiens
MGHPPLLPLLLLLHTCVPASWGLRCMQCKTNGDCRVEECALGQDLCRTTIVRLWEEGEELELVEKSCTHSEKTNRTLSYRTGLKITSLTEVVCGLDLCNQGNSGRAVTYSRSRYLECISCGSSDMSCERGRHQSLQCRSPEEQCLDVVTHWIQEGEEGRPKDDRHLRGCGYLPGCPGSNGFHNNDTFHFLKCCNTTKCNEGPILELENLPQNGRQCYSCKGNSTHGCSSEETFLIDCRGPMNQCLVATGTHERSLWGSWLPCKSTTALRPPCCEEAQATHV

SEQ ID NO: 6703 - protein, 466 aa, Homo sapiens [sequence omitted]

SEQ ID NO: 6704 - protein, 339 aa, Homo sapiens
MWQLWASLCCLLVLANARSRPSFHPLSDELVNYVNKRNTTWQAGHNFYNVDMSYLKRLCGTFLGGPKPPQRVMFTEDLKLPASFDAREQWPQCPTIKEIRDQGSCGSCWAFGAVEAISDRICIHTNAHVSVEVSAEDLLTCCGSMCGDGCNGGYPAEAWNFWTRKGLVSGGLYESHVGCRPYSIPPCEHHVNGSRPPCTGEGDTPKCSKICEPGYSPTYKQDKHYGYNSYSVSNSEKDIMAEIYKNGPVEGAFSVYSDFLLYKSGVYQHVTGEMMGGHAIRILGWGVENGTPYWLVANSWNTDWGDNGFFKILRGQDHCGIESEVVAGIPRTDQYWEKI

SEQ ID NO: 6705 - protein, 358 aa, Homo sapiens
MPFLGQDWRSPGWSWIKTEDGWKRCESCSQKLERENNRCNISHSIILNSEDGEIFNNEEHEYASKKRKKDHFRNDTNTQSFYREKWIYVHKESTKERHGYCTLGEAFNRLDFSSAIQDIRRFNYVVKLLQLIAKSQLTSLSGVAQKNYFNILDKIVQKVLDDHHNPRLIKDLLQDLSSTLCILIRGVGKSVLVGNINIWICRLETILAWQQQLQDLQMTKQVNNGLTLSDLPLHMLNNILYRFSDGWDIITLGQVTPTLYMLSEDRQLWKKLCQYHFAEKQFCRHLILSEKGHIEWKLMYFALQKHYPAKEQYGDTLHFCRHCSILFWKDSGHPCTAADPDSCFTPVSPQHFIDLFKF

SEQ ID NO: 6706 - protein, 132 aa, Homo sapiens
MKSSGLFPFLVLLALGTLAPWAVEGSGKSFKAGVCPPKKSAQCLRYKKPECQSDWQCPGKKRCCPDTCGIKCLDPVDTPNPTRRKPGKCPVTYGQCLMLNPPNFCEMDGQCKRDLKCCMGMCGKSCVSPVKA

SEQ ID NO: 6707 - protein, 228 aa, Homo sapiens
MKTLFLGVTLGLAAALSFTLEEEDITGTWYVKAMVVDKDFPEDRRPRKVSPVKVTALGGGNLEATFTFMREDRCIQKKILMRKTEEPGKFSAYGGRKLIYLQELPGTDDYVFYCKDQRRGGLRYMGKLVASAPCRAVPLSPPWLTWPPHLQVGILIPTWRPWKNLRNWCSTRDSRRRTFSCPCRREAAFSNTRQPPGLHLQSPPYHQTQSPDHLDLPSSHDPSLLPPT

SEQ ID NO: 6708 - protein, 529 aa, Homo sapiens
MAPARTMARARLAPAGIPAVALWLLCTLGLQGTQAGPPPAPPGLPAGADCLNSFTAGVPGFVLDTNASVSNGATFLESPTVRRGWDCVRACCTTQNCNLALVELQPDRGEDAIAACFLINCLYEQNFVCKFAPREGFINYLTREVYRSYRQLRTQGFGGSGIPKAWAGIDLKVQPQEPLVLKDVENTDWRLLRGDTDVRVERKDPNQVELWGLKEGTYLFQLTVTSSDHPEDTANVTVTVLSTKQTEDYCLASNKVGRCRGSFPRWYYDPTEQICKSFVYGGCLGNKNNYLREEECILACRGVQGGPLRGSSGAQATFPQGPSMERRHPVCSGTCQPTQFRCSNGCCIDSFLECDDTPNCPDASDEAACEKYTSGFDELQRIHFPSDKGHCVDLPDTGLCKESIPRWYYNPFSEHCARFTYGGCYGNKNNFEEEQQCLESCRGISKKDVFGLRREIPIPSTGSVEMAVAVFLVICIVVVVAILGYCFFKNQRKDFHGHHHHPPPTPASSTVSTTEDTEHLVYNHTTRPL

SEQ ID NO: 6709 - protein, 643 aa, Homo sapiens
MATTAELFEEPFVADEYIERLVWRTPGGGSRGGPEAFDPKRLLEEFVNHIQELQIMDERIQRKVEKLEQQCQKEAKEFAKKVQELQKSNQIKEAADIIQKLHLIAQELPFDRFSEVKSKIASKYHDLECQLIQEFTSAQRRGEISRMREVAAVLLHFKGYSHCVDVYIKQCQEGAYLRNDIFEDAGILCQRVNKQVGDIFSNPETVLAKLIQNVFEIKLQSFVKEQLEECRKSDAEQYLKNLYDLYTRTTNLSSKLMEFNLGTDKQTFLSKLIKSIFISYLENYIEVETGYLKSRSAMILQRYYDSKNHQKRSIGTGGIQDLKERIRQRTNLPLGPSIDTHGETFLSQEVVVNLLQETKQAFERCHRLSDPSDLPRNAFRIFTILVEFLCIEHIDYALETGLAGIPSSDSRNANLYFLDVVQQANTIFHLFDKQFNDHLMPLISSSPKLSECLQKKKEIIEQMEMKLDTGIDRTLNCMIGQMKHILAAEQKKTDFKPEDENNVLIQYTNACVKVCAYVRKQVEKIKNSMDGKNVDTVLMELGVRFHRLIYEHLQQYSYSCMGGMLAICDVAEYRKCAKDFKIPMVLHLFDTLHALCNLLVVAPDNLKQVCSGEQLANLDKNILHSFVQLRADYRSARLARHFS

SEQ ID NO: 6710 - protein, 601 aa, Homo sapiens
MLTRKPSAAAPAAYPTGRGGDSAVRQLQASPGLGAGATRSGVGTGPPSPIALPPLRASNAAAAAHTIGGSKHTMNDHLHVGSHAHGQIQVQQLFEDNSNKRTVLTTQPNGLTTVGKTGLPVVPERQLDSIHRRQGSSTSLKSMEGMGKVKATPMTPEQAMKQYMQKLTAFEHHEIFSYPEIYFLGLNAKKRQGMTGGPNNGGYDDDQGSYVQVPHDHVAYRYEVLKVIGKGSFGQVVKAYDHKVHQHVALKMVRNEKRFHRQAAEEIRILEHLRKQDKDNTMNVIHMLENFTFRNHICMTFELLSMNLYELIKKNKFQGFSLPLVRKFAHSILQCLDALHKNRIIHCDLKPENILLKQQGRSGIKVIDFGSSCYEHQRVYTYIQSRFYRAPEVILGARYGMPIDMWSLGCILAELLTGYPLLPGEDEGDQLACMIELLGMPSQKLLDASKRAKNFVSSKGYPRYCTVTTLSDGSVVLNGGRSRRGKLRGPPESREWGNALKGCDDPLFLDFLKQCLEWDPAVRMTPGQALRHPWLRRRLPKPPTGEKTSVKRITESTGAITSISKLPPPSSSASKLRTNLAQMTDANGNIQQRTVLPKLVS

SEQ ID NO: 6711 - protein, 120 aa, Homo sapiens
MAEPSSARRPVPLIESELYFLIARYLSAGPCRRAAQVLVQELEQYQLLPKRLDWEGNEHNRSYEELVLSNKHVAPDHLLQICQRIGPMLDKEIPPSISRVTSLLGAGRQSLLRTAKGTLI

SEQ ID NO: 6712 - protein, 272 aa, Homo sapiens
MGSLFPLSLLFFLAAAYPGVGSALGRRTKRAQSPKGSPLAPSGTSVPFWVRMSPEFVAVQPGKSVQLNCSNSCPQPQNSSLRTPLRQGKTLRGPGWVSYQLLDVRAWSSLAHCLVTCAGKTRWATSRITAYSVPGGLLGGDPEAWKPGHLFRKPGALHRPGSGQRDLDLRVCCWTPRLLAARDLPRAPQSRRPGGPQQLGTHYTDARLEPRAHSFGLRFHRCPCRDPPHCGRCVPMQVPSYEVPGVKGDVLCRLSEKKRNMKQSGEMAIHGG

SEQ ID NO: 6713 - protein, 685 aa, Homo sapiens [sequence omitted]

SEQ ID NO: 6714 - protein, 371 aa, Homo sapiens
MELELDAGDQDLLAFLLEESGDLGTAPDEAVRAPLDWALPLSEVPSDWEVDDLLCSLLSPPASLNILSSSNPCLVHHDHTYSLPRETVSMDLESESCRKEGTQMTPQHMEELAEQEIARLVLTDEEKSLLEKEGLILPETLPLTKTEEQILKRVRRKIRNKRSAQESRRKKKVYVGGLESRVLKYTAQNMELQNKVQLLEEQNLSLLDQLRKLQAMVIEISNKTSSSSTCILVLLVSFCLLLVPAMYSSDTRGSLPAEHGVLSRQLRALPSEDPYQLELPALQSEVPKDSTHQWLDGSDCVLQAPGNTSCLLHYMPQAPSAEPPLEWPFPDLFSEPLCRGPILPLQANLTRKGGWLPTGSPSVILQDRYSG

SEQ ID NO: 6715 - protein, 1308 aa, Homo sapiens
MDPSGSRGRPTWVLAGGLLAVALALGGRGCLGASSRPRWRPLGAQPPRDPQVAPRSGPGLRIPPGRSGAGPESSTQDLPCMIWPKVECCHFKTAVEAPLGMKLDKKMEVFIPLSTSAASSGPWAHSLFAFIPSWPKKNLFKRESPITHRLYGDISREVQGTSENGVIFQKCALVSGSSEAQTARIWLLVNNTKTTSSANLSELLLLDSIAGLTIWDSVGNRTSEGFQAFSKKFLQVGDAFAVSYAATLQAGDLGNGESLKLPAQLTFQSSSRNRTQLKVLFSITAEENVTVLPHHGLHAAGFFIAFLLSLVLTWAALFLMVRYQCLKGNMLTRHRVWQYESKLEPLPFTSADGVNEDLSLNDQMIDILSSEDPGSMLQALEELEIATLNRADADLEACRTQISKDIIALLLKNLTSSGHLSPQVERKMSAVFKKQFLLLENEIQEEYDRKMVALTAECDLETRKKMENQYQREMMAMEEAEELLKRAGERSAVECSNLLRTLHGLEQEHLRKSLALQQEEDFAKAHRQLAVFQRNELHSIFFTQIKSAIFKGELKPEAAKMLLQNYSKIQENVEELMDFFQASKRYHLSKRFGHREYLVQNLQSSETRVQGLLSTAAAQLTHLIQKHERAGYLDEDQMEMLLERAQTEVFSIKQKLDNDLKQEKKKLHQKLITKRRRELLQKHREQRREQASVGEAFRTVEDAGQYLHQKRSLMEEHGATLEELQERLDQAALDDLRTLTLSLFEKATDELRRLQNSAMTQELLKRGVPWLFLQQILEEHGKEMAARAEQLEGEERDRDQEGVQSVRQRLKDDAPEAVTEEQAELRRWEHLIFMKLCSSVFSLSEEELLRMRQEVHGCFAQMDRSLALPKIRARVLLQQFQTAWREAEFVKLDQAVAAPELQQQSKVRKSRSKSKSKGELLKKCIEDKIHLCEEQASEDLVEKVRGELLRERVQRMEAQEGGFAQSLVALQFQKASRVTETLSAYTALLSIQDLLLEELSASEMLTKSACTQILESHSRELQELERKLEDQLVQQEAAQQQQALASWQQWVADGPGILNEPGEVDSERQVSTVLHQALSKSQTLLEQHQQCLREEQQNSVVLEDLLENMEADTFATLCSQELRLASYLARMAMVPGATLRRLLSVVLPTASQPQLLALLDSATERHVDHAAESDGGAEQADVGRRRKHQSWWQALDGKLRGDLISRGLEKMLWARKRKQSILKKTCLPLRERMIFSGKGSWPHLSLEPIGELAPVPIVGAETIDLLNTGEKLFIFRNPKEPEISLHVPPRKKKNFLNAKKAMRALGMD

SEQ ID NO: 6716 - protein, 74 aa, Homo sapiens
MTNVYSLDGILVFGLLFVCTCAYFKKVPRLKTWLLSEKKGVWGVFYKAAVIGTRLHAAVAIACVVMAFYVLFIK

SEQ ID NO: 6717 - protein, 201 aa, Homo sapiens
MAWMLLLILIMVHPGSCALWVSQPPEIRTLEGSSAFLPCSFNASQGRLAIGSVTWFRDEVVPGKEVRNGTPEFRGRLAPLASSRFLHDHQAELHIRDVRGHDASIYVCRVEVLGLGVGTGNGTRLVVEKEHPQLGAGTVLLLRAGFYAVSFLSVAVGSTVYYQGKCLTWKGPRRQLPAVVPAPLPPPCGSSAHLLPPVPGG

SEQ ID NO: 6718 - protein, 428 aa, Homo sapiens
MYSSPLCLTQDEFHPFIEALLPHVRAFAYTWFNLQARKRKYFKKHEKRMSKDEERAVKDELLGEKPEVKQKWASRLLAKLRKDIRPECREDFVLSITGKKAPGCVLSNPDQKGKMRRIDCLRQADKVWRLDLVMVILFKGIPLESTDGERLVKAAQCGHPVLCVQPHHIGVAVKELDLYLAYFVRERDAEQSGSPRTGMGSDQEDSKPITLDTTDFQESFVTSGVFSVTELIQVSRTPVVTGTGPNFSLGELQGHLAYDLNPASTGLRRTLPSTSSSGSKRHKSGSMEEDVDTSPGGDYYTSPSSPTSSSRNWTEDMEGGISSPVKKTEMDKSPFNSPSPQDSPRLSSFTQHHRPVIAVHSGIARSPHPSSALHFPTTSILPQTASTYFPHTAIRYPPHLNPQDPLKDLVSLACDPASQQPGPSWYLG

SEQ ID NO: 6719 - protein, 500 aa, Homo sapiens
MALMLSLVLSLLKLGSGQWQVFGPDKPVQALVGEDAAFSCFLSPKTNAEAMEVRFFRGQFSSVVHLYRDGKDQPFMQMPQYQGRTKLVKDSIAEGRISLRLENITVLDAGLYGCRISSQSYYQKAIWELQVSALGSVPLISITGYVDRDIQLLCQSSGWFPRPTAKWKGPQGQDLSTDSRTNRDMHGLFDVEISLTVQENAGSISCSMRHAHLSREVESRVQIGDTFFEPISWHLATKVLGILCCGLFFGIVGLKIFFSKFQWKIQAELDWRRKHGQAELRDARKHAVEVTLDPETAHPKLCVSDLKTVTHRKAPQEVPHSEKRFTRKSVVASQSFQAGKHYWEVDGGHNKRWRVGVCRDDVDRRKEYVTLSPDHGYWVLRLNGEHLYFTLNPRFISVFPRTPPTKIGVFLDYECGTISFFNINDQSLIYTLTCRFEGLLRPYIEYPSYNEQNGTPIVICPVTQESEKEASWQRASAIPETSNSESSSQATTPFLPRGEM

SEQ ID NO: 6720 - protein, 2542 aa, Homo sapiens
MGISTVILEMCLLWGQVLSTGGWIPRTTDYASLIPSEVPLDPTVAEGSPFPSESTLESTVAEGSPISLESTLESTVAEGSLIPSESTLESTVAEGSDSGLALRLVNGDGRCQGRVEILYRGSWGTVCDDSWDTNDANVVCRQLGCGWAMSAPGNAWFGQGSGPIALDDVRCSGHESYLWSCPHNGWLSHNCGHGEDAGVICSAAQPQSTLRPESWPVRISPPVPTEGSESSLALRLVNGGDRCRGRVEVLYRGSWGTVCDDYWDTNDANVVCRQLGCGWAMSAPGNAQFGQGSGPIVLDDVRCSGHESYLWSCPHNGWLTHNCGHSEDAGVICSAPQSRPTPSPDTWPTSHASTAGPESSLALRLVNGGDRCQGRVEVLYRGSWGTVCDDSWDTSDANVVCRQLGCGWATSAPGNARFGQGSGPIVLDDVRCSGYESYLWSCPHNGWLSHNCQHSEDAGVICSAAHSWSTPSPDTLPTITLPASTVGSESSLALRLVNGGDRCQGRVEVLYRGSWGTVCDDSWDTNDANVVCRQLGCGWAMLAPGNARFGQGSGPIVLDDVRCSGNESYLWSCPHNGWLSHNCGHSEDAGVICSGPESSLALRLVNGGDRCQGRVEVLYRGSWGTVCDDSWDTNDANVVCRQLGCGWATSAPGNARFGQGSGPIVLDDVRCSGHESYLWSCPNNGWLSHNCGHHEDAGVICSAAQSRSTPRPDTLSTITLPPSTVGSESSLTLRLVNGSDRCQGRVEVLYRGSWGTVCDDSWDTNDANVVCRQLGCGWATSAPGNARFGQGSGPIVLDDVRCSGHESYLWSCPHNGWLSHNCGHHEDAGVICSVSQSRPTPSPDTWPTSHASTAGPESSLALRLVNGGDRCQGRVEVLYRGSWGTVCDDSWDTSDANVVCRQLGCGWATSAPGNARFGQGSGPIVLDDVRCSGYESYLWSCPHNGWLSHNCQHSEDAGVICSAAHSWSTPSPDTLPTITLPASTVGSESSLALRLVNGGDRCQGRVEVLYQGSWGTVCDDSWDTNDANVVCRQLGCGWAMSAPGNARFGQGSGPIVLDDVRCSGHESYLWSCPHNGWLSHNCGHSEDAGVICSASQSRPTPSPDTWPTSHASTAGSESSLALRLVNGGDRCQGRVEVLYRGSWGTVCDDYWDTNDANVVCRQLGCGWAMSAPGNARFGQGSGPIVLDDVRCSGHESYLWSCPHNGWLSHNCGHHEDAGVICSASQSQPTPSPDTWPTSHASTAGSESSLALRLVNGGDRCQGRVEVLYRGSWGTVCDDYWDTNDANVVCRQLGCGWATSAPGNARFGQGSGPIVLDDVRCSGHESYLWSCPHNGWLSHNCGHHEDAGVICSASQSQPTPSPDTWPTSHASTAGSESSLALRLVNGGDRCQGRVEVLYRGSWGTVCDDYWDTNDANVVCRQLGCGWATSAPGNARFGQGSGPIVLDDVRCSGHESYLWSCPHNGWLSHNCGHHEDAGVICSASQSQPTPSPDTWPTSHASTAGSESSLALRLVNGGDRCQGRVEVLYRGSWGTVCDDYWDTNDANVVCRQLGCGWATSAPGNARFGQGSGPIVLDDVRCSGHESYLWSCPHNGWLSHNCGHHEDAGVICSASQSQPTPSPDTWPTSRASTAGSESTLALRLVNGGDRCRGRVEVLYQGSWGTVCDDYWDTNDANVVCRQLGCGWAMSAPGNAQFGQGSGPIVLDDVRCSGHESYLWSCPHNGWLSHNCGHHEDAGVICSAAQSQSTPRPDTWLTTNLPALTVGSESSLALRLVNGGDRCRGRVEVLYRGSWGTVCDDSWDTNDANVVCRQLGCGWAMSAPGNARFGQGSGPIVLDDVRCSGNESYLWSCPHKGWLTHNCGHHEDAGVICSATQINSTTTDWWHPTTTTTARPSSNCGGFLFYASGTFSSPSYPAYYPNNAKCVWEIEVNSGYRINLGFSNLKLEAHHNCSFDYVEIFDGSLNSSLLLGKICNDTRQIFTSSYNRMTIHFRSDISFQNTGFLAWYNSFPSDATLRLVNLNSSYGLCAGRVEIYHGGTWGTVCDDSWTIQEAEVVCRQLGCGRAVSALGNAYFGSGSGPITLDDVECSGTESTLWQCRNRGWFSHNCNHREDAGVICSGNHLSTPAPFLNITRPNTDYSCGGFLSQPSGDFSSPFYPGNYPNNAKCVWDIEVQNNYRVTVIFRDVQLEGGCNYDYIEVFDGPYRSSPLIARVCDGARGSFTSSSNFMSIRFISDHSITRRGFRAEYYSSPSNDSTNLLCLPNHMQASVSRSYLQSLGFSASDLVISTWNGYYECRPQITPNLVIFTIPYSGCGTFKQADNDTIDYSNFLTAAVSGGIIKRRTDLRIHVSCRMLQNTWVDTMYIANDTIHVANNTIQVEEVQYGNFDVNISFYTSSSFLYPVTSRPYYVDLNQDLYVQAEILHSDAVLTLFVDTCVASPYSNDFTSLTYDLIRSGCVRDDTYGPYSSPSLRIARFRFRAFHFLNRFPSVYLRCKMVVCRAYDPSSRCYRGCVLRSKRDVGSYQEKVDVVLGPIQLQTPPRREEEPR

SEQ ID NO: 6721 - protein, 566 aa, Homo sapiens
MERAAPSRRVPLPLLLLGGLALLAAGVDADVLLEACCADGHRMATHQKDCSLPYATESKECRMVQEQCCHSQLEELHCATGISLANEQDRCATPHGDNASLEATFVKRCCHCCLLGRAAQAQGQSCEYSLMVGYQCGQVFQACCVKSQETGDLDVGGLQETDKIIEVEEEQEDPYLNDRCRGGGPCKQQCRDTGDEVVCSCFVGYQLLSDGVSCEDVNECITGSHSCRLGESCINTVGSFRCQRDSSCGTGYELTEDNSCKDIDECESGIHNCLPDFICQNTLGSFRCRPKLQCKSGFIQDALGNCIDINECLSISAPCPIGHTCINTEGSYTCQKNVPNCGRGYHLNEEGTRCVDVDECAPPAEPCGKGHRCVNSPGSFRCECKTGYYFDGISRMCVDVNECQRYPGRLCGHKCENTLGSYLCSCSVGFRLSVDGRSCEDINECSSSPCSQECANVYGSYQCYCRRGYQLSDVDGVTCEDIDECALPTGGHICSYRCINIPGSFQCSCPSSGYRLAPNGRNCQDIDECVTGIHNCSINETCFNIQGGFRCLAFECPENYRRSAAT

SEQ ID NO: 6722 - protein, 341 aa, Homo sapiens
MSLMVVSMVCVGFFLLQGAWPHEGVHRKPSLLAHPGPLVKSEETVILQCWSDVRFQHFLLHREGKFKDTLHLIGEHHDGVSKANFSIGPMMQDLAGTYRCYGSVTHSPYQLSAPSDPLDIVITGLYEKPSLSAQPGPTVLAGESVTLSCSSRSSYDMYHLSREGEAHERRFSAGPKVNGTFQADFPLGPATHGGTYRCFGSFRDSPYEWSNSSDPLLVSVTGNPSNSWPSPTEPSSETGNPRHLHVLIGTSVVIILFILLLFFLLHRWCCNKKNAVVMDQEPAGNRTVNREDSDEQDPQEVTYAQLNHCVFTQRKITRPSQRPKTPPTDIIVYTELPNAEP

SEQ ID NO: 6723 - protein, 1624 aa, Homo sapiens
MSKRRMSVGQQTWALLCKNCLKKWRMKRQTLLEWLFSFLLVLFLYLFFSNLHQVHDTPQMSSMDLGRVDSFNDTNYVIAFAPESKTTQEIMNKVASAPFLKGRTIMGWPDEKSMDELDLNYSIDAVRVIFTDTFSYHLKFSWGHRIPMMKEHRDHSAHCQAVNEKMKCEGSEFWEKGFVAFQAAINAAIIEIATNHSVMEQLMSVTGVHMKILPFVAQGGVATDFFIFFCIISFSTFIYYVSVNVTQERQYITSLMTMMGLRESAFWLSWGLMYAGFILIMATLMALIVKSAQIVVLTGFVMVFTLFLLYGLSLITLAFLMSVLIKKPFLTGLVVFLLIVFWGILGFPALYTRLPAFLEWTLCLLSPFAFTVGMAQLIHLDYDVNSNAHLDSSQNPYLIIATLFMLVFDTLLYLVLTLYFDKILPAEYGHRCSPLFFLKSCFWFQHGRANHVVLENETDSDPTPNDCFEPVSPEFCGKEAIRIKNLKKEYAGKCERVEALKGVVFDIYEGQITALLGHSGAGKTTLLNILSGLSVPTSGSVTVYNHTLSRMADIENISKFTGFCPQSNVQFGFLTVKENLRLFAKIKGILPHEVEKEVQRVVQELEMENIQDILAQNLSGGQNRKLTFGIAILGDPQVLLLDEPTAGLDPLSRHRIWNLLKEGKSDRVILFSTQFIDEADILADRKVFISNGKLKCAGSSLFLKKKWGIGYHLSLHLNERCDPESITSLVKQHISDAKLTAQSEEKLVYILPLERTNKFPELYRDLDRCSNQGIEDYGVSITTLNEVFLKLEGKSTIDESDIGIWGQLQTDGAKDIGSLVELEQVLSSFHETRKTISGVALWRQQVCAIAKVRFLKLKKERKSLWTILLLFGISFIPQLLEHLFYESYQKSYPWELSPNTYFLSPGQQPQDPLTHLLVINKTGSTIDNFLHSLRRQNIAIEVDAFGTRNGTDDPSYNGAIIVSGDEKDHRFSIACNTKRLNCFPVLLDVISNGLLGIFNSSEHIQTDRSTFFEEHMDYEYGYRSNTFFWIPMAASFTPYIAMSSIGDYKKKAHSQLRISGLYPSAYWFGQALVDVSLYFLILLLMQIMDYIFSPEEIIFIIQNLLIQILCSIGYVSSLVFLTYVISFIFRNGRKNSGIWSFFFLIVVIFSIVATDLNEYGFLGLFFGTMLIPPFTLIGSLFIFSEISPDSMDYLGASESEIVYLALLIPYLHFLIFLFILRCLEMNCRKKLMRKDPVFRISPRSNAIFPNPEEPEGEEEDIQMERMRTVNAMAVRDFDETPVIIASCLRKEYAGKKKNCFSKRKKKIATRNVSFCVKKGEVIGLLGHNGAGKSTTIKMITGDTKPTAGQVILKGSGGGEPLGFLGYCPQENALWPNLTVRQHLEVYAAVKGLRKGDAMIAITRLVDALKLQDQLKAPVKTLSEGIKRKLCFVLSILGNPSVVLLDEPSTGMDPEGQQQMWQVIRATFRNTERGALLTTHYMAEAEAVCDRVAIMVSGRLRCIGSIQHLKSKFGKDYLLEMKLKNLAQMEPLHAEILRLFPQAAQQERFSSLMVYKLPVEDVRPLSQAFFKLEIVKQSFDLEEYSLSQSTLEQVFLELSKEQELGDLEEDFDPSVKWKLLLQEEP

SEQ ID NO: 6724 - protein, 764 aa, Homo sapiens
MTSPSSSPVFRLETLDGGQEDGSEADRGKLDFGSGLPPMESQFQGEDRKFAPQIRVNLNYRKGTGASQPDPNRFDRDRLFNAVSRGVPEDLAGLPEYLSKTSKYLTDSEYTEGSTGKTCLMKAVLNLKDGVNACILPLLQIDRDSGNPQPLVNAQCTDDYYRGHSALHIAIEKRSLQCVKLLVENGANVHARACGRFFQKGQGTCFYFGELPLSLAACTKQWDVVSYLLENPHQPASLQATDSQGNTVLHALVMISDNSAENIALVTSMYDGLLQAGARLCPTVQLEDIRNLQDLTPLKLAAKEGKIEIFRHILQREFSGLSHLSRKFTEWCYGPVRVSLYDLASVDSCEENSVLEIIAFHCKSPHRHRMVVLEPLNKLLQAKWDLLIPKFFLNFLCNLIYMFIFTAVAYHQPTLKKQAAPHLKAEVGNSMLLTGHILILLGGIYLLVGQLWYFWRRHVFIWISFIDSYFEILFLFQALLTVVSQVLCFLAIEWYLPLLVSALVLGWLNLLYYTRGFQHTGIYSVMIQKVILRDLLRFLLIYLVFLFGFAVALVSLSQEAWRPEAPTGPNATESVQPMEGQEDEGNGAQYRGILEASLELFKFTIGMGELAFQEQLHFRGMVLLLLLAYVLLTYILLLNMLIALMSETVNSVATDSWSIWKLQKAISVLEMENGYWWCRKKQRAGVMLTVGTKPDGSPDERWCFRVEEVNWASWEQTLPTLCEDPSGAGVPRTLENPVLASPPKEDEDGASEENYVPVQLLQSN

SEQ ID NO: 6725 - protein, 1308 aa, Homo sapiens
MKPATGLWVWVSLLVAAGTVQPSDSQSVCAGTENKLSSLSDLEQQYRALRKYYENCEVVMGNLEITSIEHNRDLSFLRSVREVTGYVLVALNQFRYLPLENLRIIRGTKLYEDRYALAIFLNYRKDGNFGLQELGLKNLTEILNGGVYVDQNKFLCYADTIHWQDIVRNPWPSNLTLVSTNGSSGCGRCHKSCTGRCWGPTENHCQTLTRTVCAEQCDGRCYGPYVSDCCHRECAGGCSGPKDTDCFACMNFNDSGACVTQCPQTFVYNPTTFQLEHNFNAKYTYGAFCVKKCPHNFVVDSSSCVRACPSSKMEVEENGIKMCKPCTDICPKACDGIGTGSLMSAQTVDSSNIDKFINCTKINGNLIFLVTGIHGDPYNAIEAIDPEKLNVFRTVREITGFLNIQSWPPNMTDFSVFSNLVTIGGRVLYSGLSLLILKQQGITSLQFQSLKEISAGNIYITDNSNLCYYHTINWTTLFSTINQRIVIRDNRKAENCTAEGMVCNHLCSSDGCWGPGPDQCLSCRRFSRGRICIESCNLYDGEFREFENGSICVECDPQCEKMEDGLLTCHGPGPDNCTKCSHFKDGPNCVEKCPDGLQGANSFIFKYADPDRECHPCHPNCTQGCNGPTSHDCIYYPWTGHSTLPQHARTPLIAAGVIGGLFILVIVGLTFAVYVRRKSIKKKRALRRFLETELVEPLTPSGTAPNQAQLRILKETELKRVKVLGSGAFGTVYKGIWVPEGETVKIPVAIKILNETTGPKANVEFMDEALIMASMDHPHLVRLLGVCLSPTIQLVTQLMPHGCLLEYVHEHKDNIGSQLLLNWCVQIAKGMMYLEERRLVHRDLAARNVLVKSPNHVKITDFGLARLLEGDEKEYNADGGKMPIKWMALECIHYRKFTHQSDVWSYGVTIWELMTFGGKPYDGIPTREIPDLLEKGERLPQPPICTIDVYMVMVKCWMIDADSRPKFKELAAEFSRMARDPQRYLVIQGDDRMKLPSPNDSKFFQNLLDEEDLEDMMDAEEYLVPQAFNIPPPIYTSRARIDSNRSEIGHSPPPAYTPMSGNQFVYRDGGFAAEQGVSVPYRAPTSTIPEAPVAQGATAEIFDDSCCNGTLRKPVAPHVQEDSSTQRYSADPTVFAPERSPRGELDEEGYMTPMRDKPKQEYLNPVEENPFVSRRKNGDLQALDNPEYHNASNGPPKAEDEYVNEPLYLNTFANTLGKAEYLKNNILSMPEKAKKAFDNPDYWNHSLPPRSTLQHPDYLQEYSTKYFYKQNGRIRPIVAENPEYLSEFSLKPGTVLPPPPYRHRNTVV

SEQ ID NO: 6726 - protein, 380 aa, Homo sapiens
MEEIYAKFVSQKISKTRWRPLPPGSLQTAETFATGSWDNEENYISLWSIGDFGNLDSDGGFEGDHQLLCDIRHHGDVMDLQFFDQERIVAASSTGCVTVFLHHPNNQTLSVNQQWTTAHYHTGPGSPSYSSAPCTGVVCNNPEIVTVGEDGRINLFRADHKEAVRTIDNADSSTLHAVTFLRTPEILTVNSIGQLKIWDFRQQGNEPSQILSLTGDRVPLHCVDRHPNQQHVVATGGQDGMLSIWDVRQGTMPVSLLKAHEAEMWEVHFHPSNPEHLFTCSEDGSLWHWDASTDVPEKSSLFHQGGRSSTFLSHSISNQANVHQSVISSWLSTDPAKDRIEITSLLPSRSLSVNTLDVLGPCLVCGTDAEAIYVTRHLFS

SEQ ID NO: 6727 - protein, 301 aa, Homo sapiens
MKSNPAIQAAIDLTAGAAGGTACVLTGQPFDTMKVKMQTFPDLYRGLTDCCLKTYSQVGFRGFYKGTSPALIANIAENSVLFMCYGFCQQVVRKVAGLDKQAKLSDLQNAAAGSFASAFAALVLCPTELVKCRLQTMYEMETSGKIAKSQNTVWSVIKSILRKDGPLGFYHGLSSTLLREVPGYFFFFGGYELSRSFFASGRSKDELGPVPLMLSGGVGGICLWLAVYPVDCIKSRIQVLSMSGKQAGFIRTFINVVKNEGITALYSGLKPTMIRAFPANGALFLAYEYSRKLMMNQLEAY

SEQ ID NO: 6728 - protein, 251 aa, Homo sapiens
MIYTMKKVHALWASVCLLLNLAPAPLNADSEEDEEHTIITDTELPPLKLMHSFCAFKADDGPCKAIMKRFFFNIFTRQCEEFIYGGCEGNQNRFESLEECKKMCTRDNANRIIKTTLQQEKPDFCFLEEDPGICRGYITRYFYNNQTKQCERFKYGGCLGNMNNFETLEECKNICEDGPNGFQVDNYGTQLNAVNNSLTPQSTKVPSLFVTKEGTNDGWKNAAHIYQVFLNAFCIHASMFFLGLDSISCLC

SEQ ID NO: 6729 - protein, 570 aa, Homo sapiens
MGFLQLLVVAVLASEHRVAGAAEVFGNSSEGLIEFSVGKFRYFELNRPFPEEAILHDISSNVTFLIFQIHSQYQNTTVSFSPTLLSNSSETGTASGLVFILRPEQSTCTWYLGTSGIQPVQNMAILLSYSERDPVPGGCNLEFDLDIDPNIYLEYNFFETTIKFAPANLGYARGVDPPPCDAGTDQDSRWRLQYDVYQYFLPENDLTEEMLLKHLQRMVSVPQVKASALKVVTLTANDKTSVSFSSLPGQGVIYNVIVWDPFLNTSAAYIPAHTYACSFEAGEGSCASLGRVSSKVFFTLFALLGFFICFFGHRFWKTELFFIGFIIMGFFFYILITRLTPIKYDVNLILTAVTGSVGGMFLVAVWWRFGILSICMLCVGLVLGFLISSVTFFTPLGNLKIFHDDGVFWVTFSCIAILIPVVFMGCLRILNILTCGVIGSYSVVLAIDSYWSTSLSYITLNVLKRALNKDFHRAFTNVPFQTNDFIILAVWGMLAVSGITLQIRRERGRPFFPPHPYKLWKQERERRVTNILDPSYHIPPLRERLYGRLTQIKGLFQKEQPAGERTPLLL

SEQ ID NO: 6730 - protein, 527 aa, Homo sapiens
MSSNSASAANGNDSKKFKGDSRSAGVPSRVIHIRKLPIDVTEGEVISLGLPFGKVTNLLMLKGKNQAFIEMNTEEAANTMVNYYTSVTPVLRGQPIYIQFSNHKELKTDSSPNQARAQAALQAVNSVQSGNLALAASAAAVDAGMAMAGQSPVLRIIVENLFYPVTLDVLHQIFSKFGTVLKIITFTKNNQFQALLQYADPVSAQHAKLSLDGQNIYNACCTLRIDFSKLTSLNVKYNNDKSRDYTRPDLPSGDSQPSLDQTMAAAFGAPGIISASPYAGAGFPPTFAIPQAAGLSVPNVHGALAPLAIPSAAAAAAAAGRIAIPGLAGAGNSVLLVSNLNPERVTPQSLFILFGVYGDVQRVKILFNKKENALVQMADGNQAQLAMSHLNGHKLHGKPIRITLSKHQNVQLPREGQEDQGLTKDYGNSPLHRFKKPGSKNFQNIFPPSATLHLSNIPPSVSEEDLKVLFSSNGGVVKGFKFFQKDRKMALIQMGSVEEAVQALIDLHNHDLGENHHLRVSFSKSTI

SEQ ID NO: 6731 - protein, 297 aa, Homo sapiens
MASPQLCRALVSAQWVAEALRAPRAGQPLQLLDASWYLPKLGRDARREFEERHIPGAAFFDIDQCSDRTSPYDHMLPGAEHFAEYAGRLGVGAATHVVIYDASDQGLYSAPRVWWMFRAFGHHAVSLLDGGLRHWLRQNLPLSSGKSQPAPAEFRAQLDPAFIKTYEDIKENLESRRFQVVDSRATGRFRGTEPEPRDGIEPGHIPGTVNIPFTDFLSQEGLEKSPEEIRHLFQEKKVDLSKPLVATCGSGVTACHVALGAYLCGKPDVPIYDGSWVEWYMRARPEDVISEGRGKTH

SEQ ID NO: 6732 - protein, 173 aa, Homo sapiens
MHWKMLLLLLLYYNAEASMCHRWSRAVLFPAAHRPKRSSSLPLNPVLQTSLEEVELLYEFLLAELEISPDLQISIKDEELASLRKASDFRTVCNNVIPKSIPDIRRLSASLSSHPGILKKEDFERTVLTLAYTAYRTALSHGHQKDIWAQSLVSLFQALRHDLMRSSQPGVPP

SEQ ID NO: 6733 - protein, 308 aa, Homo sapiens
MGNTLTCCVSPNASPKLGRRAGSAELYCASDIYEAVSGDAVAVAPAVVEPAELDFGEGEGHHLQHISDREMPEDLALESNPSDHPRASTIFLSKSQTDVREKRKSNHLNHCDLSNILPHKEQREKVPEEYFKHDPEHKFIYRFVRTLFSAAQLTAECAIVTLVYLERLLTYAEIDICPTNWKRIVLGAILLASKVWDDQAVWNVDYCQILKDITVEDMNEMERHFLELLQFNINVPASVYAKYYFDLRSLADDNNLNFLFAPLSKERAQNLEAISRLCEDKDLCRAAMRRSFSADNFIGIQRSKAILS

SEQ ID NO: 6734 - protein, 133 aa, Homo sapiens
MLDWRLASAHFILAVTLTLWSSGKVLSVDVTTTEAFDSGVIDVQSTPTVREEKSATDLTAKLLLLDELVSLENDVIETKKKRSFSGFGSPLDRLSAGSVDHKGKQRKVVDHPKRRFGIPMDRIGRNRLSNSRG

SEQ ID NO: 6735 - protein, 118 aa, Homo sapiens
MSLLNKPKSEMTPEELQKREEEEFNTGPLSVLTQSVKNNTQVLINCRNNKKLLGRVKAFDRHCNMVLENVKEMWTEVPKSGKGKKKSKPVNKDRYISKMFLRGDSVIVVLRNPLIAGK

SEQ ID NO: 6736 - protein, 628 aa, Homo sapiens
MRPSGTAGAALLALLAALCPASRALEEKKVCQGTSNKLTQLGTFEDHFLSLQRMFNNCEVVLGNLEITYVQRNYDLSFLKTIQEVAGYVLIALNTVERIPLENLQIIRGNMYYENSYALAVLSNYDANKTGLKELPMRNLQEILHGAVRFSNNPALCNVESIQWRDIVSSDFLSNMSMDFQNHLGSCQKCDPSCPNGSCWGAGEENCQKLTKIICAQQCSGRCRGKSPSDCCHNQCAAGCTGPRESDCLVCRKFRDEATCKDTCPPLMLYNPTTYQMDVNPEGKYSFGATCVKKCPRNYVVTDHGSCVRACGADSYEMEEDGVRKCKKCEGPCRKVCNGIGIGEFKDSLSINATNIKHFKNCTSISGDLHILPVAFRGDSFTHTPPLDPQELDILKTVKEITGFLLIQAWPENRTDLHAFENLEIIRGRTKQHGQFSLAVVSLNITSLGLRSLKEISDGDVIISGNKNLCYANTINWKKLFGTSGQKTKIISNRGENSCKATGQVCHALCSPEGCWGPEPRDCVSCRNVSRGRECVDKCNLLEGEPREFVENSECIQCHPECLPQAMNITCTGRGPDNCIQCAHYIDGPHCVKTCPAGVMGENNTLVWKYADAGHVCHLCHPNCTYGS

SEQ ID NO: 6737 - protein, 508 aa, Homo sapiens
MPPKRNEKYKLPIPFPEGKVLDDMEGNQWVLGKKIGSGGFGLIYLAFPTNKPEKDARHVVKVEYQENGPLFSELKFYQRVAKKDCIKKWIERKQLDYLGIPLFYGSGLTEFKGRSYRFMVMERLGIDLQKISGQNGTFKKSTVLQLGIRMLDVLEYIHENEYVHGDIKAANLLLGYKNPDQVYLADYGLSYRYCPNGNHKQYQENPRKGHNGTIEFTSLDAHKGVALSRRSDVEILGYCMLRWLCGKLPWEQNLKDPVAVQTAKTNLLDELPQSVLKWAPSGSSCCEIAQFLVCAHSLAYDEKPNYQALKKILNPHGIPLGPLDFSTKGQSINVHTPNSQKVDSQKAATKQVNKAHNRLIEKKVHSERSAESCATWKVQKEEKLIGLMNNEAAQESTRRRQKYQESQEPLNEVNSFPQKISYTQFPNSFYEPHQDFTSPDIFKKSRSPSWYKYTSTVSTGITDLESSTGLWPTISQFTLSEETNADVYYYRIIIPVLLMLVFLALFFL

SEQ ID NO: 6738 - protein, 152 aa, Homo sapiens
MPAHSLVMSSPALPAFLLCSTLLVIKMYVVAIITGQVRLRKKAFANPEDALRHGGPQYCRSDPDVERCLRAHRNDMETIYPFLFLGFVYSFLGPNPFVAWMHFLVFLVGRVAHTVAYLGKLRAPIRSVTYTLAQLPCASMALQILWEAARHL

SEQ ID NO: 6739 - protein, 602 aa, Homo sapiens
MLLPLLLSSLLGGSQAMDGRFWIRVQESVMVPEGLCISVPCSFSYPRQDWTGSTPAYGYWFKAVTETTKGAPVATNHQSREVEMSTRGRFQLTGDPAKGNCSLVIRDAQMQDESQYFFRVERGSYVRYNFMNDGFFLKVTALTQKPDVYIPETLEPGQPVTVICVFNWAFEECPPPSFSWTGAALSSQGTKPTTSHFSVLSFTPRPQDHNTDLTCHVDFSRKGVSAQRTVRLRVAYAPRDLVISISRDNTPALEPQPQGNVPYLEAQKGQFLRLLCAADSQPPATLSWVLQNRVLSSSHPWGPRPLGLELPGVKAGDSGRYTCRAENRLGSQQRALDLSVQYPPENLRVMVSQANRTVLENLGNGTSLPVLEGQSLCLVCVTHSSPPARLSWTQRGQVLSPSQPSDPGVLELPRVQVEHEGEFTCHARHPLGSQHVSLSLSVHYKKGLISTAFSNGAFLGIGITALLFLCLALIIMKILPKRRTQTETPRPRFSRHSTILDYINVVPTAGPLAQKRNQKATPNSPRTPLPPGAPSPESKKNQKKQYQLPSFPEPKSSTQAPESQESQEELHYATLNFPGVRPRPEARMPKGTQADYAEVKFQ

SEQ ID NO: 6740 - protein, 398 aa, Homo sapiens
MSIVTVQLGQCGNQIGFEVFDALLSDSHSSQGLCSMRENEAYQASCKERFFSEEENGVPIARAVLVDMEPKVINQMLSKAAQSGQWKYGQHACFCQKQGSGNNWAYGYSVHGPRHEESIMNIIRKEVEKCDSFSGFFIIMSMAGGTGSGLGAFVTQNLEDQYSNSLKMNQIIWPYGTGEVIVQNYNSILTLSHLYRSSDALLLHENDAIHKICAKLMNIKQISFSDINQVLAHQLGSVFQPTYSAESSFHYRRNPLGIDRHVWPPLSGLPPLSKMSLNKDLHFNTSIANLVILRGKDVQSADVEGFKDPALYTSWLKPVNAFNVWKTQRAFSKYEKSAVLVSNSQFLVKPLDMIVGKAWNMFASKAYIHQYTKFGIEEEDFLDSFTSLEQVVASYCNL

SEQ ID NO: 6741 - protein, 715 aa, Homo sapiens
MVPGARGGGALARAAGRGLLALLLAVSAPLRLQAEELGDGCGHLVTYQDSGTMTSKNYPGTYPNHTVCEKTITVPKGKRLILRLGDLDIESQTCASDYLLFTSSSDQYGPYCGSMTVPKELLLNTSEVTVRFESGSHISGRGFLLTYASSDHPDLITCLERASHYLKTEYSKFCPAGCRDVAGDISGNMVDGYRDTSLLCKAAIHAGIIADELGGQISVLQRKGISRYEGILANGVLSRDGSLSDKRFLFTSNGCSRSLSFEPDGQIRASSSWQSVNESGDQVHWSPGQARLQDQGPSWASGDSSNNHKPREWLEIDLGEKKKITGIRTTGSTQSNFNFYVKSFVMNFKNNNSKWKTYKGIVNNEEKVFQGNSNFRDPVQNNFIPPIVARYVRVVPQTWHQRIALKVELIGCQITQGNDSLVWRKTSQSTSVSTKKEDETITRPIPSEETSTGINITTVAIPLVLLVVLVFAGMGIFAAFRKKKKKGSPYGSAEAQKTDCWKQIKYPFARHQSAEFTISYDNEKEMTQKLDLITSDMADYQQPLMIGTGTVTRKGSTFRPMDTDAEEAGVSTDAGGHYDCPQRAGRHEYALPLAPPEPEYATPIVERHVLRAHTFSAQSGYRVPGPQPGHKHSLSSGGFSPVAGVGAQDGDYQRPHSAQPADRGYDRPKAVSALATESGHPDSQKPPTHPGTSDSYSAPRDCLTPLNQTAMTALL

SEQ ID NO: 6742 - protein, 1483 aa, Homo sapiens
MAPLLGRKPFPLVKPLPGEEPLFTIPHTQEAFRTREEYEARLERYSERIWTCKSTGSSQLTHKEAWEEEQEVAELLKEEFPAWYEKLVLEMVHHNTASLEKLVDTAWLEIMTKYAVGEECDFEVGKEKMLKVKIVKIHPLEKVDEEATEKKSDGACDSPSSDKENSSQIAQDHQKKETVVKEDEGRRESINDRARRSPRKLPTSLKKGERKWAPPKFLPHKYDVKLQNEDKIISNVPADSLIRTERPPNKEIVRYFIRHNALRAGTGENAPWVVEDELVKKYSLPSKFSDFLLDPYKYMTLNPSTKRKNTGSPDRKPSKKSKTDNSSLSSPLNPKLWCHVHLKKSLSGSPLKVKNSKNSKSPEEHLEEMMKMMSPNKLHTNFHIPKKGPPAKKPGKHSDKPLKAKGRSKGILNGQKSTGNSKSPKKGLKTPKTKMKQMTLLDMAKGTQKMTRAPRNSGGTPRTSSKPHKHLPPAALHLIAYYKENKDREDKRSALSCVISKTARLLSSEDRARLPEELRSLVQKRYELLEHKKRWASMSEEQRKEYLKKKREELKKKLKEKAKERREKEMLERLEKQKRYEDQELTGKNLPAFRLVDTPEGLPNTLFGDVAMVVEFLSCYSGLLLPDAQYPITAVSLMEALSADKGGFLYLNRVLVILLQTLLQDEIAEDYGELGMKLSEIPLTLHSVSELVRLCLRRSDVQEESEGSDTDDNKDSAAFEDNEVQDEFLEKLETSEFFELTSEEKLQILTALCHRILMTYSVQDHMETRQQMSAELWKERLAVLKEENDKKRAEKQKRKEMEAKNKENGKVENGLGKTDRKKEIVKFEPQVDTEAEDMISAVKSRRLLAIQAKKEREIQEREMKVKLERQAEEERIRKHKAAAEKAFQEGIAKAKLVMRRTPIGTDRNHNRYWLFSDEVPGLFIEKGWVHDSIDYRFNHHCKDHTVSGDEDYCPRSKKANLGKNASMNTQHGTATEVAVETTTPKQGQNLWFLCDSQKELDELLNCLHPQGIRESQLKERLEKRYQDIIHSIHLARKPNLGLKSCDGNQELLNFLRSDLIEVATRLQKGGLGYVEETSEFEARVISLEKLKDFGECVIALQASVIKKFLQGFMAPKQKRRKLQSEDSAKTEEVDEEKKMVEEAKVASALEKWKTAIREAQTFSRMHVLLGMLDACIKWDMSAENARCKVCRKKGEDDKLILCDECNKAFHLFCLRPALYEVPDGEWQCPACQPATARRNSRGRNYTEESASEDSEDDESDEEEEEEEEEEEEEDYEVAGLRLRPRKTIRGKHSVIPPAARSGRRPGKKPHSTRRSQPKAPPVDDAEVDELVLQTKRSSRRQSLELQKCEEILHKIVKYRFSWPFREPVTRDEAEDYYDVITHPMDFQTVQNKCSCGSYRSVQEFLTDMKQVFTNAEVYNCRGSHVLSCMVKTEQCLVALLHKHLPGHPYVRRKRKKFPDRLAEDEGDSEPEAVGQSRGRRQKK

SEQ ID NO: 6743 - protein, 512 aa, Homo sapiens
MYCAYPVPGMGSNSLMYYYNGKTVYAPSPNSDDFNRESPSYPSPKPPTSMFASTFFMQDGTHNSSDLWSSSNGMSQPGFGGILGTSTSHMSQSSSYGNLHSHDRLSYPPHSVSPTDINTSLPPMSSFHRGSTSSSPYVAASHTPPINGSDSILGTRGNAAGSSQTGDALGKALASIYSPDHTSSSFPSNPSTPVGSPSPLTGTSQWPRPGGQAPSSPSYENSLHSLQSRMEDRLDRLDDAIHVLRNHAVGPSTSLPAGHSDIHSLLGPSHNAPIGSLNSNYGGSSLVASSRSASMVGTHREDSVSLNGNHSVLSSTVTTSSTDLNHKTQENYRGGLQSQSGTVVTTEIKTENKEKDENLHEPPSSDDMKSDDESSQKDIKVSSRGRTSSTNEDEDLNPEQKIEREKERRMANNARERLRVRDINEAFKELGRMCQLHLKSEKPQTKLLILHQAVAVILSLEQQVRERNLNPKAACLKRREEEKVSAVSAEPPTTLPGTHPGLSETTNPMGHM

SEQ ID NO: 6744 - protein, 1210 aa, Homo sapiens
MRSRSNSGVRLDGYARLVQQTILCHQNPVTGLLPASYDQKDAWVRDNVYSILAVWGLGLAYRKNADRDEDKAKAYELEQSVVKLMRGLLHCMIRQVDKVESFKYSQSTKDSLHAKYNTKTCATVVGDDQWGHLQLDATSVYLLFLAQMTASGLHIIHSLDEVNFIQNLVFYIEAAYKTADFGIWERGDKTNQGISELNASSVGMAKAALEALDELDLFGVKGGPQSVIHVLADEVQHCQSILNSLLPRASTSKEVDASLLSVVSFPAFAVEDSQLVELTKQEIITKLQGRYGCCRFLRDGYKTPKEDPNRLYYEPAELKLFENIECEWPLFWTYFILDGVFSGNAEQVQEYKEALEAVLIKGKNGVPLLPELYSVPPDRVDEEYQNPHTVDRVPMGKLPHMWGQSLYILGSLMAEGFLAPGEIDPLNRRFSTVPKPDVVVQVSILAETEEIKTILKDKGIYVETIAEVYPIRVQPARILSHIYSSLGCNNRMKLSGRPYRHMGVLGTSKLYDIRKTIFTFTPQFIDQQQFYLALDNKMIVEMLRTDLSYLCSRWRMTGQPTITFPISHSMLDEDGTSLNSSILAALRKMQDGYFGGARVQTGKLSEFLTTSCCTHLSFMDPGPEGKLYSEDYDDNYDYLESGNWMNDYDSTSHARCGDEVARYLDHLLAHTAPHPKLAPTSQKGGLDRFQAAVQTTCDLMSLVTKAKELHVQNVHMYLPTKLFQASRPSFNLLDSPHPRQENQVPSVRVEIHLPRDQSGEVDFKALVLQLKETSSLQEQADILYMLYTMKGPDWNTELYNERSATVRELLTELYGKVGEIRHWGLIRYISGILRKKVEALDEACTDLLSHQKHLTVGLPPEPREKTISAPLPYEALTQLIDEASEGDMSISILTQEIMVYLAMYMRTQPGLFAEMFRLRIGLIIQVMATELAHSLRCSAEEATEGLMNLSPSAMKNLLHHILSGKEFGVERSVRPTDSNVSPAISIHEIGAVGATKTERTGIMQLKSEIKQSPGTSMTPSSGSFPSAYDQQSSKDSRQGQWQRRRRLDGALNRVPVGFYQKVWKVLQKCHGLSVEGFVLPSSTTREMTPGEIKFSVHVESVLNRVPQPEYRQLLVEAILVLTMLADIEIHSIGSIIAVEKIVHIANDLFLQEQKTLGADDTMLAKDPASGICTLLYDSAPSGRFGTMTYLSKAAATYVQEFLPHSICAMQ

SEQ ID NO: 6745 - protein, 1047 aa, Homo sapiens
MTDNIPLQPVRQKKRMDSRPRAGCCEWLRCCGGGEARPRTVWLGHPEKRDQRYPRNVINNQKYNFFTFLPGVLFNQFKYFFNLYFLLLACSQFVPEMRLGALYTYWVPLGFVLAVTVIREAVEEIRCYVRDKEVNSQVYSRLTARGTVKVKSSNIQVGDLIIVEKNQRVPADMIFLRTSEKNGSCFLRTDQLDGETDWKLRLPVACTQRLPTAADLLQIRSYVYAEEPNIDIHNFVGTFTREDSDPPISESLSIENTLWAGTVVASGTVVGVVLYTGRELRSVMNTSNPRSKIGLFDLEVNCLTKILFGALVVVSLVMVALQHFAGRWYLQIIRFLLLFSNIIPISLRVNLDMGKIVYSWVIRRDSKIPGTVVRSSTIPEQLGRISYLLTDKTGTLTQNEMIFKRLHLGTVAYGLDSMDEVQSHIFSIYTQQSQDPPAQKGPTLTTKVRRTMSSRVHEAVKAIALCHNVTPVYESNGVTDQAEAEKQYEDSCRVYQASSPDEVALVQWTESVGLTLVGRDQSSMQLRTPGDQILNFTILQIFPFTYESKRMGIIVRDESTGEITFYMKGADVVMAGIVQYNDWLEEECGNMAREGLRVLVVAKKSLAEEQYQDFEARYVQAKLSVHDRSLKVATVIESLEMEMELLCLTGVEDQLQADVRPTLETLRNAGIKVWMLTGDKLETATCTAKNAHLVTRNQDIHVFRLVTNRGEAHLELNAFRRKHDCALVISGDSLEVCLKYYEYEFMELACQCPAVVCCRCAPTQKAQIVRLLQERTGKLTCAVGDGGNDVSMIQESDCGVGVEGKEGKQASLAADFSITQFKHLGRLLMVHGRNSYKRSAALSQFVIHRSLCISTMQAVFSSVFYFASVPLYQGFLIIGYSTIYTMFPVFSLVLDKDVKSEVAMLYPELYKDLLKGRPLSYKTFLIWVLISIYQGSTIMYGALLLFESEFVHIVAISFTSLILTELLMVALTIQTWHWLMTVAELLSLACYIASLVFLHEFIDVYFIATLSFLWKVSVITLVSCLPLYVLKYLRRRFSPPSYSKLTS

SEQ ID NO: 6746 - protein, 83 aa, Homo sapiens
MSDNDDIEVESDEEQPRFQSAADKRAHHNALERKRRDHIKDSFHSLRDSVPSLQGEKGTKMKLTLPPVFPYEHLPFPTVFCHG

SEQ ID NO: 6747 - protein, 364 aa, Homo sapiens
MSSAPRSPTPRPRRMKKDESFLGKLGGTLARKRRAREVSDLQEEGKNAINSPMSPALVDVHPEDTQLEENEERTMIDPTSKEDPKFKELVKVLLDWINDVLVEERIIVKQLEEDLYDGQVLQKLLEKLAGCKLNVAEVTQSEIGQKQKLQTVLEAVHDLLRPRGWALRWSVDSIHGKNLVAILHLLVSLAMHFRAPIRLPEHVTVQVVVVRKREGLLHSSHISEELTTTTEMMMGRFERDAFDTLFDHAPDKLSVVKKSLITFVNKHLNKLNLEVTELETQFADGVYLVLLMGLLEDYFVPLHHFYLTPESFDQKVHNVSFAFELMLDGGLKKPKARPEDVVNLDLKSTLRVLYNLFTKYKNVE

SEQ ID NO: 6748 - protein, 516 aa, Homo sapiens
MPSSTSPDQGDDLENCILRFSDLDLKDMSLINPSSSLKAELDGSTKKKYSFAKKKAFALFVKTKEVPTKRSFECKEKLWKCCRQLFTDQTSIHRHVATQHADEIYHQTASILKQLAVTLSTSKSLSSADEKNPLKECLPHSHDVSAWLPDISCFNPDELISGQGSEEGEVLLYYCYHDLEDPQWICAWQTALCQHLHLTGKIRIAAEGINGTVGGSKLATRLYVEVMLSFPLFKDDLCKDDFKTSKGGAHCFPELRVGVFEEIVPMGISPKKISYKKPGIHLSPGEFHKEVEKFLSQANQEQSDTILLDCRNFYESKIGRFQGCLAPDIRKFSYFPSYVDKNLELFREKRVLMYCTGGIRCERGSAYLKAKGVCKEVFQLKGGIHKYLEEFPDGFYKGKLFVFDERYALSYNSDVVSECSYCGARWDQYKLCSTPQCRQLVLTCPACQGQGFTACCVTCQDKGSRKVSGPMQDSFKEECECTARRPRIPRELLQHVRQPVSPEPGPDADEDGPVLM

SEQ ID NO: 6749 - protein, 320 aa, Homo sapiens
MSVGFIGAGQLAYALARGFTAAGILSAHKIIASSPEMNLPTVSALRKMGVNLTRSNKETVKHSDVLFLAVKPHIIPFILDEIGADVQARHIVVSCAAGVTISSVEKKLMAFQPAPKVIRCMTNTPVVVQEGATVYATGTHALVEDGQLLEQLMSSVGFCTEVEEDLIDAVTGLSGSGPAYAFMALDALADGGVKMGLPRRLAIQLGAQALLGAAKMLLDSEQHPCQLKDNVCSPGGATIHALHFLESGGFRSLLINAVEASCIRTRELQSMADQEKISPAALKKTLLDRVKLESPTVSTLTPSSPGKLLTRSLALGGKKD

SEQ ID NO: 6750 - protein, 865 aa, Homo sapiens
MAVARVDAALPPGEGSVVNWSGQGLQKLGPNLPCEADIHTLILDKNQIIKLENLEKCKRLIQLSVANNRLVRMMGVAKLTLLRVLNLPHNSIGCVEGLKELVHLEWLNLAGNNLKAMEQINSCTALQHLDLSDNNISQIGDLSKLVSLKTLLLHGNIITSLRMAPAYLPRSLAILSLAENEIRDLNEISFLASLTELEQLSIMNNPCVMATPSIPGFDYRPYIVSWCLNLRVLDGYVISQKESLKAEWLYSQGKGRAYRPGQHIQLVQYLATVCPLTSTLGLQTAEDAKLEKILSKQRFHQRQLMNQSQNEELSPLVPVETRASLIPEHSSPVQDCQISQESEPVIQVNSWVGINSNDDQLFAVKNNFPASVHTTRYSRNDLHLEDIQTDEDKLNCSLLSSESTFMPVASGLSPLSPTVELRLQGINLGLEDDGVADESVKGLESQVLDKEEEQPLWAANENSVQMMRSEINTEVNEKAGLLPCPEPTIISAILKDDNHSLTFFPESTEQKQSDIKKPENTQPENKETISQATSEKLPMILTQRSVALGQDKVALQKLNDAATKLQACWRGFYARNYNPQAKDVRYEIRLRRMQEHIVCLTDEIRRLRKERDEERIKKFVQEEAFRFLWNQVRSLQVWQQTVDQRLSSWHTDVPPISSTLVPSKHPLFTQSQESSCDQNADWFIASDVAPQEKSLPEFPDSGFHSSLTEQVHSLQHSLDFEKSSTEGSESSIMGNSIDTVRYGKESDLGDVSEEHGEWNKESSNNEQDNSLLEQYLTSVQQLEDADERTNFDTETRDSKLHIACFPVQLDTLSDGASVDESHGISPPLQGEISQTQENSKLNAEVQGQQPECDSTFQLLHVGVTV

SEQ ID NO: 6751 - protein, 138 aa, Homo sapiens
MRQKAVSLFLCYLLLFTCSGVEAGENAGKDAGKKKCSESSDSGSGFWKALTFMAVGGGLAVAGLPALGFTGAGIAANSVAASLMSWSAILNGGGVPAGGLVATLQSLGAGGSSVVIGNIGALMGYATHKYLDSEEDEE

SEQ ID NO: 6752 - protein, 824 aa, Homo sapiens
MKDRSSTPPLHVHVDENTPVHVHIKKLPKPSATSSQKSHKRGMKGDTVNVRRSVRVKTKVPWMPPGKSSARPVGCKWENPPHCLEITPPSSEKLVSVMRLSDLSTEDDDSGHCKMNRYDKKIDSLMNAVGCLKSEVKMQKGERQMAKRFLEERKEELEEVAHELAETEHENTVLRHNIERMKEEKDFTILQKKHLQQEKECLMSKLVEAEMDGAAAAKQVMALKDTIGKLKTEKQMTCTDINTLTRQKELLLQKLSTFEETNRTLRDLLREQHCKEDSERLMEQQGALLKRLAEADSEKARLLLLLQDKDKEVEELLQEIQCEKAQAKTASELSKSMESMRGHLQAQLRSKEAENSRLCMQIKNLERSGNQHKAEVEAIMEQLKELKQKGDRDKESLKKAIRAQKERAEKSEEYAEQLHVQLADKDLYVAEALSTLESWRSRYNQVVKEKGDLELEIIVLNDRVTDLVNQQQTLEEKMREDRDSLVERLHRQTAEYSAFKLENERLKASFAPMEDKLNQAHLEVQQLKASVKNYEGMIDNYKSQVMKTRLEADEVAAQLERCDKENKILKDEMNKEIEAARRQFQSQLADLQQLPDILKITEAKLAECQDQLQGYERKNIDLTAIISDLRSRIEHQGDKLEMAREKHQASQKENKQLSLKVDELERKLEATSAQNIEFLQVIAKREEAIHQSQLRLEEKTRECGTLARQLESAIEDARRQVEQTKEHALSKERAAQNKILDLETQLSRTKTELSQLRRSRDDADRRYQSRLQDLKDRLEQSESTNRSMQNYVQFLKSSYANVFGDGPYSTFLTSSPIRSRSPPA

SEQ ID NO: 6753 - protein, 219 aa, Homo sapiens
MEPLRLLILLFVTELSGAHNTTVFQGVAGQSLQVSCPYDSMKHWGRRKAWCRQLGEKGPCQRVVSTHNLWLLSFLRRWNGSTAITDDTLGGTLTITLRNLQPHDAGLYQCQSLHGSEADTLRKVLVEVLADPLDHRDAGDLWFPGESESFEDAHVEHSISRAERHVKEDDGRKSPGEVPPGTSPACILATWPPGLLVLLWQETTLPEHCFSWTLEAGTG

SEQ ID NO: 6754 - protein, 948 aa, Homo sapiens
MPAARPPAAGLRGISLFLALLLGSPAAALERDALPEGDASPLGPYLLPSGAPERGSPGKEHPEERVVTAPPSSSQSAEVLGELVLDGTAPSAHHDIPALSPLLPEEARPKHALPPKKKLPSLKQVNSARKQLRPKATSAATVQRAGSQPASQGLDLLSSSTEKPGPPGDPDPIVASEEASEVPLWLDRKESAVPTTPAPLQISPFTSQPYVAHTLPQRPEPGEPGPDMAQEAPQEDTSPMALMDKGENELTGSASEESQETTTSTIITTTVITTEQAPALCSVSFSNPEGYIDSSDYPLLPLNNFLECTYNVTVYTGYGVELQVKSVNLSDGELLSIRGVDGPTLTVLANQTLLVEGQVIRSPTNTISVYFRTFQDDGLGTFQLHYQAFMLSCNFPRRPDSGDVTVMDLHSGGVAHFHCHLGYELQGAKMLTCINASKPHWSSQEPICSAPCGGAVHNATIGRVLSPSYPENTNGSQFCIWTIEAPEGQKLHLHFERLLLHDKDRMTVHSGQTNKSALLYDSLQTESVPFEGLLSEGNTIRIEFTSDQARAASTFNIRFEAFEKGHCYEPYIQNGNFTTSDPTYNIGTIVEFTCDPGHSLEQGPAIIECINVRDPYWNDTEPLCRAMCGGELSAVAGVVLSPNWPEPYVEGEDCIWKIHVGEEKRIFLDIQFLNLSNSDILTIYDGDEVMPHILGQYLGNSGPQKLYSSTPDLTIQFHSDPAGLIFGKGQGFIMNYIEVSRNDSCSDLPEIQNGWKTTSHTELVRGARITYQCDPGYDIVGSDTLTCQWDLSWSSDPPFCEKIMYCTDPGEVDHSTRLISDPVLLVGTTIQYTCNPGFVLEGSSLLTCYSRETGTPIWTSRLPHCVLAEAAAETSLEGGNMALAIFIPVLIISLLLGGAYIYITRCRYYSNLRLPLMYSHPYSQITVETEFDNPIYETGETREYEVSI

SEQ ID NO: 6755 - protein, 838 aa, Homo sapiens
MQEQEIGFISKYNEGLCVNTDPVSILTSILDMSLHRQMGSDRDLQSSASSVSLPSVKKAPKKRRISIGSLFRRKKDNKRKSRELNGGVDGIASIESIHSEMCTDKNSIFSTNTSSDNGLTSISKQIGDFIECPLCLLRHSKDRFPDIMTCHHRSCVDCLRQYLRIEISESRVNISCPECTERFNPHDIRLILSDDVLMEKYEEFMLRRWLVADPDCRWCPAPDCGYAVIAFGCASCPKLTCGREGCGTEFCYHCKQIWHPNQTCDAARQERAQSLRLRTIRSSSISYSQESGAAADDIKPCPRCAAYIIKMNDGSCNHMTCAVCGCEFCWLCMKEISDLHYLSPSGCTFWGKKPWSRKKKILWQLGTLVGAPVGIALIAGIAIPAMIIGIPVYVGRKIHNRYEGKDVSKHKRNLAIAGGVTLSVIVSPVVAAVTVGIGVPIMLAYVYGVVPISLCRSGGCGVSAGNGKGVRIEFDDENDINVGGTNTAVDTTSVAEARHNPSIGEGSVGGLTGSLSASGSHMDRIGAIRDNLSETASTMALAGASITGSLSGSAMVNCFNRLEVQADVQKERYSLSGESGTVSLGTVSDNASTKAMAGSILNSYIPLDKEGNSMEVQVDIESKPSKFRHNSGSSSVDDGSATRSHAGGSSSGLPEGKSSATKWSKEATAGKKSKSGKLRKKGNMKINETREDMDAQLLEQQSTNSSEFEAPSLSDSMPSVADSHSSHFSEFSCSDLESMKTSCSHGSSDYHTRFATVNILPEVENDRLENSPHQCSISVVTQTASCSEVSQLNHIAEEHGNNGIKPNVDLYFGDALKETNNNHSHQTMELKVAIQTEI

SEQ ID NO: 6756 - protein, 495 aa, Homo sapiens
MPMGSLQPLATLYLLGMLVASCLGRLSWYDPDFQARLTRSNSKCQGQLEVYLKDGWHMVCSQSWGRSSKQWEDPSQASKVCQRLNCGVPLSLGPFLVTYTPQSSIICYGQLGSFSNCSHSRNDMCHSLGLTCLEPQKTTPPTTRPPPTTTPEPTAPPRLQLVAQSGGQHCAGVVEFYSGSLGGTISYEAQDKTQDLENFLCNNLQCGSFLKHLPETEAGRAQDPGEPREHQPLPIQWKIQNSSCTSLEHCFRKIKPQKSGRVLALLCSGFQPKVQSRLVGGSSICEGTVEVRQGAQWAALCDSSSARSSLRWEEVCREQQCGSVNSYRVLDAGDPTSRGLFCPHQKLSQCHELWERNSYCKKVFVTCQDPNPAGLAAGTVASIILALVLLVVLLVVCGPLAYKKLVKKFRQKKQRQWIGPTGMNQNMSFHRNHTATVRSHAENPTASHVDNEYSQPPRNSHLSAYPALEGALHRSSMQPDNSSDSDYDLHGAQRL

SEQ ID NO: 6757 - protein, 90 aa, Homo sapiens
MAGGKAGKDSGKAKAKAVSRSQRAGLQVLELAGNASKDLKVKRITPRHLQLAIRGDEELDSLIKATIAGGGVIPHIHKSLIGKKGQQKTA

SEQ ID NO: 6758 - protein, 326 aa, Homo sapiens
MREWWVQVGLLAVPLLAAYLHIPPPQLSPALHSWKSSGKFFTYKGLRIFYQDSVGVVGSPEIVVLLHGFPTSSYDWYKIWEGLTLRFHRVIALDFLGFGFSDKPRPHHYSIFEQASIVEALLRHLGLQNRRINLLSHDYGDIVAQELLYRYKQNRSGRLTIKSLCLSNGGIFPETHRPLLLQKLLKDGGVLSPILTRLMNFFVFSRGLTPVFGPYTRPSESELWDMWAGIRNNDGNLVIDSLLQYINQRKKFRRRWVGALASVTIPIHFIYGPLDPVNPYPEFLELYRKTLPRSTVSILDDHISHYPQLEDPMGFLNAYMGFINSF

SEQ ID NO: 6759 - protein, 170 aa, Homo sapiens
MPVPASWPHPPGPFLLLTLLLGLTEVAGEEELQMIQPEKLLLVTVGKTATLHCTVTSLLPVGPVLWFRGVGPGRELIYNQKEGHFPRVTTVSDLTKRNNMDFSIRISSITPADVGTYYCVKFRKGSPENVEFKSGPGTEMALGGPASSLTALLLIAVLLGPIYVPWKQKT

SEQ ID NO: 6760 - protein, 1642 aa, Homo sapiens
MFINIKSILWMCSTLIVTHALHKVKVGKSPPVRGSLSGKVSLPCHFSTMPTLPPSYNTSEFLRIKWSKIEVDKNGKDLKETTVLVAQNGNIKIGQDYKGRVSVPTHPEAVGDASLTVVKLLASDAGLYRCDVMYGIEDTQDTVSLTVDGVVFHYRAATSRYTLNFEAAQKACLDVGAVIATPEQLFAAYEDGFEQCDAGWLADQTVRYPIRAPRVGCYGDKMGKAGVRTYGFRSPQETYDVYCYVDHLDGDVFHLTVPSKFTFEEAAKECENQDARLATVGELQAAWRNGFDQCDYGWLSDASVRHPVTVARAQCGGGLLGVRTLYRFENQTGFPPPDSRFDAYCFKPKEATTIDLSILAETASPSLSKEPQMVSDRTTPIIPLVDELPVIPTEFPPVGNIVSFEQKATVQPQAITDSLATKLPTPTGSTKKPWDMDDYSPSASGPLGKLDISEIKEEVLQSTTGVSHYATDSWDGVVEDKQTQESVTQIEQIEVGPLVTSMEILKHIPSKEFPVTETPLVTARMILESKTEKKMVSTVSELVTTGHYGFTLGEEDDEDRTLTVGSDESTLIFDQIPEVITVSKTSEDTIHTHLEDLESVSASTTVSPLIMPDNNGSSMDDWEERQTSGRITEEFLGKYLSTTPFPSQHRTEIELFPYSGDKILVEGISTVIYPSLQTEMTHRRERTETLIPEMRTDTYTDEIQEEITKSPFMGKTEEEVFSGMKLSTSLSEPIHVTESSVEMTKSFDFPTLITKLSAEPTEVRDMEEDFTATPGTTKYDENITTVLLAHGTLSVEAATVSKWSWDEDNTTSKPLESTEPSASSKLPPALLTTVGMNGKDKDIPSFTEDGADEFTLIPDSTQKQLEEVTDEDIAAHGKFTIRFQPTTSTGIAEKSTLRDSTTEEKVPPITSTEGQVYATMEGSALGEVEDVDLSKPVSTVPQFAHTSEVEGLAFVSYSSTQEPTTYVDSSHTIPLSVIPKTDWGVLVPSVPSEDEVLGEPSQDILVIDQTRLEATISPETMRTTKITEGTTQEEFPWKEQTAEKPVPALSSTAWTPKEAVTPLDEQEGDGSAYTVSEDELLTGSERVPVLETTPVGKIDHSVSYPPGAVTEHKVKTDEVVTLTPRIGPKVSLSPGPEQKYETEGSSTTGFTSSLSPFSTHITQLMEETTTEKTSLEDIDLGSGLFEKPKATELIEFSTIKVTVPSDITTAFSSVDRLHTTSAFKPSSAITKKPPLIDREPGEETTSDMVIIGESTSHVPPTTLEDIVAKETETDIDREYFTTSSPPATQPTRPPTVEDKEAFGPQALSTPQPPASTKFHPDINVYIIEVRENKTGPDRCKMNPCLNGGTCYPTETSYVCTCVPGYSGDQCELDFDECHSNPCRNGATCVDGFNTFRCLCLPSYVGALCEQDTETCDYGWHKFQGQCYKYFAHRRTWDAAERECRLQGAHLTSILSHEEQMFVNRVGHDYQWIGLNDKMFEHDFRWTDGSTLQYENWRPNQPDSFFSAGEDCVVIIWHENGQWNDVPCNYHLTYTCKKGTVACGQPPVVENAKTFGKMKPRYEINSLIRYHCKDGFIQRHLPTIRCLGNGRWAIPKITCMNPSAYQRTYSMKYFKNSSSAKDNSINTSKHDHRWSRRWQESRR

SEQ ID NO: 6761 - protein, 546 aa, Homo sapiens
MGAYLSQPNTVKCSGDGVGAPRLPLPYGFSAMQGWRVSMEDAHNCIPELDSETAMFSVYDGHGGEEVALYCAKYLPDIIKDQKAYKEGKLQKALEDAFLAIDAKLTTEEVIKELAQIAGRPTEDEDEKEKVADEDDVDNEEAALLHEEATMTIEELLTRYGQNCHKGPPHSKSGGGTGEEPGSQGLNGEAGPEDSTRETPSQENGPTAKAYTGFSSNSERGTEAGQVGEPGIPTGEAGPSCSSASDKLPRVAKSKFFEDSEDESDEAEEEEEDSEECSEEEDGYSSEEAENEEDEDDTEEAEEDDEEEEEEMMVPGMEGKEEPGSDSGTTAVVALIRGKQLIVANAGDSRCVVSEAGKALDMSYDHKPEDEVELARIKNAGGKVTMDGRVNGGLNLSRAIGDHFYKRNKNLPPEEQMISALPDIKVLTLTDDHEFMVIACDGIWNVMSSQEVVDFIQSKISQRDENGELRLLSSIVEELLDQCLAPDTSGDGTGCDNMTCIIICFKPRNTAELQPESGKRKLEEVLSTEGAEENGNSDKKKKAKRD

SEQ ID NO: 6762 - protein, 137 aa, Homo sapiens [sequence omitted]

SEQ ID NO: 6763 - protein, 1074 aa, Homo sapiens
MSLKNEPRVNTSALQKIAADMSNIIENLDTRELHFEGEEVDYDVSPSDPKIQEVYIPFSAIYNTQGFKEPNIQTYLSGCPIKAQVLEVERFTSTTRVPSINLYTIELTHGEFKWQVKRKFKHFQEFHRELLKYKAFIRIPIPTRRHTFRRQNVREEPREMPSLPRSSENMIREEQFLGRRKQLEDYLTKILKMPMYRNYHATTEFLDISQLSFIHDLGPKGIEGMIMKRSGGHRIPGLNCCGQGRACYRWSKRWLIVKDSFLLYMKPDSGAIAFVLLVDKEFKIKVGKKETETKYGIRIDNLSRTLILKCNSYRHARWWGGAIEEFIQKHGTNFLKDHRFGSYAAIQENALAKWYVNAKGYFEDVANAMEEANEEIFITDWWLSPEIFLKRPVVEGNRWRLDCILKRKAQQGVRIFIMLYKEVELALGINSEYTKRTLMRLHPNIKVMRHPDHVSSTVYLWAHHEKLVIIDQSVAFVGGIDLAYGRWDDNEHRLTDVGSVKRVTSGPSLGSLPPAAMESMESLRLKDKNEPVQNLPIQKSIDDVDSKLKGIGKPRKFSKFSLYKQLHRHHLHDADSISSIDSTSSYFNHYRSHHNLIHGLKPHFKLFHPSSESEQGLTRPHADTGSIRSLQTGVGELHGETRFWHGKDYCNFVFKDWVQLDKPFADFIDRYSTPRMPWHDIASAVHGKAARDVARHFIQRWNFTKIMKSKYRSLSYPFLLPKSQTTAHELRYQVPGSVHANVQLLRSAADWSAGIKYHEESIHAAYVHVIENSRHYIYIENQFFISCADDKVVFNKIGDAIAQRILKAHRENQKYRVYVVIPLLPGFEGDISTGGGNALQAIMHFNYRTMCRGENSILGQLKAELGNQWINYISFCGLRTHAELEGNLVTELIYVHSKLLIADDNTVIIGSANINDRSMLGKRDSEMAVIVQDTETVPSVMDGKEYQAGRFARGLRLQCFRVVLGYLDDPSEDIQDPVSDKFFKEVWVSTAARNATIYDKVFRCLPNDEVHNLIQLRDFINKPVLAKEDPIRAEEELKKIRGFLVQFPFYFLSEESLLPSVGTKEAIVPMEVWT

SEQ ID NO: 6764 - protein, 213 aa, Homo sapiens
MLLPFIRTLPLLCYNHLLVSPDSATLSPPYSLEKMTDLVAVWDVALSDGVHKIEFEHGTTSGKRVVYVDGKEEIRKEWMFKLVGKETFYVGAAKTKATINIDAISGFAYEYTLEINGKSLKKYMEDRSKTTNTWVLHMDGENFRIVLEKDAMDVWCNGKKLETAGEFVDDGTETHFSIGNHDCYIKAVSSGKRKEGIIHTLIVDNREIPEIAS

SEQ ID NO: 6765 - protein, 1370 aa, Homo sapiens
MATGGRRGAAAAPLLVAVAALLLGAAGHLYPGEVCPGMDIRNNLTRLHELENCSVIEGHLQILLMFKTRPEDFRDLSFPKLIMITDYLLLFRVYGLESLKDLFPNLTVIRGSRLFFNYALVIFEMVHLKELGLYNLMNITRGSVRIEKNNELCYLATIDWSRILDSVEDNYIVLNKDDNEECGDICPGTAKGKTNCPATVINGQFVERCWTHSHCQKVCPTICKSHGCTAEGLCCHSECLGNCSQPDDPTKCVACRNFYLDGRCVETCPPPYYHFQDWRCVNFSFCQDLHHKCKNSRRQGCHQYVIHNNKCIPECPSGYTMNSSNLLCTPCLGPCPKVCHLLEGEKTIDSVTSAQELRGCTVINGSLIINIRGGNNLAAELEANLGLIEEISGYLKIRRSYALVSLSFFRKLRLIRGETLEIGNYSFYALDNQNLRQLWDWSKHNLTITQGKLFFHYNPKLCLSEIHKMEEVSGTKGRQERNDIALKTNGDQASCENELLKFSYIRTSFDKILLRWEPYWPPDFRDLLGFMLFYKEAPYQNVTEFDGQDACGSNSWTVVDIDPPLRSNDPKSQNHPGWLMRGLKPWTQYAIFVKTLVTFSDERRTYGAKSDIIYVQTDATNPSVPLDPISVSNSSSQIILKWKPPSDPNGNITHYLVFWERQAEDSELFELDYCLKGLKLPSRTWSPPFESEDSQKHNQSEYEDSAGECCSCPKTDSQILKELEESSFRKTFEDYLHNVVFVPRPSRKRRSLGDVGNVTVAVPTVAAFPNTSSTSVPTSPEEHRPFEKVVNKESLVISGLRHFTGYRIELQACNQDTPEERCSVAAYVSARTMPEAKADDIVGPVTHEIFENNVVHLMWQEPKEPNGLIVLYEVSYRRYGDEELHLCVSRKHFALERGCRLRGLSPGNYSVRIRATSLAGNGSWTEPTYFYVTDYLDVPSNIAKIIIGPLIFVFLFSVVIGSIYLFLRKRQPDGPLGPLYASSNPEYLSASDVFPCSVYVPDEWEVSREKITLLRELGQGSFGMVYEGNARDIIKGEAETRVAVKTVNESASLRERIEFLNEASVMKGFTCHHVVRLLGVVSKGQPTLVVMELMAHGDLKSYLRSLRPEAENNPGRPPPTLQEMIQMAAEIADGMAYLNAKKFVHRDLAARNCMVAHDFTVKIGDFGMTRDIYETDYYRKGGKGLLPVRWMAPESLKDGVFTTSSDMWSFGVVLWEITSLAEQPYQGLSNEQVLKFVMDGGYLDQPDNCPERVTDLMRMCWQFNPKMRPTFLEIVNLLKDDLHPSFPEVSFFHSEENKAPESEELEMEFEDMENVPLDRSSHCQREEAGGRDGGSSLGFKRSYEEHIPYTHMNGGKKNGRILTLPRSNPS

SEQ ID NO: 6766 - protein, 405 aa, Homo sapiens
MPLLLYTCLLWLPTSGLWTVQAMDPNAAYVNMSNHHRGLASANVDFAFSLYKHLVALSPKKNIFISPVSISMALAMLSLGTCGHTRAQLLQGLGFNLTERSETEIHQGFQHLHQLFAKSDTSLEMTMGNALFLDGSLELLESFSADIKHYYESEVLAMNFQDWATASRQINSYVKNKTQGKIVDLFSGLDSPAILVLVNYIFFKGTWTQPFDLASTREENFYVDETTVVKVPMMLQSSTISYLHDSELPCQLVQMNYVGNGTVFFILPDKGKMNTVIAALSRDTINRWSAGLTSSQVDLYIPKVTISGVYDLGDVLEEMGIADLFTNQANFSRITQDAQLKSSKVVHKAVLQLNEEGVDTAGSTGVTLNLTSKPIILRFNQPFIIMIFDHFTWSSLFLARVMNPV

SEQ ID NO: 6767 - protein, 126 aa, Homo sapiens [sequence omitted]

SEQ ID NO: 6768 - protein, 58 aa, Homo sapiens
MDTQKDVQPPKQQPMIYICGECHTENEIKSRDPIRCRECGYRIMYKKRTKRLVVFDAR

SEQ ID NO: 6769 - protein, 108 aa, Homo sapiens
MAAPCLLRQGRAGALKTMLQEAQVFRGLASTVSLSAESGKSEKGQPQNSKKQSPPKKPAPVPAEPFDNTTYKNLQHHDYSTYTFLDLNLELSKFRMPQPSSGRESPRH

SEQ ID NO: 6770 - protein, 183 aa, Homo sapiens
MSRYLRPPNTSLFVRNVADDTRSEDLRREFGRYGPIVDVYVPLDFYTRRPRGFAYVQFEDVRDAEDALHNLDRKWICGRQIEIQFAQGDRKTPNQMKAKEGRNVYSSSRYDDYDRYRRSRSRSYERRRSRSRSFDYNYRRSYSPRNSRPTGRPRRSRSHSDNDRPNCSWNTQYSSAYYTSRKI

SEQ ID NO: 6771 - protein, 835 aa, Homo sapiens
MAAPILKDVVAYVEVWSSNGTENYSKTFTTQLVDMGAKVSKTFNKQVTHVIFKDGYQSTWDKAQKRGVKLVSVLWVEKCRTAGAHIDESLFPAANMNEHLSSLIKKKRKCMQPKDFNFKTPENDKRFQKKFEKMAKELQRQKTNLDDDVPILLFESNGSLIYTPTIEINSRHHSAMEKRLQEMKEKRENLSPTSSQMIQQSHDNPSNSLCEAPLNISRDTLCSDEYFAGGLHSSFDDLCGNSGCGNQERKLEGSINDIKSDVCISSLVLKANNIHSSPSFTHLDKSSPQKFLSNLSKEEINLQRNIAGKVVTPDQKQAAGMSQETFEEKYRLSPTLSSTKGHLLIHSRPRSSSVKRKRVSHGSHSPPKEKCKRKRSTRRSIMPRLQLCRSEDRLQHVAGPALEALSCGESSYDDYFSPDNLKERYSENLPPESQLPSSPAQLSCRSLSKKERTSIFEMSDFSCVGKKTRTVDITNFTAKTISSPRKTGNGEGRATSSCVTSAPEEALRCCRQAGKEDACPEGNGFSYTIEDPALPKGHDDDLTPLEGSLEEMKEAVGLKSTQNKGTTSKISNSSEGEAQSEHEPCFIVDCNMETSTEEKENLPGGYSGSVKNRPTRHDVLDDSCDGFKDLIKPHEELKKSGRGKKPTRTLVMTSMPSEKQNVVIQVVDKLKGFSIAPDVCETTTHVLSGKPLRTLNVLLGIARGCWVLSYDWVLWSLELGHWISEEPFELSHHFPAAPLCRSECHLSAGPYRGTLFADQPAMFVSPASSPPVAKLCELVHLCGGRVSQVPRQASIVIGPYSGKKKATVKYLSEKWVLDSITQHKVCAPENYLLSQ

SEQ ID NO: 6772 - protein, 263 aa, Homo sapiens
MDNSWRLGPAIGLSAGQSQLLVSLLLLLTRVQPGTDVAAPEHISYVPQLSNDTLAGRLTLSTFTLEQPLGQFSSHNISDLDTIWLVVALSNATQSFTAPRTNQDIPAPANFSQRGYYLTLRANRVLYQTRGQLHVLRVGNDTHCQPTKIGCNHPLPGPGPYRVKFLVMNDEGPVAETKWSSDTRLQQAQALRAVPGPQSPGTVVIIAILSILLAVLLTVLLAVLIYTCFNSCRSTSLSGPEEAGSVRRYTTHLAFSTPAEGAS

SEQ ID NO: 6773 - protein, 282 aa, Homo sapiens
MSGSSLPSALALSLLLVSGSLLPGPGAAQNEPRIVTSEEVIIRDSPVLPVTLQCNLTSSSHTLTYSYWTKNGVELSATRKNASNMEYRINKPRAEDSGEYHCVYHFVSAPKANATIEVKAAPDITGHKRSENKNEGQDATMYCKSVGYPHPDWIWRKKENGMPMDIVNTSGRFFIINKENYTELNIVNLQITEDPGEYECNATNAIGSASVVTVLRVRSHLAPLWPFLGILAEIIILVVIIVVYEKRKRPDEVPDDDEPAGPMKTNSTNNHKDKNLRQRNTN

SEQ ID NO: 6774 - protein, 453 aa, Homo sapiens
MGSVLGLCSMASWIPCLCGSAPCLLCRCCPSGNNSTVTRLIYALFLLVGVCVACVMLIPGMEEQLNKIPGFCENEKGVVPCNILVGYKAVYRLCFGLAMFYLLLSLLMIKVKSSSDPRAAVHNGFWFFKFAAAIAIIIGAFFIPEGTFTTVWFYVGMAGAFCFILIQLVLLIDFAHSWNESWVEKMEEGNSRCWYAALLSATALNYLLSLVAIVLFFVYYTHPASCSENKAFISVNMLLCVGASVMSILPKIQESQPRSGLLQSSVITVYTMYLTWSAMTNEPETNCNPSLLSIIGYNTTSTVPKEGQSVQWWHAQGIIGLILFLLCVFYSSIRTSNNSQVNKLTLTSDESTLIEDGGARSDGSLEDGDDVHRAVDNERDGVTYSYSFFHFMLFLASLYIMMTLTNWYRYEPSREMKSQWTAVWVKISSSWIGIVLYVWTLVAPLVLTNRDFD

SEQ ID NO: 6775 - protein, 57 aa, Homo sapiens
MLRCLYHWHRPVLNRRWSRLCLPKQYLFTMKLQSPEFQSLFTEGLKSLTGINAFHEN

SEQ ID NO: 6776 - protein, 498 aa, Homo sapiens
MRPPACWWLLAPPALLALLTCSLAFGLASEDTKKEVKQSQDLEKSGISRKNDIDLKGIVFVIQSQSNSFHAKRAEQLKKSILKQAADLTQELPSVLLLHQLAKQEGAWTILPLLPHFSVTYSRNSSWIFFCEEETRIQIPKLLETLRRYDPSKEWFLGKALHDEEATIIHHYAFSENPTVFKYPDFAAGWALSIPLVNKLTKRLKSESLKSDFTIDLKHEIALYIWDKGGGPPLTPVPEFCTNDVDFYCATTFHSFLPLCRKPVKKKDIFVAVKTCKKFHGDRIPIVKQTWESQASLIEYYSDYTENSIPTVDLGIPNTDRGHCGKTFAILERFLNRSQDKTAWLVIVDDDTLISISRLQHLLSCYDSGEPVFLGERYGYGLGTGGYSYITGGGGMVFSREAVRRLLASKCRCYSNDAPDDMVLGMCFSGLGIPVTHSPLFHQARPVDYPKDYLSHQVPISFHKHWNIDPVKVYFTWLAPSDEDKARQETQKGFREEL

SEQ ID NO: 6777 - protein, 1131 aa, Homo sapiens
MAGARSRDPWGASGICYLFGSLLVELLFSRAVAFNLDVMGALRKEGEPGSLFGFSVALHRQLQPRPQSWLLVGAPQALALPGQQANRTGGLFACPLSLEETDCYRVDIDQGADMQKESKENQWLGVSVRSQGPGGKIVTCAHRYEARQRVDQILETRDMIGRCFVLSQDLAIRDELDGGEWKFCEGRPQGHEQFGFCQQGTAAAFSPDSHYLLFGAPGTYNWKGLLFVTNIDSSDPDQLVYKTLDPADRLPGPAGDLALNSYLGFSIDSGKGLVRAEELSFVAGAPRANHKGAVVILRKDSASRLVPEVMLSGERLTSGFGYSLAVADLNSDGWPDLIVGAPYFFERQEELGGAVYVYLNQGGHWAGISPLRLCGSPDSMFGISLAVLGDLNQDGFPDIAVGAPFDGDGKVFIYHGSSLGVVAKPSQVLEGEAVGIKSFGYSLSGSLDMDGNQYPDLLVGSLADTAVLFRARPILHVSHEVSIAPRSIDLEQPNCAGGHSVCVDLRVCFSYIAVPSSYSPTVDADTDRRLRGQVPRVTFLSRNLEEPKHQASGTVWLKHQHDRVCGDAMFQLQENVKDKLRAIVVTLSYSLQTPRLRRQAPGQGLPPVAPILNAHQPSTQRAEIHFLKQGCGEDKICQSNLQLVRARFCTRVSDTEFQPLPMDVDGTTALFALSGQPVIGLELMVTNLPSDPAQPQADGDDAHEAQLLVMLPDSLHYSGVRALDPAEKPLCLSNENASHVECELGNPMKRGAQVTFYLILSTSGISIETTELEVELLLATISEQELHPVSARARVFIELPLSIAGMAIPQQLFFSGVVRGERAMQSERDVGSKVKYEVTVSNQGQSLRTLGSAFLNIMWPHEIANGKWLLYPMQVELEGGQGPGQKGLCSPRPNILHLDVDSRDRRRRELEPPEQQEPGERQEPSMSWWPVSSAEKKKNITLDCARGTANCVVFSCPLYSFDRAAVLHVWGRLWNSTFLEEYSAVKSLEVIVRANITVKSSIKNLMLRDASTVIPVMVYLDPMAVVAEGVPWWVILLAVLAGLLVLALLVLLLWKMGFFKRAKHPEATVPQYHAVKIPREDRQQFKEEKTGTILRNNWGSPRREGPDAHPILAADGHPELGPDGHPGPGTA

SEQ ID NO: 6778 - protein, 261 aa, Homo sapiens
MDRFLVKGAQGGLLRKQEEQEPTGEEPAVLGGDKESTRKRPRREAPGNGGHSAGPSWRHIRAEGLDCSYTVLFGKAEADEIFQELEKEVEYFTGALARVQVFGKWHSVPRKQATYGDAGLTYTFSGLTLSPKPWIPVLERIRDHVSGVTGQTFNFVLINRYKDGCDHIGEHRDDERELAPGSPIASVSFGACRDFVFRHKDSRGKSPSRRVAVVRLPLAHGSLLMMNHPTNTHWYHSLPVRKKVLAPRVNLTFRKILLTKK

SEQ ID NO: 6779 - protein, 885 aa, Homo sapiens
MAGGGGDLSTRRLNECISPVANEMNHLPAHSHDLQRMFTEDQGVDDRLLYDIVFKHFKRNKVEISNAIKKTFPFLEGLRDRDLITNKMFEDSQDSCRNLVPVQRVVYNVLSELEKTFNLPVLEALFSDVNMQEYPDLIHIYKGFENVIHDKLPLQESEEEEREERSGLQLSLEQGTGENSFRSLTWPPSGSPSHAGTTPPENGLSEHPCETEQINAKRKDTTSDKDDSLGSQQTNEQCAQKAEPTESCEQIAVQVNNGDAGREMPCPLPCDEESPEAELHNHGIQINSCSVRLVDIKKEKPFSNSKVECQAQARTHHNQASDIIVISSEDSEGSTDVDEPLEVFISAPRSEPVINNDNPLESNDEKEGQEATCSRPQIVPEPMDFRKLSTFRESFKKRVIGQDHDFSESSEEEAPAEASSGALRSKHGEKAPMTSRSTSTWRIPSRKRRFSSSDFSDLSNGEELQETCSSSLRRGSGSQPQEPENKKCSCVMCFPKGVPRSQEARTESSQASDMMDTMDVENNSTLEKHSGKRRKKRRHRSKVNGLQRGRKKDRPRKHLTLNNKVQKKRWQQRGRKANTRPLKRRRKRGPRIPKDENINFKQSELPVTCGEVKGTLYKERFKQGTSKKCIQSEDKKWFTPREFEIEGDRGASKNWKLSIRCGGYTLKVLMENKFLPEPPSTRKKRILESHNNTLVDPCPENSNICEVCNKWGRLFCCDTCPRSFHEHCHIPSVEANKNPWSCIFCRIKTIQERCPESQSGHQESEVLMRQMLPEEQLKCEFLLLKVYCDSKSCFFASEPYYNREGSQGPQKPMWLNKVKTSLNEQMYTRVEGFVQDMRLIFHNHKEFYREDKFTRLGIQVQDIFEKNFRNIFAIQETSKNIIMFI

SEQ ID NO: 6780 - protein, 354 aa, Homo sapiens
MGCTLSAEDKAAVERSKMIDRNLREDGEKAAREVKLLLLGAGESGKSTIVKQMKIIHEAGYSEEECKQYKAVVYSNTIQSIIAIIRAMGRLKIDFGDSARADDARQLFVLAGAAEEGFMTAELAGVIKRLWKDSGVQACFNRSREYQLNDSAAYYLNDLDRIAQPNYIPTQQDVLRTRVKTTGIVETHFTFKDLHFKMFDVGGQRSERKKWIHCFEGVTAIIFCVALSDYDLVLAEDEEMNRMHESMKLFDSICNNKWFTDTSIILFLNKKDLFEEKIKKSPLTICYPEYAGSNTYEEAAAYIQCQFEDLNKRKDTKEIYTHFTCATDTKNVQFVFDAVTDVIIKNNLKDCGLF

SEQ ID NO: 6781 - protein, 377 aa, Homo sapiens
MDSALSDPHNGSAEAGGPTNSTTRPPSTPEGIALAYGSLLLMALLPIFFGALRSVRCARGKNASDMPETITSRDAARFPIIASCTLLGLYLFFKIFSQEYINLLLSMYFFVLGILALSHTISPFMNKFFPASFPNRQYQLLFTQGSGENKEEIINYEFDTKDLVCLGLSSIVGVWYLLRKHWIANNLFGLAFSLNGVELLHLNNVSTGCILLGGLFIYDVFWVFGTNVMVTVAKSFEAPIKLVFPQDLLEKGLEANNFAMLGLGDVVIPGIFIALLLRFDISLKKNTHTYFYTSFAAYIFGLGLTIFIMHIFKHAQPALLYLVPACIGFPVLVALAKGEVTEMFSYEESNPKDPAAVTESKEGTEASASKGLEKKEK

SEQ ID NO: 6782 - protein, 671 aa, Homo sapiens
MKQIFFLDDSGPPFGHMVLALGGYLGGFDGNFLWNRIGAEYSSNVPVWSLRLLPALAGALSVPMAYQIVLELHFSHCAAMGAALLMLIENALITQSRLMLLESVLIFFNLLAVLSYLKFFNCQKHSPFSLSWWFWLTLTGVACSCAVGIKYMGVFTYVLVLGVAAVHAWHLLGDQTLSNVCVFCHLLARAVALLVIPVVLYLLFFYVHLILVFRSGPHDQIMSSAFQASLEGGLARITQGQPLEVAFGSQVTLRNVFGKPVPCWLHSHQDTYPMIYENGRGSSHQQQVTCYPFKDVNNWWIVKDPRRHQLVVSSPPRPVRHGDMVQLVHGMTTRSLNTHDVAAPLSPHSQEVSCYIDYNISMPAQNLWRLEIVNRGSDTDVWKTILSEVRFVHVNTSAVLKLSGAHLPDWGYRQLEIVGEKLSRGYHGSTVWNVEEHRYGASQEQRERERELHSPAQVDVSRNLSFMARFSELQWRMLALRSDDSEHKYSSSPLEWVTLDTNIAYWLHPRTSAQIHLLGNIVIWVSGSLALAIYALLSLWYLLRRRRNVHDLPQDAWLRWVLAGALCAGGWAVNYLPFFLMEKTLFLYHYLPALTFQILLLPVVLQHISDHLCRSQLQRSIFSALVVAWYSSACHVSNTLRPLTYGDKSLSPHELKALRWKDSWDILIRKH

SEQ ID NO: 6783 - protein, 343 aa, Homo sapiens
MPRRSLHAAAVLLLVILKEQPSSPAPVNGSKWTYFGPDGENSWSKKYPSCGGLLQSPIDLHSDILQYDASLTPLEFQGYNLSANKQFLLTNNGHSVKLNLPSDMHIQGLQSRYSATQLHLHWGNPNDPHGSEHTVSGQHFAAELHIVHYNSDLYPDASTASNKSEGLAVLAVLIEMGSFNPSYDKIFSHLQHVKYKGQEAFVPGFNIEELLPERTAEYYRYRGSLTTPPCNPTVLWTVFRNPVQISQEQLLALETALYCTHMDDPSPREMINNFRQVQKFDERLVYTSFSQGIILSLALAGILGICIVVVVSIWLFRRKSIKKGDNKGVIYKPATKMETEAHA

SEQ ID NO: 6784 - protein, 298 aa, Homo sapiens
MHHQKYLQRFLGGKREKKQKEACSIPGIGKRMAEKIIEILESGHLRKLDHISESVPVLELFSNIWGAGTKTAQMWYQQGFRSLEDIRSQASLTTQQAIGLKHYSDFLERMPREEATEIEQTVQKAAQAFNSGLLCVACGSYRRGKATCGDVDVLITHPDGRSHRGIFSRLLDSLRQEGFLTDDLVSQEENGQQQKYLGVCRLPGPGRRHRRLDIIVVPYSEFACALLYFTGSAHFNRSMRALAKTKGMSLSEHALSTAVVRNTHGCKVGPGRVLPTPTEKDVFRLLGLPYREPAERDW

SEQ ID NO: 6785 - protein, 692 aa, Homo sapiens
MKIFCSRANPTTGSVEWLEEDEHYDYHQEIARSSYADMLHDKDRNVKYYQGIRAAVSRVKDRGQKALVLDIGTGTGLLSMMAVTAGADFCYAIEVFKPMADAAVKIVEKNGFSDKIKVINKHSTEVTVGPEGDMPCRANILVTELFDTELIGEGALPSYEHAHRHLVEENCEAVPHRATVYAQLVESGRMWSWNKLFPIHVQTSLGEQVIVPPVDVESCPGAPSVCDIQLNQVSPADFTVLSDVLPMFSIDFSKQVSSSAACHSRRFEPLTSGRAQVVLSWWDIEMDPEGKIKCTMAPFWAHSDPEEMQWRDHWMQCVYFLPQEEPVVQGSALYLVAHHDDYCVWYSLQRTSPEKNERVRQMRPVCDCQAHLLWNRPRFGEINDQDRTDRYVQALRTVLKPDSVCLCVSDGSLLSVLAHHLGVEQVFTVESSAASHKLLRKIFKANHLEDKINIIEKRPELLTNEDLQGRKVSLLLGEPFFTTSLLPWHNLYFWYVRTAVDQHLGPGAMVMPQAASLHAVVVEFRDLWRIRSPCGDCEGFDVHIMDDMIKRALDFRESREAEPHPLWEYPCRSLSEPWQILTFDFQQPVPLQPLCAEGTVELRRPGQSHAAVLWMEYHLTPECTLSTGLLEPADPEGGCCWNPHCKQAVYFFSPAPDPRALLGGPRTVSYAVEFHPDTGDIIMEFRHADTPD

SEQ ID NO: 6786 - protein, 99 aa, Homo sapiens
MTSALTQGLERIPDQLGYLVLSEGAVLASSGDLENDEQAASAISELVSTACGFRLHRGMNVPFKRLSVVFGEHTLLVTVSGQRVFVVKRQNRGREPIDV

SEQ ID NO: 6787 - protein, 496 aa, Homo sapiens
MAAPEPARAAPPPPPPPPPPPGADRVVKAVPFPPTHRLTSEEVFDLDGIPRVDVLKNHLVKEGRVDEEIALRIINEGAAILRREKTMIEVEAPITVCGDIHGQFFDLMKLFEVGGSPANTRYLFLGDYVDRGYFSIECVLYLWVLKILYPSTLFLLRGNHECRHLTEYFTFKQECKIKYSERVYEACMEAFDSLPLAALLNQQFLCVHGGLSPEIHTLDDIRRLDRFKEPPAFGPMCDLLWSDPSEDFGNEKSQEHFSHNTVRGCSYFYNYPAVCEFLQNNNLLSIIRAHEAQDAGYRMYRKSQTTGFPSLITIFSAPNYLDVYNNKAAVLKYENNVMNIRQFNCSPHPYWLPNFMDVFTWSLPFVGEKVTEMLVNVLSICSDDELMTEGEDQFDGSAAARKEIIRNKIRAIGKMARVFSVLREESESVLTLKGLTPTGMLPSGVLAGGRQTLQSGNDVMQLAVPQMDWGTPHSFANNSHNACREFLLFFSSCLSS

SEQ ID NO: 6788 - protein, 219 aa, Homo sapiens
MKLLLWACIVCVAFARKRRFPFIGEDDNDDGHPLHPSLNIPYGIRNLPPPLYYRPVNTVPSYPGNTYTDTGLPSYPWILTSPGFPYVYHIRGFPLATQLNVPPLPPRGFPFVPPSRFFSAAAAPAAPPIAAEPAAAAPLTATPVAAEPAAGAPVAAEPAAEAPVGAEPAAEAPVAAEPAAEAPVGVEPAAEEPSPAEPATAKPAAPEPHPSPSLEQANQ

SEQ ID NO: 6789 - protein, 2403 aa, Homo sapiens
MGISTVILEMCLLWGQVLSTGGWIPRTTDYASLIPSEVPLDPTVAEGSPFPSESTLESTVAEGSPISLESTLESTVAEGSLIPSESTLESTVAEGSDSGLALRLVNGDGRCQGRVEILYRGSWGTVCDDSWDTNDANVVCRQLGCGWAMSAPGNAWFGQGSGPIALDDVRCSGHESYLWSCPHNGWLSHNCGHGEDAGVICSAAQPQSTLRPESWPVRISPPVPTEGSESSLALRLVNGGDRCRGRVEVLYRGSWGTVCDDYWDTNDANVVCRQLGCGWAMSAPGNAQFGQGSGPIVLDDVRCSGHESYLWSCPHNGWLTHNCGHSEDAGVICSAPQSRPTPSPDTWPTSHASTAGPESSLALRLVNGGDRCQGRVEVLYRGSWGTVCDDSWDTSDANVVCRQLGCGWATSAPGNARFGQGSGPIVLDDVRCSGYESYLWSCPHNGWLSHNCQHSEDAGVICSDTLPTITLPASTVGSESSLALRLVNGGDRCQGRVEVLYRGSWGTVCDDSWDTNDANVVCRQLGCGWAMLAPGNARFGQGSGPIVLDDVRCSGNESYLWSCPHNGWLSHNCGHSEDAGVICSGPESSLALRLVNGGDRCQGRVEVLYRGSWGTVCDDSWDTNDANVVCRQLGCGWATSAPGNARFGQGSGPIVLDDVRCSGHESYLWSCPNNGWLSHNCGHHEDAGVICSAAQSRSTPRPDTLSTITLPPSTVGSESSLTLRLVNGSDRCQGRVEVLYRGSWGTVCDDSWDTNDANVVCRQLGCGWATSAPGNARFGQGSGPIVLDDVRCSGHESYLWSCPHNGWLSHNCGHHEDAGVICSVSQSRPTPSPDTWPTSHASTAGPESSLALRLVNGGDRCQGRVEVLYRGSWGTVCDDSWDTSDANVVCRQLGCGWATSAPGNARFGQGSGPIVLDDVRCSGYESYLWSCPHNGWLSHNCQHSEDAGVICSAAHSWSTPSPDTLPTITLPASTVGSESSLALRLVNGGDRCQGRVEVLYQGSWGTVCDDSWDTNDANVVCRQLGCGWAMSAPGNARFGQGSGPIVLDDVRCSGHESYLWSCPHNGWLSHNCGHSEDAGVICSASQSRPTPSPDTWPTSHASTAGSESSLALRLVNGGDRCQGRVEVLYRGSWGTVCDDYWDTNDANVVCRQLGCGWAMSAPGNARFGQGSGPIVLDDVRCSGHESYLWSCPHNGWLSHNCGHHEDAGVICSASQSQPTPSPDTWPTSHASTAGSESSLALRLVNGGDRCQGRVEVLYRGSWGTVCDDYWDTNDANVVCRQLGCGWATSAPGNARFGQGSGPIVLDDVRCSGHESYLWSCPHNGWLSHNCGHHEDAGVICSASQSQPTPSPDTWPTSHASTAGSESSLALRLVNGGDRCQGRVEVLYRGSWGTVCDDYWDTNDANVVCRQLGCGWATSAPGNARFGQGSGPIVLDDVRCSGHESYLWSCPHNGWLSHNCGHHEDAGVICSASQSQPTPSPDTWPTSRASTAGSESTLALRLVNGGDRCRGRVEVLYQGSWGTVCDDYWDTNDANVVCRQLGCGWAMSAPGNAQFGQGSGPIVLDDVRCSGHESYLWSCPHNGWLSHNCGHHEDAGVICSAAQSQSTPRPDTWLTTNLPALTVGSESSLALRLVNGGDRCRGRVEVLYRGSWGTVCDDSWDTNDANVVCRQLGCGWAMSAPGNARFGQGSGPIVLDDVRCSGNESYLWSCPHKGWLTHNCGHHEDAGVICSATQINSTTTDWWHPTTTTTARPSSNCGGFLFYASGTFSSPSYPAYYPNNAKCVWEIEVNSGYRINLGFSNLKLEAHHNCSFDYVEIFDGSLNSSLLLGKICNDTRQIFTSSYNRMTIHFRSDISFQNTGFLAWYNSFPSDATLRLVNLNSSYGLCAGRVEIYHGGTWGTVCDDSWTIQEAEVVCRQLGCGRAVSALGNAYFGSGSGPITLDDVECSGTESTLWQCRNRGWFSHNCNHREDAGVICSGNHLSTPAPFLNITRPNTDYSCGGFLSQPSGDFSSPFYPGNYPNNAKCVWDIEVQNNYRVTVIFRDVQLEGGCNYDYIEVFDGPYRSSPLIARVCDGARGSFTSSSNFMSIRFISDHSITRRGFRAEYYSSPSNDSTNLLCLPNHMQASVSRSYLQSLGFSASDLVISTWNGYYECRPQITPNLVIFTIPYSGCGTFKQADNDTIDYSNFLTAAVSGGIIKRRTDLRIHVSCRMLQNTWVDTMYIANDTIHVANNTIQVEEVQYGNFDVNISFYTSSSFLYPVTSRPYYVDLNQDLYVQAEILHSDAVLTLFVDTCVASPYSNDFTSLTYDLIRSGCVRDDTYGPYSSPSLRIARFRFRAFHFLNRFPSVYLRCKMVVCRAYDPSSRCYRGCVLRSKRDVGSYQEKVDVVLGPIQLQTPPRREEEPR

SEQ ID NO: 6790 - protein, 1154 aa, Homo sapiens
MQYLNIKEDCNAMAFCAKMRSSKKTEVNLEAPEPGVEVIFYLSDREPLRLGSGEYTAEELCIRAAQACRISPLCHNLFALYDENTKLWYAPNRTITVDDKMSLRLHYRMRFYFTNWHGTNDNEQSVWRHSPKKQKNGYEKKKIPDATPLLDASSLEYLFAQGQYDLVKCLAPIRDPKTEQDGHDIENECLGMAVLAISHYAMMKKMQLPELPKDISYKRYIPETLNKSIRQRNLLTRMRINNVFKDFLKEFNNKTICDSSVSTHDLKVKYLATLETLTKHYGAEIFETSMLLISSENEMNWFHSNDGGNVLYYEVMVTGNLGIQWRHKPNVVSVEKEKNKLKRKKLENKHKKDEEKNKIREEWNNFSYFPEITHIVIKESVVSINKQDNKKMELKLSSHEEALSFVSLVDGYFRLTADAHHYLCTDVAPPLIVHNIQNGCHGPICTEYAINKLRQEGSEEGMYVLRWSCTDFDNILMTVTCFEKSEQVQGAQKQFKNFQIEVQKGRYSLHGSDRSFPSLGDLMSHLKKQILRTDNISFMLKRCCQPKPREISNLLVATKKAQEWQPVYPMSQLSFDRILKKDLVQGEHLGRGTRTHIYSGTLMDYKDDEGTSEEKKIKVILKVLDPSHRDISLAFFEAASMMRQVSHKHIVYLYGVCVRDVENIMVEEFVEGGPLDLFMHRKSDVLTTPWKFKVAKQLASALSYLEDKDLVHGNVCTKNLLLAREGIDSECGPFIKLSDPGIPITVLSRQECIERIPWIAPECVEDSKNLSVAADKWSFGTTLWEICYNGEIPLKDKTLIEKERFYESRCRPVTPSCKELADLMTRCMNYDPNQRPFFRAIMRDINKLEEQNPDIVSEKKPATEVDPTHFEKRFLKRIRDLGEGHFGKVELCRYDPEGDNTGEQVAVKSLKPESGGNHIADLKKEIEILRNLYHENIVKYKGICTEDGGNGIKLIMEFLPSGSLKEYLPKNKNKINLKQQLKYAVQICKGMDYLGSRQYVHRDLAARNVLVESEHQVKIGDFGLTKAIETDKEYYTVKDDRDSPVFWYAPECLMQSKFYIASDVWSFGVTLHELLTYCDSDSSPMALFLKMIGPTHGQMTVTRLVNTLKEGKRLPCPPNCPDEVYQLMRKCWEFQPSNRTSFQNLIEGFEALLK

SEQ ID NO: 6791 - protein, 777 aa, Homo sapiens
MDSKESLTPGREENPSSVLAQERGDVMDFYKTLRGGATVKVSASSPSLAVASQSDSKQRRLLVDFPKGSVSNAQQPDLSKAVSLSMGLYMGETETKVMGNDLGFPQQGQISLSSGETDLKLLEESIANLNRSTSVPENPKSSASTAVSAAPTEKEFPKTHSDVSSEQQHLKGQTGTNGGNVKLYTTDQSTFDILQDLEFSSGSPGKETNESPWRSDLLIDENCLLSPLAGEDDSFLLEGNSNEDCKPLILPDTKPKIKDNGDLVLSSPSNVTLPQVKTEKEDFIELCTPGVIKQEKLGTVYCQASFPGANIIGNKMSAISVHGVSTSGGQMYHYDMNTASLSQQQDQKPIFNVIPPIPVGSENWNRCQGSGDDNLTSLGTLNFPGRTVFSNGYSSPSMRPDVSSPPSSSSTATTGPPPKLCLVCSDEASGCHYGVLTCGSCKVFFKRAVEGQHNYLCAGRNDCIIDKIRRKNCPACRYRKCLQAGMNLEARKTKKKIKGIQQATTGVSQETSENPGNKTIVPATLPQLTPTLVSLLEVIEPEVLYAGYDSSVPDSTWRIMTTLNMLGGRQVIAAVKWAKAIPGFRNLHLDDQMTLLQYSWMFLMAFALGWRSYRQSSANLLCFAPDLIINEQRMTLPCMYDQCKHMLYVSSELHRLQVSYEEYLCMKTLLLLSSVPKDGLKSQELFDEIRMTYIKELGKAIVKREGNSSQNWQRFYQLTKLLDSMHEVVENLLNYCFQTFLDKTMSIEFPEMLAEIITNQIPKYSNGNIKKLLFHQK

SEQ ID NO: 6792 - protein, 586 aa, Homo sapiens
MAASGVEKSSKKKTEKKLAAREEAKLLAGFMGVMNNMRKQKTLCDVILMVQERKIPAHRVVLAAASHFFNLMFTTNMLESKSFEVELKDAEPDIIEQLVEFAYTARISVNSNNVQSLLDAANQYQIEPVKKMCVDFLKEQVDASNCLGISVLAECLDCPELKATADDFIHQHFTEVYKTDEFLQLDVKRVTHLLNQDTLTVRAEDQVYDAAVRWLKYDEPNRQPFMVDILAKVRFPLISKNFLSKTVQAEPLIQDNPECLKMVISGMRYHLLSPEDREELVDGTRPRRKKHDYRIALFGGSQPQSCRYFNPKDYSWTDIRCPFEKRRDAACVFWDNVVYILGGSQLFPIKRMDCYNVVKDSWYSKLGPPTPRDSLAACAAEGKIYTSGGSEVGNSALYLFECYDTRTESWHTKPSMLTQRCSHGMVEANGLIYVCGGSLGNNVSGRVLNSCEVYDPATETWTELCPMIEARKNHGLVFVKDKIFAVGGQNGLGGLDNVEYYDIKLNEWKMVSPMPWKGVTVKCAAVGSIVYVLAGFQGVGRLGHILEYNTETDKWVANSKVRAFPVTSCLICVVDTCGANEETLET

SEQ ID NO: 6793 - protein, 823 aa, Homo sapiens
MAFSQVQCLDDNHVNWRSSESKPEFFYSEEQRLALEALVARGRDAFYEVLKRENIRDFLSELELKRILETIEVYDPGSEDPRGTGPSQGPEDNGVGDGEEASGADGVPIEAEPLPSLEYWPQKSDRSIPQLDLGWPDTIAYRGVTRASVYMQPPIDGQAHIKEVVRKMISQAQKVIAVVMDMFTDVDIFKDLLDAGFKRKVAVYIIVDESNVKYFLHMCERACMHLGHLKNLRVRSSGGTEFFTRSATKFKGALAQKFMFVDGDRAVCGSYSFTWSAARTDRNVISVLSGQVVEMFDRQFQELYLMSHSVSLKGIPMEKEPEPEPIVLPSVVPLVPAGTVAKKLVNPKYALVKAKSVDEIAKISSEKQEAKKPLGLKGPALAEHPGELPELLPPIHPGLLHLERANMFEYLPTWVEPDPEPGSDILGYINIIDPNIWNPQPSQMNRIKIRDTSQASAQHQLWKQSQDSRPRPEPCPPPEPSAPQDGVPAENGLPQGDPEPLPPVPKPRTVPVADVLARDSSDIGWVLELPKEEAPQNGTDHRLPRMAGPGHAPLQRQLSVTQDDPESLGVGLPNGLDGVEEEDDDDYVTLSDQDSHSGSSGRGPGPRRPSVASSVSEEYFEVREHSVPLRRRHSEQVANGPTPPPRRQLSAPHITRGTFVGPQGGSPWAQSRGREEADALKRMQAQRSTDKEAQGQQFHHHRVPASGTRDKDGFPGPPRYRSAADSVQSSTRNAGPAMAGPHHWQAKGGQVPRLLPDPGSPRLAQNARPMTDGRATEEHPSPFGIPYSKLSQSKHLKARTGGSQWASSDSKRRAQAPRDRKDP

SEQ ID NO: 6794 - protein, 163 aa, Homo sapiens
MTMRHNWTPDLSPLWVLLLCAHVVTLLVRATPVSQTTTAATASVRSTKDPCPSQPPVFPAAKQCPALEVTWPEVEVPLNGTLSLSCVACSRFPNFSILYWLGNGSFIEHLPGRLWEGSTSRERGSTGWAEGNLAPHPRSPALQPQQSTAAGLRLSTGPAAAQP

SEQ ID NO: 6795 - protein, 275 aa, Homo sapiens
MTDDKDVLRDVWFGRIPTCFTLYQDEITEREAEPYYLLLPRVSYLTLVTDKVKKHFQKVMRQEDISEIWFEYEGTPLKWHYPIGLLFDLLASSSALPWNITVHFKSFPEKDLLHCPSKDAIEAHFMSCMKEADALKHKSQVINEMQKKDHKQLWMGLQNDRFDQFWAINRKLMEYPAEENGFRYIPFRIYQTTTERPFIQKLFRPVAADGQLHTLGDLLKEVCPSAIDPEDGEKKNQVMIHGIEPMLETPLQWLSEHLSYPDNFLHISIIPQPTD

SEQ ID NO: 6796 - protein, 92 aa, Homo sapiens
MASLGHILVFCVGLLTMAKAESPKEHDPFTYDYQSLQIGGLVIAGILFILGILIVLSRRCRCKFNQQQRTGEPDEEEGTFRSSIRRLSTRRR

SEQ ID NO: 6797 - protein, 1169 aa, Homo sapiens
MAEEEVAKLEKHLMLLRQEYVKLQKKLAETEKRCALLAAQANKESSSESFISRLLAIVADLYEQEQYSDLKIKVGDRHISAHKFVLAARSDSWSLANLSSTKELDLSDANPEVTMTMLRWIYTDELEFREDDVFLTELMKLANRFQLQLLRERCEKGVMSLVNVRNCIRFYQTAEELNASTLMNYCAEIIASHWDDLRKEDFSSMSAQLLYKMIKSKTEYPLHKAIKVEREDVVFLYLIEMDSQLPGKLNEADHNGDLALDLALSRRLESIATTLVSHKADVDMVDKSGWSLLHKGIQRGDLFAATFLIKNGAFVNAATLGAQETPLHLVALYSSKKHSADVMSEMAQIAEALLQAGANPNMQDSKGRTPLHVSIMAGNEYVFSQLLQCKQLDLELKDHEGSTALWLAVQHITVSSDQSVNPFEDVPVVNGTSFDENSFAARLIQRGSHTDAPDTATGNCLLQRAAGAGNEAAALFLATNGAHVNHRNKWGETPLHTACRHGLANLTAELLQQGANPNLQTEEALPLPKEAASLTSLADSVHLQTPLHMAIAYNHPDVVSVILEQKANALHATNNLQIIPDFSLKDSRDQTVLGLALWTGMHTIAAQLLGSGAAINDTMSDGQTLLHMAIQRQDSKSALFLLEHQADINVRTQDGETALQLAIRNQLPLVVDAICTRGADMSVPDEKGNPPLWLALANNLEDIASTLVRHGCDATCWGPGPGGCLQTLLHRAIDENNEPTACFLIRSGCDVNSPRQPGANGEGEEEARDGQTPLHLAASWGLEETVQCLLEFGANVNAQDAEGRTPIHVAISSQHGVIIQLLVSHPDIHLNVRDRQGLTPFACAMTFKNNKSAEAILKRESGAAEQVDNKGRNFLHVAVQNSDIESVLFLISVHANVNSRVQDASKLTPLHLAVQAGSEIIVRNLLLAGAKVNELTKHRQTALHLAAQQDLPTICSVLLENGVDFAAVDENGNNALHLAVMHGRLNNIRVLLTECTVDAEAFNLRGQSPLHILGQYGKENAAAIFDLFLECMPGYPLDKPDADGSTVLLLAYMKGNANLCRAIVRSGARLGVNNNQGVNIFNYQVATKQLLFRLLDMLSKEPPWCDGSYCYECTARFGVTTRKHHCRHCGRLLCHKCSTKEIPIIKFDLNKPVRVCNICFDVLTLGGVS

SEQ ID NO: 6798 - protein, 236 aa, Homo sapiens
MTAEFLSLLCLGLCLGYEDEKKNEKPPKPSLHAWPSSVVEAESNVTLKCQAHSQNVTFVLRKVNDSGYKQEQSSAENEAEFPFTDLKPKDAGRYFCAYKTTASHEWSESSEHLQLVVTDKHDELEAPSMKTDTRTIFVAIFSCISILLLFLSVFIIYRCSQHSSSSEESTKRTSHSKLPEQEAAEADLSNMERVSLSTADPQGVTYAELSTSALSEAASDTTQEPPGSHEYAALKV

SEQ ID NO: 6799 - protein, 1454 aa, Homo sapiens
MESSSSDYYNKDNEEESLLANVASLRHELKITEWSLQSLGEELSSVSPSENSDYAPNPSRSEKLILDVQPSHPGLLNYSPYENVCKISGSSTDFQKKPRDKMFSSSAPVDQEIKSLREKLNKLRQQNACLVTQNHSLMTKFESIHFELTQSRAKVSMLESAQQQAASVPILEEQIINLEAEVSAQDKVLREAENKLEQSQKMVIEKEQSLQESKEECIKLKVDLLEQTKQGKRAERQRNEALYNAEELSKAFQQYKKKVAEKLEKVQAEEEILERNLTNCEKENKRLQERCGLYKSELEILKEKLRQLKEENNNGKEKLRIMAVKNSEVMAQLTESRQSILKLESELENKDEILRDKFSLMNENRELKVRVAAQNERLDLCQQEIESSRVELRSLEKIISQLPLKRELFGFKSYLSKYQMSSFSNKEDRCIGCCEANKLVISELRIKLAIKEAEIQKLHANLTANQLSQSLITCNDSQESSKLSSLETEPVKLGGHQVESVKDQNQHTMNKQYEKERQRLVTGIEELRTKLIQIEAENSDLKVNMAHRTSQFQLIQEELLEKASNSSKLESEMTKKCSQLLTLEKQLEEKIVAYSSIAAKNAELEQELMEKNEKIRSLETNINTEHEKICLAFEKAKKIHLEQHKEMEKQIERLEAQLEKKDQQFKEQEKTMSMLQQDIICKQHHLESLDRLLTESKGEMKKENMKKDEALKALQNQVSEETIKVRQLDSALEICKEELVLHLNQLEGNKEKFEKQLKKKSEEVYCLQKELKIKNHSLQETSEQNVILQHTLQQQQQMLQQETIRNGELEDTQTKLEKQVSKLEQELQKQRESSAEKLRKMEEKCESAAHEADLKRQKVIELTGTARQVKIEMDQYKEELSKMEKEIMHLKRDGENKAMHLSQLDMILDQTKTELEKKTNAVKELEKLQHSTETELTEALQKREVLETELQNAHGELKSTLRQLQELRDVLQKAQLSLEEKYTTIKDLTAELRECKMEIEDKKQELLEMDQALKERNWELKQRAAQVTHLDMTIREHRGEMEQKIIKLEGTLEKSELELKECNKQIESLNDKLQNAKEQLREKEFIMLQNEQEISQLKKEIERTQQRMKEMESVMKEQEQYIATQYKEAIDLGQELRLTREQVQNSHTELAEARHQQVQAQREIERLSSELEDMKQLSKEKDAHGNHLAEELGASKVREAHLEARMQAEIKKLSAEVESLKEAYHMEMISHQENHAKWKISADSQKSSVQQLNEQLEKAKLELEEAQDTVSNLHQQVQDRNEVIEAANEALLTKESELTRLQAKISGHEKAEDIKFLPAPFTSPTEIMPDVQDPKFAKCFHTSFSKCTKLRRSISASDLTFKIHGDEDLSEELLQDLKKMQLEQPSTLEESHKNLTYTQPDSFKPLTYNLEADSSENNDFNTLSGMLRYINKEVRLLKKSSMQTGAGLNQGENV

SEQ ID NO: 6800 - protein, 248 aa, Homo sapiens
MAAGMYLEHYLDSIENLPFELQRNFQLMRDLDQRTEDLKAEIDKLATEYMSSARSLSSEEKLALLKQIQEAYGKCKEFGDDKVQLAMQTYEMVDKHIRRLDTDLARFEADLKEKQIESSDYDSSSSKGKKSRTQKEKKAARARSKGKNSDEEAPKTAQKKLKLVRTSPEYGMPSVTFGSVHPSDVLDMPVDPNEPTYCLCHQVSYGEMIGCDNPDCSIEWFHFACVGLTTKPRGKWFCPRCSQERKKK

SEQ ID NO: 6801 - protein, 453 aa, Homo sapiens
MAIFRQLSLGAKATLAAVTVFVSMIASRSYLAESLELRAWRWLLRLQLALFVNSLLLIGSLYIWRSTVSNLCHSPAAESTCFQLWKVVVLAFLALAHSSFFTMFFLVAEEPYLFSLAAYSCLGAYIIMLFFLFILSGMEQAYQLLAWRSGRVVGSLEKTRKLVLRPALAVGVTAVLSVAGILNAAQPPAVKTVEVPIHQLPASMNNLKIVLLSDIHLGPTVGRTKMEMFVRMVNVLEPDITVIVGDLSDSEASVLRTAVAPLGQLHSHLGAYFVTGNHEYYTSDVSNWFALLESLHVQPLHNENVKISATRAQRGGGGSGSGSEDEDWICLAGVDDIEADILHYSGHGMDLDKALEGCSPDHTIILLAHQPLAAKRALQARPDINLILSGHTHAGQIFPLNVAAYLLNPFFAGLYQVAQATFVYVSPGTAYYGIPMRLGSRAEITELILQRSP

SEQ ID NO: 6802 - protein, 415 aa, Homo sapiens
MSPEVALNRISPMLSPFISSVVRNGKVGLDATNCLRITDLKSGCTSLTPGPNCDRFKLHIPYAGETLKWDIIFNAQYPELPPDFIFGEDAEFLPDPSALQNLASWNPSNPECLLLVVKELVQQYHQFQCSRLRESSRLMFEYQTLLEEPQYGENMEIYAGKKNNWTGEFSARFLLKLPVDFSNIPTYLLKDVNEDPGEDVALLSVSFEDTEATQVYPKLYLSPRIEHALGGSSALHIPAFPGGGCLIDYVPQVCHLLTNKVQYVIQGYHKRREYIAAFLSHFGTGVVEYDAEGFTKLTLLLMWKDFCFLVHIDLPLFFPRDQPTLTFQSVYHFTNSGQLYSQAQKNYPYSPRWDGNEMAKRAKGCQGSRDACSPWEQVLAFAVAKTGCKLLQPQRNWPSSRGPPWRASEGERTAQ

SEQ ID NO: 6803 - protein, 695 aa, Homo sapiens
MNPTETKAIPVSQQMEGPHLPNKKKHKKQAVKTEPEKKSQSTKLSVVHEKKSQEGKPKEHTEPKSLPKQASDTGSNDAHNKKAVSRSAEQQPSEKSTEPKTKPQDMISAGGESVAGITAISGKPGDKKKEKKSLTPAVPVESKPDKPSGKSGMDAALDDLIDTLGGPEETEEENTTYTGPEVSDPMSSTYIEELGKREVTIPPKYRELLAKPIGPDDAIDALSSDFTCGSPTAAGKKTEKEESTEVLKAQSAGTVRSAAPPQEKKRKVEKDTMSDQALEALSASLGTRQAEPELDLRSIKEVDEAKAKEEKLEKCGEDDETIPSEYRLKPATDKDGKPLLPEPEEKPKPRSESELIDELSEDFDRSECKEKPSKPTEKTEESKAAAPAPVSEAVCRTSMCSIQSAPPEPATLKGTVPDDAVEALADSLGKKEADPEDGKPVMDKVKEKAKEEDREKLGEKEETIPPDYRLEEVKDKDGKPLLPKESKEQLPPMSEDFLLDALSEDFSGPQNASSLKFEDAKLAAAISEVVSQTPASTTQAGAPPRDTSQSDKDLDDALDKLSDSLGQRQPDPDENKPMEDKVKEKAKAEHRDKLGERDDTIPPEYRHLLDDNGQDKPVKPPTKKSEDSKKPADDQDPIDALSGDLDSCPSTTETSQNTAKDKCKKAASSSKAPKNGGKAKDSAKTTEETSKPKDD
